United States Patent Application Publication US 2018/0126003 A1 - sequence listing, part 17

SEQ ID NO: 27135 - DNA, 1470 bp, Artificial Sequence
  derived and/or modified sequence
atgagcttcagaaaggtggtgagacagagcaagttcagacacgtgttcggccagcccgtgaagaacgaccagtgctacgaggacatcagagtgagcagagtgacctgggacagcaccttctgcgccgtgaaccccaagttcctggccgtgatcgtggaggccagcggcggcggcgccttcctggtgctgcccctgagcaagaccggcagaatcgacaaggcctaccccaccgtgtgcggccacaccggccccgtgctggacatcgactggtgcccccacaacgacgaggtgatcgccagcggcagcgaggactgcaccgtgatggtgtggcagatccccgagaacggcctgaccagccccctgaccgagcccgtggtggtgctggagggccacaccaagagagtgggcatcatcgcctggcaccccaccgccagaaacgtgctgctgagcgccggctgcgacaacgtggtgctgatctggaacgtgggcaccgccgaggagctgtacagactggacagcctgcaccccgacctgatctacaacgtgagctggaaccacaacggcagcctgttctgcagcgcctgcaaggacaagagcgtgagaatcatcgaccccagaagaggcaccctggtggccgagagagagaaggcccacgagggcgccagacccatgagagccatcttcctggccgacggcaaggtgttcaccaccggcttcagcagaatgagcgagagacagctggccctgtgggaccccgagaacctggaggagcccatggccctgcaggagctggacagcagcaacggcgccctgctgcccttctacgaccccgacaccagcgtggtgtacgtgtgcggcaagggcgacagcagcatcagatacttcgagatcaccgaggagcccccctacatccacttcctgaacaccttcaccagcaaggagccccagagaggcatgggcagcatgcccaagagaggcctggaggtgagcaagtgcgagatcgccagattctacaagctgcacgagagaaagtgcgagcccatcgtgatgaccgtgcccagaaagagcgacctgttccaggacgacctgtaccccgacaccgccggccccgaggccgccctggaggccgaggagtgggtgagcggcagagacgccgaccccatcctgatcagcctgagagaggcctacgtgcccagcaagcagagagacctgaagatcagcagaagaaacgtgctgagcgacagcagacccgccatggcccccggcagcagccacctgggcgcccccgccagcaccaccaccgccgccgacgccacccccagcggcagcctggccagagccggcgaggccggcaagctggaggaggtgatgcaggagctgagagccctgagagccctggtgaaggagcagggcgacagaatctgcagactggaggagcagctgggcagaatggagaacggcgacgcctag

SEQ ID NO: 27136 - DNA, 864 bp, Artificial Sequence
  derived and/or modified sequence
tgcttcctgctgcccagaggcagagaccccgagccccccgaggccggcgccgccgccccctgcgcccccggcgcccccgacatgagcttcagaaaggtggtgagacagagcaagttcagacacgtgttcggccagcccgtgaagaacgaccagtgctacgaggacatcagagtgagcagagtgacctgggacagcaccttctgcgccgtgaaccccaagttcctggccgtgatcgtggaggccagcggcggcggcgccttcctggtgctgcccctgagcaagaccggcagaatcgacaaggcctaccccaccgtgtgcggccacaccggccccgtgctggacatcgactggtgcccccacaacgacgaggtgatcgccagcggcagcgaggactgcaccgtgatggtgtggcagatccccgagaacggcctgaccagccccctgaccgagcccgtggtggtgctggagggccacaccaagagagtgggcatcatcgcctggcaccccaccgccagaaacgtgctgctgagcgccggctgcgacaacgtggtgctgatctggaacgtgggcaccgccgaggagctgtacagactggacagcctgcaccccgacctgatctacaacgtgagctggaaccacaacggcagcctgttctgcagcgcctgcaaggacaagagcgtgagaatcatcgaccccagaagaggcaccctggtggccgagagagagaaggcccacgagggcgccagacccatgagagccatcttcctggccgacggcaaggtgttcaccaccggcttcagcagaatgagcgagagacagctggccctgtgggaccccggcgtgagaagattctgcctggcctag

SEQ ID NO: 27137 - DNA, 870 bp, Artificial Sequence
  derived and/or modified sequence
atgagcttcagaaaggtggtgagacagagcaagttcagacacgtgttcggccagcccgtgaagaacgaccagtgctacgaggacatcagagtgagcagagtgacctgggacagcaccttctgcgccgtgaaccccaagttcctggccgtgatcgtggaggccagcggcggcggcgccttcctggtgctgcccctgagcaagaccggcagaatcgacaaggcctaccccaccgtgtgcggccacaccggccccgtgctggacatcgactggtgcccccacaacgacgaggtgatcgccagcggcagcgaggactgcaccgtgatggtgtggcagatccccgagaacggcctgaccagccccctgaccgagcccgtggtggtgctggagggccacaccaagagagtgggcatcatcgcctggcaccccaccgccagaaacgtgctgctgagcgccggctgcgacaacgtggtgctgatctggaacgtgggcaccgccgaggagctgtacagactggacagcctgcaccccgacctgatctacaacgtgagctggaaccacaacggcagcctgttctgcagcgcctgcaaggacaagagcgtgagaatcatcgaccccagaagaggcaccctggtggccgagagagagaaggcccacgagggcgccagacccatgagagccatcttcctggccgacggcaaggtgttcaccaccggcttcagcagaatgagcgagagacagctggccctgtgggaccccgtgagcggccagcccgagggcgccaacctgagactgggcccccaccccggccccggcagacagggcagcccctggggcggcctgtggttcctggccagcctgcccggcacctag

SEQ ID NO: 27138 - DNA, 552 bp, Artificial Sequence
  derived and/or modified sequence
atgagcttcagaaaggtggtgagacagagcaagttcagacacgtgttcggccagcccgtgaagaacgaccagtgctacgaggacatcagagtgagcagagtgacctgggacagcaccttctgcgccgtgaaccccaagttcctggccgtgatcgtggaggccagcggcggcggcgccttcctggtgctgcccctgagcaagaccggcagaatcgacaaggcctaccccaccgtgtgcggccacaccggccccgtgctggacatcgactggtgcccccacaacgacgaggtgatcgccagcggcagcgaggactgcaccgtgatggtgtggcagatccccgagaacggcctgaccagccccctgaccgagcccgtggtggtgctggagggccacaccaagagagtgggcatcatcgcctggcaccccaccgccagaaacgtgctgctgagcgccggcctgcacagaccccccttctgcgccccccccccccacggccccctgcacaccagccagcagcccctgcagggcccccacgacaagtgggagagctag

SEQ ID NO: 27139 - protein, 1309 aa, Artificial Sequence
  derived and/or modified sequence
MQPLTKDAGMSLSSVTLASALQVRGEALSEEEIWSLLFLAAEQLLEDLRNDSSDYVVCPWSALLSAAGSLSFQGRVSHIEAAPFKAPELLQGQSEDEQPDASQMHVYSLGMTLYWSAGFHVPPHQPLQLCEPLHSILLTMCEDQPHRRCTLQSVLEACRVHEKEVSVYPAPAGLHIRRLVGLVLGTISEVEKRVVEESSSVQQNRSYLLRKRLRGTSSESPAAQAPECLHPCRVSERSTETQSSPEPHWSTLTHSHCSLLVNRALPGADPQDQQAGRRLSSGSVHSAADSSWPTTPSQRGFLQRRSKFSRPEFILLAGEAPMTLHLPGSVVTKKGKSYLALRDLCVVLLNGQHLEVKCDVESTVGAVFNAVTSFANLEELTYFGLAYMKSKEFFFLDSETRLCKIAPEGWREQPQKTSMNTFTLFLRIKFFVSHYGLLQHSLTRHQFYLQLRKDILEERLYCNEEILLQLGVLALQAEFGNYPKEQVESKPYFHVEDYIPASLIERMTALRVQVEVSEMHRLSSALWGEDAELKFLRVTQQLPEYGVLVHQVFSEKRRPEEEMALGICAKGVIVYEVKNNSRIAMLRFQWRETGKISTYQKKFTITSSVTGKKHTFVTDSAKTSKYLLDLCSAQHGFNAQMGSGQPSHVLFDHDKFVQMANLSPAHQARSKPLIWIQRLSCSENELFVSRLQGAAGGLLSTSMDNFNVDGSKEAGAEGIGRSPCTGREQLKSACVIQKPMTWDSLSGPPVQSMHAGSKNNRRKSFIAEPGREIVRVTLKRDPHRGFGFVINEGEYSGQADPGIFISSIIPGGPAEKAKTIKPGGQILALNHISLEGFTFNMAVRMIQNSPDNIELIISQSKGVGGNNPDEEKNSTANSGVSSTDILSFGYQGSLLSHTQDQDRNTEELDMAGVQSLVPRLRHQLSFLPLKGAGSSCPPSPPEISAGEIYFVELVKEDGTLGFSVTGGINTSVPYGGIYVKSIVPGGPAAKEGQILQGDRLLQVDGVILCGLTHKQAVQCLTGPGQVARLVLERRVPRSTQQCPSANDSMGDERTAVSLVTALPGRPSSCVSVTDGPKFEVKLKKNANGLGFSFVQMEKESCSHLKSDLVRIKRLFPGQPAEENGAIAAGDIILAVNGRSTEGLIFQEVLHLLRGAPQEVTLLLCRPPPGALPELEQEWQTPELSADKEFTRATCTDSCTSPILDQEDSWRDSASPDAGEGLGLRPESSQKAIREAQWGQNRERPWASSLTHSPESHPHLCKLHQERDESTLATSLEKDVRQNCYSVCDIMRLGRYSFSSPLTRLSTDIF

SEQ ID NO: 27140 - protein, 261 aa, Artificial Sequence
  derived and/or modified sequence
MGDERTAVSLVTALPGRPSSCVSVTDGPKFEVKLKKNANGLGFSFVQMEKESCSHLKSDLVRIKRLFPGQPAEENGAIAAGDIILAVNGRSTEGLIFQEVLHLLRGAPQEVTLLLCRPPPGALPELEQEWQTPELSADKEFTRATCTDSCTSPILDQEDSWRDSASPDAGEGLGLRPESSQKAIREAQWGQNRERPWASSLTHSPESHPHLCKLHQERDESTLATSLEKDVRQNCYSVCDIMRLGRYSFSSPLTRLSTDIF

SEQ ID NO: 27141 - DNA, 4997 bp, Artificial Sequence
  derived and/or modified sequence
gagctcttcctggctctctcacgggtcactggctttgaggacgcaggctgctggggtggcagtgcctgctaacaggccagagactgcgcaggacccagggaatgagagtggtggcaggaaagggaaggggccttgttgactcactcgctgggcagcaagtgcttagtgacaagcagtaaacaaagacagcggcaacagtgctggtggcagggagctccgcggacagacttgcaagagacccctgctccttgttggaaagttgtcccatgatgaaggcctagacctggtcacggagacttttggatgcagcctttaacgaaggacgcaggcatgagcctgtcctctgtgacgctggccagcgccctacaggtcaggggtgaagctctgtctgaggaggaaatctggtccctcctgttcctggccgctgagcagctcctggaagacctccgcaacgattcctcggactatgtggtttgcccctggtcagccctgctttctgcagctggaagcctttctttccaaggccgtgtttctcatatagaggctgctcctttcaaggcccctgaactgctacagggacagagtgaggatgagcagcctgatgcatctcagatgcatgtctattctttaggaatgaccctctactggtcagcagggtttcatgttccgccacatcagcccctgcagctctgcgagcccctgcactccatcctgctgaccatgtgtgaagaccagcctcacaggcggtgcacgttgcagtcggttctggaagcttgtcgggttcatgagaaagaagtgtctgtctacccagcccctgctggtctccacatcagaaggctggttggcttggttctgggtaccatttctgaggtggagaaaagagttgtggaggaaagctcctctgtgcagcagaacagaagctacctgctcaggaagaggctgcgtgggacaagcagcgagagcccagcggcacaggccccggagtgtctgcatccttgcagagtttcagaaagaagcacggagacccagagctcaccagagccccattggagcaccttgacacacagtcactgcagcctccttgttaaccgcgctcttccaggagcagatccccaggaccagcaggcgggccggaggctcagctctggatctgtgcactcggcagcagacagctcatggccaacaactccttctcagaggggttttctgcaaagaaggagcaagttttccaggccagagttcatcctgttggctggagaggccccgatgacactacatctgccgggatcggttgtgaccaaaaaagggaaatcctatttggctctcagggacctctgtgtggtcctgctgaacgggcagcacctggaggtaaaatgtgatgttgaatcaacagtgggagctgtcttcaatgccgtgacatcctttgccaacctcgaggaactcacctactttggcttggcgtatatgaaaagcaaagagttctttttcctggacagtgaaaccagattgtgcaaaatagctcctgaaggctggagagagcagcctcagaagacctccatgaataccttcacactcttcctgaggataaagttctttgtcagccactatgggctgctccagcacagcctgacaaggcaccagttttacctgcagcttcggaaagatatcctggaggagaggctgtactgcaatgaagagatactgctgcagctgggggtccttgccttgcaggctgagtttggcaattaccctaaggagcaggtggagagtaagccatactttcacgttgaagattacatcccagcgagtctgatcgagaggatgaccgctctacgggtccaggttgaagtctcagagatgcaccggctcagctctgcactgtggggagaggatgctgagctgaagttcttgagggtcactcagcagctcccagaatacggtgtgctggttcaccaagtattctcagagaagaggaggccagaagaggagatggccctggggatctgtgccaagggtgtcatagtctatgaagtgaaaaacaacagcagaattgcaatgttacggtttcagtggagagaaaccgggaagatttctacttatcaaaaaaagttcaccatcacaagcagtgtcactgggaagaagcacacatttgtcacagattcagccaagaccagtaaatacttactggacctctgctcagcccagcatgggtttaatgcacagatgggctctgggcagccttcccatgttttatttgaccatgataagtttgtgcaaatggccaatttgagtcctgcacaccaggcccggtctaagcctctcatttggattcagagattgtcatgctcagaaaacgagttgtttgtatccaggcttcagggtgctgcaggaggcctgctgagtacatcaatggataacttcaacgtggacggcagcaaggaggctggagcagaaggcatcgggcgcagcccctgcactggccgggagcagctgaagagtgcctgtgtgatccagaagccaatgacctgggactctctctctggaccacctgttcagagcatgcatgcaggctcaaagaataataggaggaagagctttatagctgaaccgggccgagaaattgtacgtgtgacactgaaacgtgacccacatcgtggttttgggtttgtcattaatgagggagagtattcaggccaagctgaccctggcatttttatatcttctattatacctggaggaccagcagaaaaagcaaaaacgatcaaaccaggagggcagatactagccctgaatcacatcagtctggagggcttcacattcaacatggctgttaggatgatccagaattcccctgacaacatagaattaattatttctcagtcaaaaggtgttggtggaaataacccagatgaagaaaagaatagcacagccaattctggggtctcctctacagacatcctgagcttcgggtaccagggaagtttgttgtcacacacacaagaccaggacagaaatactgaagaactagacatggctggggtgcagagcttagtgcccaggctgagacatcagctttcctttctgccgttaaagggtgctggttcttcttgtcctccatcacctccagaaatcagtgctggtgaaatctactttgtggaactggttaaagaagatgggacacttggattcagtgtaactggtggcattaacaccagtgtgccatatggtggtatctatgtgaaatccattgttcctggaggaccagctgccaaggaagggcagatcctacagggtgaccgactcctgcaggtggatggagtgattctgtgcggcctcacccacaagcaggctgtgcagtgcctgacgggtcctgggcaggttgcaagactggtcttagagagaagagtccccaggagtacacagcagtgtccttctgctaatgacagcatgggagatgaacgcacggctgtttccttggtaacagccttgcctggcaggccttcgagctgtgtctcagtgacagatggtcctaagtttgaagtcaaactaaaaaagaatgccaatggtttgggattcagtttcgtgcagatggagaaagagagctgcagccatctcaaaagtgatcttgtgaggattaagaggctctttccggggcagccagctgaggagaatggggccattgcagctggtgacattatcctggccgtgaatggaaggtccacggaaggcctcatcttccaggaggtgctgcatttactgagaggggccccacaggaagtcacgctcctcctttgccgaccccctccaggtgcgctgcctgagctggagcaggaatggcagacacctgaactctcagctgacaaagaattcaccagggcaacatgtactgactcatgtaccagccccatcctggatcaagaggacagctggagggacagtgcctccccagatgcaggggaaggcctgggtctcaggccagagtcttcccaaaaggccatcagagaggcacaatggggccaaaacagagagagaccttgggccagttccttgacacattctcctgagtcccaccctcatttatgcaaacttcaccaagaaagggatgaatcaacattggcgacctctttggaaaaggatgtgaggcaaaactgctattcagtttgtgatatcatgagacttggaagatattccttctcatctcctctaaccagactttcgacagatattttctgagcaccttctctgcatgtctgcagtgctgtgtaaaatgccctacctttgcatggactattctttctaatcaagaggcgtgtgtggcgaacttggggcagcccctggaagtcttgttctttgaccattacgtctgcggctgcatcaccagataatgagcttcaccactcgtctgcctcctgtgtccttccgcggggagtaaatgtcacttcagcttgccgcatctctaaataggcaaattttcagtgctcagaaaaggacctgatctttgcacaaagtgctttgatggttgcctgcttgagtcactcccaatcccttcctgaagccctttctttataattcttctgttgaaatagccatcatattcacagtactaatcacagcatctcacatttactaaaaacttaccccataccaggaacccagagttgggggggctgtgtcagaattatgtaatttacgtgtcccaataatcctagacgcttcttgaccatctagttttgtcaaatgagaaaactgaggttccaaagaagtcaataaacttgtccaaagtctgaccgactctgcttgccatgtgacgagtctgtcttagaactgggtcattgccctgcttgcaatgctgtgccctctggcaagcccccccatccccccggtctcctgagctcggtaaggtgctccagctgcttctatcatagcacttcctacatggactgtaacatttctttactgctccaacttctcattaaattgggggctcctcaaagcca

SEQ ID NO: 27142 - DNA, 3930 bp, Artificial Sequence
  derived and/or modified sequence
atgcaacccttgactaaagacgccggcatgtcactttcttctgtgacgttggcctccgccttgcaggtgaggggagaggccctgagtgaggaggagatttggagtcttctgtttctggctgccgaacagcttttggaggatctgagaaatgatagtagcgactacgtagtctgcccttggtcagctttactaagcgccgccgggtcattgtcattccaggggcgcgtcagtcacatcgaggctgcccctttcaaagcccccgagttgctgcaagggcaatccgaggacgaacagcccgatgccagtcagatgcacgtgtactccctcggcatgacactgtactggagcgcaggattccacgtacccccacatcaaccccttcagctgtgcgaaccattgcattctatacttttgacgatgtgtgaagaccagccacacagaaggtgcactctgcaaagcgtgctggaagcttgccgcgtacacgagaaggaagtgagcgtctatccagcacccgccgggctgcatattcgcagattggttgggctggttctcggaacaatctccgaagtggagaaacgagtggtcgaggagagtagctctgtccagcagaataggagttaccttttgagaaagaggttaagaggaacttccagcgagtcccctgccgcccaagcaccagaatgtctgcatccgtgcagggtcagcgaaaggagcactgaaacacagagcagccctgaacctcactggtcgaccttaacacattcccattgttccttacttgtaaacagggcgctccccggcgccgacccacaggatcagcaggccggccgcaggctctcctctggttcagttcattctgccgcagactcctcatggcctacaacccccagccagcggggctttctgcagagaaggagcaaattttcccggcccgagttcattttacttgcgggtgaagctcccatgaccttgcatttacccggtagcgtggtcacaaagaagggaaagagctacctggccctcagagatctgtgcgtcgtgcttttgaacggtcaacatcttgaggtaaagtgcgacgtggaatccaccgttggtgccgtatttaatgctgtgactagctttgccaatctggaggagcttacctactttggtttagcttatatgaagtcaaaggaattctttttcctggacagcgaaaccagactgtgcaaaatcgctccagagggatggagagaacagccccagaaaacttcaatgaatacctttactctgttcctgcggatcaagttcttcgttagccactacggccttctgcagcattcgcttacccgccatcagttttacctgcagctgcgtaaggacattctcgaagagagattgtattgtaacgaagaaattctgctacagctcggagttctggccctccaggccgagtttggaaactacccaaaagaacaggtcgaaagtaaaccctatttccatgttgaggactacatcccagcctctctgattgagcgcatgaccgccttgagagtgcaagtggaagtttccgaaatgcaccgcctgtcttcagccctttggggggaagatgcagaactgaagtttctgagagtgacacagcagctgcccgaatacggggtgctggtgcaccaggtgtttagcgaaaagcgtagacccgaggaggaaatggctttaggaatttgcgccaaaggggtgatcgtctacgaggtgaaaaacaatagcagaatcgcgatgttaagattccaatggcgggagactgggaagatttcaacctaccagaaaaaattcacaataacgtctagcgtcacgggcaagaagcacaccttcgtgactgacagcgctaaaacgtctaagtacctgctagacctctgctccgcccagcacgggttcaacgcccaaatgggatctggccagccttctcacgttctcttcgaccatgacaagttcgtgcaaatggctaatttaagccccgcacatcaggctaggagcaaaccgttaatctggattcagcggctgtcctgctccgagaatgaactgttcgtatccagactccagggagcagcaggcggcctgcttagcactagcatggacaactttaacgtcgacgggtccaaggaggcgggtgcagagggaatagggcggagcccctgcacaggaagggagcagctgaagagcgcttgtgtcatccagaagcccatgacctgggactctctgagcggtccaccagtacaaagcatgcacgccggttccaagaataacagaagaaaatctttcatcgccgaaccaggcagggaaatcgtcagagtgaccctcaaaagagacccccaccggggatttggctttgtgatcaacgaaggggagtacagtggccaggccgatccaggtatattcatttctagcattatcccgggtgggccagctgagaaggccaaaaccataaagcccggcgggcaaatactggccttgaatcacatctctctggagggttttacattcaatatggccgtgcgcatgattcagaactcgcctgataacatagagctgattatcagccaatctaagggtgtaggaggcaacaacccagacgaagaaaagaatagcacagctaattccggagtgtctagtacagacattctgagcttcggttatcaaggcagtctcctgtctcacactcaggaccaggataggaatactgaagagctcgatatggcaggtgtgcagagcctggtacctcgattgcggcaccaactcagttttctgccccttaaaggcgctggctcatcatgcccccctagtccacccgagatctccgctggagaaatctatttcgtcgaactggtaaaagaagacggcacactcggtttctccgtcactggcggcatcaatacctccgtgccatacggtggaatctacgtgaaatctatcgtgccgggggggcccgccgctaaggaaggtcagatcctacagggagacagattactgcaagtcgacggtgtaatactctgcggtctgactcataaacaggccgtgcagtgccttacaggtcctggtcaggtcgctagactggttctcgaacgcagagtcccaagatccacacaacagtgtccctctgccaacgattccatgggagacgaacgaacagccgtgagcctggtcaccgctctgcccggcagaccaagttcatgcgtgtccgtcacggacggacctaagtttgaggtaaagctcaagaagaatgcaaatggactgggatttagcttcgtccaaatggaaaaagagtcatgcagtcacttgaagagcgaccttgtgcggataaaaagacttttccccggacagcccgcagaggaaaacggtgcaattgcagcgggggatatcattttggcagtgaacggaaggtcaactgaaggactgattttccaagaggtcctgcacctgttacgcggggctcctcaggaagtgactctgttactgtgcagaccaccccccggagccctccctgaacttgaacaggagtggcagactccagagctttccgctgacaaggaatttacacgggccacatgcaccgactcctgtacttcacccattttggaccaagaggacagctggcgggacagcgccagtcctgacgccggcgagggcctaggcctgcggcccgaatcaagtcaaaaagccattcgggaagcccagtggggccagaaccgtgagcgaccttgggcatccagtctgacccattcccccgaatctcatccacatctgtgcaaattgcaccaggagagggacgaatcaaccctggccacctctctcgaaaaggatgtgaggcagaactgctattccgtgtgtgacatcatgcgattaggcagatactcattcagtagccctctcacaagactgagtacagatatcttttag

SEQ ID NO: 27143 - DNA, 3930 bp, Artificial Sequence
  derived and/or modified sequence
atgcagcccctgaccaaggatgctggcatgagcctgagctctgtgaccctggccagcgccctgcaggtgcggggggaggccctgtctgaggaggagatctggagcctgctcttcctggccgctgagcagctgctggaggacctgagaaatgacagcagtgactatgtggtgtgcccctggagcgccctgctgtctgctgctggcagcctgtccttccagggccgggtgagccacattgaagctgcccccttcaaggcccctgagctgctgcagggccagagtgaagatgagcagccagatgccagccagatgcacgtgtacagcctgggcatgaccctgtactggagcgctggcttccacgtgcccccccaccagcccctgcagctgtgtgagcccctgcacagcatcctgctgaccatgtgtgaggaccagccccaccggcgctgcaccctgcagagcgtgctggaggcctgccgggtgcatgagaaggaggtgtctgtgtacccagccccagctggcctgcacatccggcggctggtgggcctggtgctgggcaccatcagcgaggtggagaagagggtggtggaggagagcagctctgtgcagcagaacagaagctacctgctgaggaagaggctgcggggcaccagcagcgagagccctgctgcccaggccccagaatgtctgcacccctgccgggtgtctgagaggagcacagagacccagagcagccctgagccccactggagcaccctgacccacagccactgcagcctgctggtgaacagagccctgcccggggctgacccccaggaccagcaggccggccgccgcctgagcagcggctctgtgcacagcgctgctgacagctcctggcccaccacccccagccagaggggcttcctgcagaggaggagcaagttcagcaggcctgagttcatcctgctggccggggaggcccccatgaccctgcacctgcccggctctgtggtgaccaagaagggcaagagctacctggccctgcgggacctgtgtgtggtgctgctgaatggccagcacctggaggtgaagtgtgatgtggagagcacagtgggcgctgtgttcaatgctgtgaccagctttgccaacctggaggagctgacctacttcggcctggcctacatgaagagcaaggagttcttcttcctggacagcgagacccggctgtgcaagatcgcccctgagggctggagggagcagccccagaagacctccatgaacaccttcaccctcttcctgcgcatcaagttctttgtgagccactacggcctgctgcagcacagcctgaccaggcaccagttctacctgcagctgaggaaggacatcctggaggagcggctgtactgcaatgaggagatcctgctgcagctgggcgtgctggccctgcaggccgagtttggaaactaccccaaggagcaggtggagagcaagccctacttccacgtggaggactacatcccagccagcctcatcgagaggatgacagccctgcgggtgcaggtggaggtgtctgagatgcaccggctgagcagcgccctgtggggagaagatgctgagctgaagttcctgcgggtgacccagcagctgcctgaatatggagtgctggtgcaccaggtgttcagcgagaagagaagacctgaggaggagatggccctgggcatctgtgccaagggcgtgattgtgtatgaggtgaagaacaacagcagaattgccatgctgcgcttccagtggagggagaccgggaagatcagcacctaccagaagaagttcaccatcaccagctctgtgacaggcaagaagcacacctttgtgacagacagcgccaagaccagcaagtacctgctggacctgtgcagcgcccagcacggcttcaatgcccagatgggcagcggccagcccagccacgtgctgtttgaccatgacaagtttgtgcagatggccaacctgagccctgcccaccaggcccggagcaagcccctcatctggatccagaggctgagctgcagtgaaaatgagctgtttgtgtcccggctgcagggcgctgctgggggcctgctgagcacctccatggacaacttcaacgtggatggcagcaaggaggccggggctgagggcatcggccgcagcccctgcaccggccgggagcagctgaagagcgcctgcgtcatccagaagcccatgacctgggacagcctgagcggcccccctgtgcagagcatgcatgctggcagcaagaacaacagaaggaagagcttcatcgccgagcccggccgggagatcgtgcgggtgaccctgaagagggacccccaccggggcttcggcttcgtcatcaatgaaggagagtacagcggccaggccgaccccggcatcttcatcagcagcatcatccctgggggccctgctgagaaggccaagaccatcaagccaggcggccagatcctggccctgaaccacatcagcctggagggcttcaccttcaacatggctgtgaggatgatccagaacagcccagacaacatcgagctgatcatcagccagagcaaaggagtgggcggcaacaacccagatgaggagaagaacagcacagccaacagcggcgtgagcagcacagacatcctgagctttggctaccagggcagcctgctgagccacacccaggaccaggacaggaacacagaggagctggacatggccggcgtgcagagcctggtgccccggctgcggcaccagctgtccttcctgcccctgaagggggccggcagcagctgcccccccagccccccagagatctctgctggggagatctactttgtggagctggtgaaggaggatggcaccctgggcttctctgtgactggaggcatcaacacctctgtgccctacggcggcatctacgtgaagagcatcgtgcctgggggccctgctgccaaggagggccagatcctgcagggcgaccggctgctgcaggtggatggagtcatcctgtgtggcctgacccacaagcaggccgtgcagtgcctgactggacctggccaggtggcccggctggtgctggagaggagagtgcccaggagcacccagcagtgccccagcgccaatgacagcatgggagatgagaggacagctgtgtccctggtgacagccctgcccggccggcccagcagctgtgtgtctgtgacagatggccccaagtttgaggtgaagctgaagaagaatgccaacggcctgggcttctcctttgtgcagatggagaaggagagctgcagccacctgaagagtgacctggtgcgcatcaagaggctcttccctggccagcctgctgaggagaatggagccatcgccgccggggacatcatcctggccgtgaatggccgcagcacagagggcctcatcttccaggaggtgctgcacctgctgcggggggccccccaggaggtgaccctgctgctgtgccggcccccacctggggccctgcctgagctggagcaggagtggcagaccccagagctgtctgctgacaaggagttcacccgggccacctgcacagacagctgcaccagccccatcctggaccaggaggacagctggagggacagcgccagcccagatgctggggagggcctgggcctgcggcctgagagcagccagaaggccatccgggaggcccagtggggccagaaccgggagcggccctgggccagcagcctgacccacagccctgagagccacccccacctgtgcaagctgcaccaggagagagatgagagcaccctggccaccagcctggagaaggatgtgcggcagaactgctacagcgtgtgtgacatcatgaggctgggccgctacagcttcagcagccccctgacccggctgagcacagacatcttctag

SEQ ID NO: 27144 - DNA, 3930 bp, Artificial Sequence
  derived and/or modified sequence
atgcagcccctgaccaaggacgccggcatgagcctgagcagcgtgacactggctagcgcgctacaggtaagaggggaagccttgtctgaggaagaaatctggagtctcctgtttctcgctgccgaacagctgcttgaagacctcagaaatgattcatccgattacgtggtttgtccatggtctgcactcctgagcgcggcgggaagcctctctttccagggacgagtctcgcatattgaggccgcgccttttaaggctcctgaattactgcaggggcaatccgaggatgagcagcccgatgcatctcagatgcatgtctacagtctcgggatgacactgtactggagcgccggatttcacgtgcccccccaccagccattgcaattatgcgagcccctccactccattctactgactatgtgtgaagaccagccacaccggcgctgcactctgcagtcagttctggaagcatgtcgggtacacgaaaaagaggtttcagtctaccccgcacccgccggcctgcatattagaaggctcgtcggtcttgtgctcggaacaattagcgaagtcgagaagagagtggtggaggagagctcctcagtacagcagaatcgctcctatctgctgcggaaacggctgcggggaacaagtagtgagagtcctgctgctcaggctcctgagtgtctgcacccgtgcagggttagcgaaaggtctactgagacacagagcagccccgaaccccactggtctacactgacgcactctcattgttctctgctggttaatcgtgcacttccaggtgcagaccctcaggatcaacaggcaggaagacggctgagcagcgggtcagtgcactccgccgccgactcctcgtggcctactactcctagtcagcgcggcttccttcagcggaggagtaaattctcccgcccagaattcattctgctggctggagaggcaccaatgaccctccacctcccaggctcagtggtcacaaagaagggcaagagctatctagcccttcgcgatctgtgtgtggtgctgcttaatgggcagcatctagaggttaagtgcgatgttgaaagcacagtgggagccgtgtttaatgcagtcacttccttcgccaacctggaggagctgacctattttggacttgcctacatgaagagtaaggagttttttttcctagactcggagacgcgcctgtgtaagattgccccagagggatggcgcgaacagccccagaagacctccatgaatacctttacactcttcctcagaattaagttctttgttagccactacgggttgctacagcattccctaacaagacatcagttttaccttcagctaaggaaggatatattggaggaaaggctctattgtaatgaggagattctgttgcaattgggagtgttagctctccaagccgagtttggaaactatcctaaagagcaagtggaaagcaagccttacttccacgttgaagactacatacctgcttcacttatcgaaaggatgacagccttgcgcgtgcaggttgaagtctcagagatgcaccggctcagcagcgctctctggggggaagacgccgaactcaagtttctgagggtgacgcagcaactgcccgagtatggcgtgctggtccatcaggtttttagtgagaaacgacggccagaggaagaaatggccctgggcatctgcgcaaaaggagtgatcgtgtacgaagtcaagaataactctcgtatcgcaatgttgcgctttcaatggagagagacgggaaagatttccacttaccaaaaaaagtttacaatcacctcttccgtgacggggaaaaagcacacgtttgtgacagacagcgcaaagacctctaaatacctgcttgatctgtgctctgcgcagcacggcttcaatgctcagatggggtctgggcagccctctcacgtgctgttcgaccacgacaaatttgtgcagatggctaaccttagccccgcccatcaggccagatcgaaaccactcatttggatccagcgtctatcatgtagtgaaaacgagctgttcgtcagcagactgcagggagctgccggggggctgttgtcaacatccatggacaatttcaatgtggatggctcgaaggaagcaggggctgaagggataggcagaagcccgtgcactggacgagaacagttaaagtcagcctgcgtgatccagaagccaatgacatgggatagtctgtctggaccccccgtccagagtatgcatgcaggctcaaagaacaatagacggaaatcttttatagcagagcctggcagggagattgtgcgggtcactctgaagcgtgacccccaccggggtttcggttttgtgattaatgagggcgaatatagtgggcaagccgatccagggatattcatttcttcgatcattcctgggggtccggccgaaaaagccaagacgataaaacctggggggcagatcctagccttaaatcatattagtttggaaggattcactttcaatatggcagtgcggatgatccaaaattcacctgacaatatcgaactcattatcagccagtctaagggggtcggcggtaacaatcctgacgaggagaagaattcaacagcaaactcaggcgtttccagcacggatattctgtcctttggttaccaggggtcccttttgtcacatacccaggatcaggaccggaacacggaggagttggacatggcaggcgtccagtccctggtcccccggctgcgtcatcagctgtcgttcctcccactgaaaggggccggctcatcgtgtcccccgagcccccccgagatctcagctggtgaaatttactttgtagaattagtgaaagaggacgggacactgggcttttccgtcacagggggcattaacacctccgttccctatggaggcatctacgttaaatccatcgtaccaggtgggcccgctgcaaaggagggacagattctccagggcgataggttgctacaggtggatggtgtaatcctctgcggcctcacccacaaacaagcagttcaatgcttgactggccctggccaggtcgctcggctggtgctcgaacgaagggtacctaggtctactcagcagtgcccatcagccaacgattccatgggagacgagagaaccgctgttagcctggtcacagcccttcccgggaggccatcctcttgtgtgagcgtcaccgacggacctaagttcgaggtgaagctgaagaagaacgccaatggcctgggtttttctttcgttcagatggaaaaggagtcctgctcccatttaaaatccgatttggtccgcattaagcggctattccctggccaaccggccgaagaaaatggtgctattgccgccggagacatcatcttagccgttaatggacgcagcaccgagggattgattttccaggaagttctgcacctgcttcgcggcgcccctcaagaggtgactttactcctatgccggccaccacctggagccctccctgagctcgagcaggaatggcaaaccccagaactctcagcagacaaagagttcacccgggccacctgcactgattcctgtacaagccccatcctagaccaggaagacagttggcgcgattcggccagtcccgatgccggggaaggtttggggctgcggccggaatcctctcaaaaagcaattagagaggcacagtgggggcagaatcgcgagcgcccttgggccagttcattgactcattccccggagagtcatccccatctgtgcaaacttcaccaggagcgtgacgagtccacactggctacttccctggagaaggatgtgaggcagaattgctacagcgtgtgtgacataatgcggctggggcggtatagcttcagttcgcctctgacgaggctgtctacagatatcttttag

SEQ ID NO: 27145 - DNA, 3930 bp, Artificial Sequence
  derived and/or modified sequence
atgcagccacttacaaaggatgccggaatgtccctctcctccgtcactttggcaagtgctctgcaagtgaggggcgaggccctgtcggaggaagaaatatggagcttgctcttcctggccgctgagcagctgcttgaagatctcagaaatgactcatccgactacgtcgtctgtccttggtccgccctgcttagtgcagcgggaagcctctctttccaggggagagtgtctcacatcgaggcagccccatttaaagctcccgagctactgcaagggcagtccgaagatgagcagcccgacgcctctcaaatgcatgtctattcactgggcatgaccctgtactggagcgccggattccatgtgccccctcaccaacctttacagttatgtgaacctcttcattcgattctgctgacaatgtgtgaagatcagccacaccgcaggtgcacactacaatctgtgctggaagcatgcagagtgcacgagaaagaggttagcgtgtacccagcgccagccggactccacattcgtcgactcgttggactcgttctaggtactatctccgaagtggaaaagcgggtagtggaagagagttcatcagtgcagcaaaatcgctcatacttactgcgcaaaaggcttcgcggaacctcatccgagtctccggcagctcaagccccagagtgtctgcacccgtgtcgtgtgtcagagaggtccacagaaactcaaagtagccctgagccacactggtcaacactgacccattctcactgtagcctcctggtcaatagagcgctgcctggggcagacccccaagaccagcaggccggaagacgactgtcctcaggctcagtccactccgccgctgattctagttggccaaccaccccatcacaacggggattcctgcagcgtagaagtaagttttcacggccagagttcattctccttgctggagaagcaccgatgacactccacctgcctggaagtgttgtcactaagaaaggcaagtcctaccttgccctgcgagatttgtgtgtggtcctcttgaatgggcagcatctagaggtgaagtgcgacgttgaaagcacggttggggctgtgtttaatgccgtcacaagctttgcaaacctggaagaactgacctactttggactggcttatatgaagtcaaaggagttttttttcttggactctgaaacgagactgtgtaagatagcacctgagggctggagggagcagcctcagaaaacctcaatgaacaccttcacactttttctgcggatcaaattcttcgtgagccactatgggttgctgcagcattccctgaccaggcaccagttctatttgcagttgagaaaggacatacttgaggagaggctctactgcaacgaggaaatcctgttgcaattaggcgtgctggctctgcaggctgaattcggtaattacccgaaagaacaggtcgagtcaaagccctacttccacgtcgaagactatatccccgctagtctgatcgaaaggatgacagcgcttcgggtgcaggttgaagtgagcgaaatgcatagactgtcaagtgccctgtggggcgaagacgctgaactgaagtttctgagagtgacacagcaactgcccgaatacggcgtgctggtgcaccaggtcttctcagaaaaacggcgaccggaggaggagatggccttgggaatctgtgcaaagggcgtcattgtgtatgaagtgaagaacaacagccggattgctatgctgcgattccaatggcgagaaaccgggaagatatcgacctaccaaaaaaagtttactatcaccagctccgtcacgggaaagaaacatacttttgtcaccgattcagccaagacctccaagtacttgctcgatctctgtagcgcgcaacatggctttaacgctcagatggggagcgggcaaccaagccatgtcctttttgatcacgacaaattcgtccagatggcaaacttgtccccagcacatcaagctcggtctaaaccgctcatttggatacaacgcttaagctgtagcgaaaatgagctgtttgtgtctcgactacagggcgcagcaggtgggctcctctccacctcgatggataactttaatgtggatggttccaaagaggcaggggctgagggtatcggacgttctccctgtactgggagagagcagctcaagtccgcgtgcgtgatacagaagcctatgacttgggactctctgagcggccctcctgtgcagtcaatgcatgctgggtcaaaaaataacagacgcaaaagctttatcgcagagccaggaagggagattgtccgggtcactttaaagagggatccccaccggggattcggtttcgtgatcaacgagggggagtactctggccaggctgatcctggcattttcatatcttccattattcctggcggacccgctgagaaagccaagacgatcaaaccagggggtcaaatcctggcactgaaccacatttctttagaaggctttactttcaacatggccgtgagaatgatacagaactctccagacaacattgaactgatcatatcgcagagcaagggcgtagggggtaacaaccctgatgaagaaaagaattctactgcgaacagcggtgtatcctctaccgatatattgtcctttggctaccaagggtcattactgtcccacacccaggaccaggacagaaatacagaagagctggatatggccggagtacagagcttggtaccgaggttgagacatcagttaagctttctgcccttaaagggagccggttcgtcgtgtccacctagcccgccagagatatccgcaggcgaaatttactttgtcgagcttgtgaaggaagatggaacccttggtttttcagtgacaggcggaattaatacatctgttccctacggcggaatatacgtgaaatctatagtgccagggggacctgccgcaaaagagggccagatcctccagggcgatagactgttgcaggtcgacggcgtcatattgtgtggtttaactcataaacaagcagtgcaatgcttaaccggccctgggcaggtggctcgactagtgttagagcggagggtccctcggagcacccagcaatgtccaagcgcgaacgactctatgggtgacgagagaacagccgtctctctggtcacggccttgcctggcagaccgtctagctgtgtctcagtgactgacggccctaagttcgaggtgaagttaaagaaaaatgccaatggcctaggatttagctttgtacagatggagaaagagtcttgcagccatctgaaatcagacctggtacgtattaagaggctttttccaggacagcctgctgaggaaaacggcgcaatcgccgcaggcgatatcatcctcgcagtaaacggcaggtccactgagggtttgattttccaggaggtcctccacctgcttaggggtgcgcctcaggaagtgacgcttctgctctgtagaccccctcccggagccctgcccgaactcgaacaggagtggcagactccagaactgtcagccgataaagagtttacccgcgctacatgcaccgatagttgcacgtctccgattcttgaccaggaggattcttggagggactccgcttctccagacgctggagaggggctgggtctccggccagaaagctcacagaaagccatacgcgaggcccagtggggtcaaaatagagagagaccatgggcttccagtcttacccattcccccgagtcccacccccatttatgcaagcttcaccaggaacgtgatgagtcgaccctggccacctcactggaaaaggatgtccgacagaattgttacagtgtttgtgatatcatgcgcctcgggaggtactctttcagttctccactgactagattgtcaactgatatcttctag

SEQ ID NO: 27146 - DNA, 3930 bp, Artificial Sequence
  derived and/or modified sequence
atgcagcccctgaccaaggacgccggcatgagcctgagcagcgtgaccctggccagcgccctgcaggtgagaggcgaggccctgagcgaggaggagatctggagcctgctgttcctggccgccgagcagctgctggaggacctgagaaacgacagcagcgactacgtggtgtgcccctggagcgccctgctgagcgccgccggcagcctgagcttccagggcagagtgagccacatcgaggccgcccccttcaaggcccccgagctgctgcagggccagagcgaggacgagcagcccgacgccagccagatgcacgtgtacagcctgggcatgaccctgtactggagcgccggcttccacgtgcccccccaccagcccctgcagctgtgcgagcccctgcacagcatcctgctgaccatgtgcgaggaccagccccacagaagatgcaccctgcagagcgtgctggaggcctgcagagtgcacgagaaggaggtgagcgtgtaccccgcccccgccggcctgcacatcagaagactggtgggcctggtgctgggcaccatcagcgaggtggagaagagagtggtggaggagagcagcagcgtgcagcagaacagaagctacctgctgagaaagagactgagaggcaccagcagcgagagccccgccgcccaggcccccgagtgcctgcacccctgcagagtgagcgagagaagcaccgagacccagagcagccccgagccccactggagcaccctgacccacagccactgcagcctgctggtgaacagagccctgcccggcgccgacccccaggaccagcaggccggcagaagactgagcagcggcagcgtgcacagcgccgccgacagcagctggcccaccacccccagccagagaggcttcctgcagagaagaagcaagttcagcagacccgagttcatcctgctggccggcgaggcccccatgaccctgcacctgcccggcagcgtggtgaccaagaagggcaagagctacctggccctgagagacctgtgcgtggtgctgctgaacggccagcacctggaggtgaagtgcgacgtggagagcaccgtgggcgccgtgttcaacgccgtgaccagcttcgccaacctggaggagctgacctacttcggcctggcctacatgaagagcaaggagttcttcttcctggacagcgagaccagactgtgcaagatcgcccccgagggctggagagagcagccccagaagaccagcatgaacaccttcaccctgttcctgagaatcaagttcttcgtgagccactacggcctgctgcagcacagcctgaccagacaccagttctacctgcagctgagaaaggacatcctggaggagagactgtactgcaacgaggagatcctgctgcagctgggcgtgctggccctgcaggccgagttcggcaactaccccaaggagcaggtggagagcaagccctacttccacgtggaggactacatccccgccagcctgatcgagagaatgaccgccctgagagtgcaggtggaggtgagcgagatgcacagactgagcagcgccctgtggggcgaggacgccgagctgaagttcctgagagtgacccagcagctgcccgagtacggcgtgctggtgcaccaggtgttcagcgagaagagaagacccgaggaggagatggccctgggcatctgcgccaagggcgtgatcgtgtacgaggtgaagaacaacagcagaatcgccatgctgagattccagtggagagagaccggcaagatcagcacctaccagaagaagttcaccatcaccagcagcgtgaccggcaagaagcacaccttcgtgaccgacagcgccaagaccagcaagtacctgctggacctgtgcagcgcccagcacggcttcaacgcccagatgggcagcggccagcccagccacgtgctgttcgaccacgacaagttcgtgcagatggccaacctgagccccgcccaccaggccagaagcaagcccctgatctggatccagagactgagctgcagcgagaacgagctgttcgtgagcagactgcagggcgccgccggcggcctgctgagcaccagcatggacaacttcaacgtggacggcagcaaggaggccggcgccgagggcatcggcagaagcccctgcaccggcagagagcagctgaagagcgcctgcgtgatccagaagcccatgacctgggacagcctgagcggcccccccgtgcagagcatgcacgccggcagcaagaacaacagaagaaagagcttcatcgccgagcccggcagagagatcgtgagagtgaccctgaagagagacccccacagaggcttcggcttcgtgatcaacgagggcgagtacagcggccaggccgaccccggcatcttcatcagcagcatcatccccggcggccccgccgagaaggccaagaccatcaagcccggcggccagatcctggccctgaaccacatcagcctggagggcttcaccttcaacatggccgtgagaatgatccagaacagccccgacaacatcgagctgatcatcagccagagcaagggcgtgggcggcaacaaccccgacgaggagaagaacagcaccgccaacagcggcgtgagcagcaccgacatcctgagcttcggctaccagggcagcctgctgagccacacccaggaccaggacagaaacaccgaggagctggacatggccggcgtgcagagcctggtgcccagactgagacaccagctgagcttcctgcccctgaagggcgccggcagcagctgcccccccagcccccccgagatcagcgccggcgagatctacttcgtggagctggtgaaggaggacggcaccctgggcttcagcgtgaccggcggcatcaacaccagcgtgccctacggcggcatctacgtgaagagcatcgtgcccggcggccccgccgccaaggagggccagatcctgcagggcgacagactgctgcaggtggacggcgtgatcctgtgcggcctgacccacaagcaggccgtgcagtgcctgaccggccccggccaggtggccagactggtgctggagagaagagtgcccagaagcacccagcagtgccccagcgccaacgacagcatgggcgacgagagaaccgccgtgagcctggtgaccgccctgcccggcagacccagcagctgcgtgagcgtgaccgacggccccaagttcgaggtgaagctgaagaagaacgccaacggcctgggcttcagcttcgtgcagatggagaaggagagctgcagccacctgaagagcgacctggtgagaatcaagagactgttccccggccagcccgccgaggagaacggcgccatcgccgccggcgacatcatcctggccgtgaacggcagaagcaccgagggcctgatcttccaggaggtgctgcacctgctgagaggcgccccccaggaggtgaccctgctgctgtgcagacccccccccggcgccctgcccgagctggagcaggagtggcagacccccgagctgagcgccgacaaggagttcaccagagccacctgcaccgacagctgcaccagccccatcctggaccaggaggacagctggagagacagcgccagccccgacgccggcgagggcctgggcctgagacccgagagcagccagaaggccatcagagaggcccagtggggccagaacagagagagaccctgggccagcagcctgacccacagccccgagagccacccccacctgtgcaagctgcaccaggagagagacgagagcaccctggccaccagcctggagaaggacgtgagacagaactgctacagcgtgtgcgacatcatgagactgggcagatacagcttcagcagccccctgaccagactgagcaccgacatcttctag

SEQ ID NO: 27147 - protein, 1104 aa, Artificial Sequence
  derived and/or modified sequence
MARRGKKPVVRTLEDLTLDSGYGGAADSVRSSNLSLCCSDSHPASPYGGSCWPPLADSMHSRHNSFDTVNTALVEDSEGLDCAGQHCSRLLPDLDEVPWTLQELEALLLRSRDPRAGPAVPGGLPKDALAKLSTLVSRALVRIAKEAQRLSLRFAKCTKYEIQSAMEIVLSWGLAAHCTAAALAALSLYNMSSAGGDRLGRGKSARCGLTFSVGRVYRWMVDSRVALRIHEHAAIYLTACMESLFRDIYSRVVASGVPRSCSGPGSGSGSGPGPSSGPGAAPAADKEREAPGGGAASGGACSAASSASGGSSCCAPPAAAAAAVPPAAAANHHHHHHHALHEAPKFTVETLEHTVNNDSEIWGLLQPYQHLICGKNASGVLCLPDSLNLHRDPQRSNKPGELPMFSQSELRTIEQSLLATRVGSIAELSDLVSRAMHHLQPLNAKHHGNGTPLHHKQGALYWEPEALYTLCYFMHCPQMEWENPNVEPSKVNLQVERPFLVLPPLMEWIRVAVAHAGHRRSFSMDSDDVRQAARLLLPGVDCEPRQLRADDCFCASRKLDAVAIEAKFKQDLGFRMLNCGRTDLVKQAVSLLGPDGINTMSEQGMTPLMYACVRGDEAMVQMLLDAGADLNVEVVSTPHKYPSVHPETRHWTALTFAVLHGHIPVVQLLLDAGAKVEGSVEHGEENYSETPLQLAAAVGNFELVSLLLERGADPLIGTMYRNGISTTPQGDMNSFSQAAAHGHRNVFRKLLAQPEKEKSDILSLEEILAEGTDLAETAPPPLCASRNSKAKLRALREAMYHSAEHGYVDVTIDIRSIGVPWTLHTWLESLRIAFQQHRRPLIQCLLKEFKTIQEEEYTEELVTQGLPLMFEILKASKNEVISQQLCVIFTHCYGPYPIPKLTEIKRKQTSRLDPHFLNNKEMSDVTFLVEGRPFYAHKVLLFTASPRFKALLSSKPTNDGTCIEIGYVKYSIFQLVMQYLYYGGPESLLIKNNEIMELLSAAKFFQLEALQRHCEIICAKSINTDNCVDIYNHAKFLGVTELSAYCEGYFLKNMMVLIENEAFKQLLYDKNGEGTGQDVLQDLQRTLAIRIQSIHLSSSKGSVV

SEQ ID NO: 27148 - protein, 1007 aa, Artificial Sequence
  derived and/or modified sequence
MARRGKKPVVRTLEDLTLDSGYGGAADSVRSSNLSLCCSDSHPASPYGGSCWPPLADSMHSRHNSFDTVNTALVEDSEGLDCAGQHCSRLLPDLDEVPWTLQELEALLLRSRDPRAGPAVPGGLPKDALAKLSTLVSRALVRIAKEAQRLSLRFAKCTKYEIQSAMEIVLSWGLAAHCTAAALAALSLYNMSSAGGDRLGRGKSARCGLTFSVGRVYRWMVDSRVALRIHEHAAIYLTACMESLFRDIYSRVVASGVPRSCSGPGSGSGSGPGPSSGPGAAPAADKEREAPGGGAASGGACSAASSASGGSSCCAPPAAAAAAVPPAAAANHHHHHHHALHEAPKFTVETLEHTVNNDSEIWGLLQPYQHLICGKNASGVLCLPDSLNLHRDPQRSNKPGELPMFSQSELRTIEQSLLATRVGSIAELSDLVSRAMHHLQPLNAKHHGNGTPLHHKQGALYWEPEALYTLCYFMHCPQMEWENPNVEPSKVNLQVERPFLVLPPLMEWIRVAVAHAGHRRSFSMDSDDVRQAARLLLPGVDCEPRQLRADDCFCASRKLDAVAIEAKFKQDLGFRMLNCGRTDLVKQAVSLLGPDGINTMSEQGMTPLMYACVRGDEAMVQMLLDAGADLNVEVVSTPHKYPSVHPETRHWTALTFAVLHGHIPVVQLLLDAGAKVEGSVEHGEENYSETPLQLAAAVGNFELVSLLLERGADPLIGTMYRNGISTTPQGDMNSFSQAAAHGHRNVFRKLLAQPEKEKSDILSLEEILAEGTDLAETAPPPLCASRNSKAKLRALREAMYHSAEHGYVDVTIDIRSIGVPWTLHTWLESLRIAFQQHRRPLIQCLLKEFKTIQEEEYTEELVTQGLPLMFEILKASKNEVISQQLCVIFTHCYGPYPIPKLTEIKRKQTSRLDPHFLNNKEMSDVTFLVEGRPFYAHKVLLFTASPRFKALLSSKPTNDGTCIEIGYVKYSIFQLVMQYLYYGGPESLLIKNNEIMEVRDPLWCWLS

SEQ ID NO: 27149 - protein, 183 aa, Artificial Sequence
  derived and/or modified sequence
MSDVTFLVEGRPFYAHKVLLFTASPRFKALLSSKPTNDGTCIEIGYVKYSIFQLVMQYLYYGGPESLLIKNNEIMELLSAAKFFQLEALQRHCEIICAKSINTDNCVDIYNHAKFLGVTELSAYCEGYFLKNMMVLIENEAFKQLLYDKNGEGTGQDVLQDLQRTLAIRIQSIHLSSSKGSVV

SEQ ID NO: 27150 - DNA, 3315 bp, Artificial Sequence
  derived and/or modified sequence
atggccagaagaggcaagaagcccgtggtgagaaccctggaggacctgaccctggacagcggctacggcggcgccgccgacagcgtgagaagcagcaacctgagcctgtgctgcagcgacagccaccccgccagcccctacggcggcagctgctggccccccctggccgacagcatgcacagcagacacaacagcttcgacaccgtgaacaccgccctggtggaggacagcgagggcctggactgcgccggccagcactgcagcagactgctgcccgacctggacgaggtgccctggaccctgcaggagctggaggccctgctgctgagaagcagagaccccagagccggccccgccgtgcccggcggcctgcccaaggacgccctggccaagctgagcaccctggtgagcagagccctggtgagaatcgccaaggaggcccagagactgagcctgagattcgccaagtgcaccaagtacgagatccagagcgccatggagatcgtgctgagctggggcctggccgcccactgcaccgccgccgccctggccgccctgagcctgtacaacatgagcagcgccggcggcgacagactgggcagaggcaagagcgccagatgcggcctgaccttcagcgtgggcagagtgtacagatggatggtggacagcagagtggccctgagaatccacgagcacgccgccatctacctgaccgcctgcatggagagcctgttcagagacatctacagcagagtggtggccagcggcgtgcccagaagctgcagcggccccggcagcggcagcggcagcggccccggccccagcagcggccccggcgccgcccccgccgccgacaaggagagagaggcccccggcggcggcgccgccagcggcggcgcctgcagcgccgccagcagcgccagcggcggcagcagctgctgcgccccccccgccgccgccgccgccgccgtgccccccgccgccgccgccaaccaccaccaccaccaccaccacgccctgcacgaggcccccaagttcaccgtggagaccctggagcacaccgtgaacaacgacagcgagatctggggcctgctgcagccctaccagcacctgatctgcggcaagaacgccagcggcgtgctgtgcctgcccgacagcctgaacctgcacagagacccccagagaagcaacaagcccggcgagctgcccatgttcagccagagcgagctgagaaccatcgagcagagcctgctggccaccagagtgggcagcatcgccgagctgagcgacctggtgagcagagccatgcaccacctgcagcccctgaacgccaagcaccacggcaacggcacccccctgcaccacaagcagggcgccctgtactgggagcccgaggccctgtacaccctgtgctacttcatgcactgcccccagatggagtgggagaaccccaacgtggagcccagcaaggtgaacctgcaggtggagagacccttcctggtgctgccccccctgatggagtggatcagagtggccgtggcccacgccggccacagaagaagcttcagcatggacagcgacgacgtgagacaggccgccagactgctgctgcccggcgtggactgcgagcccagacagctgagagccgacgactgcttctgcgccagcagaaagctggacgccgtggccatcgaggccaagttcaagcaggacctgggcttcagaatgctgaactgcggcagaaccgacctggtgaagcaggccgtgagcctgctgggccccgacggcatcaacaccatgagcgagcagggcatgacccccctgatgtacgcctgcgtgagaggcgacgaggccatggtgcagatgctgctggacgccggcgccgacctgaacgtggaggtggtgagcaccccccacaagtaccccagcgtgcaccccgagaccagacactggaccgccctgaccttcgccgtgctgcacggccacatccccgtggtgcagctgctgctggacgccggcgccaaggtggagggcagcgtggagcacggcgaggagaactacagcgagacccccctgcagctggccgccgccgtgggcaacttcgagctggtgagcctgctgctggagagaggcgccgaccccctgatcggcaccatgtacagaaacggcatcagcaccaccccccagggcgacatgaacagcttcagccaggccgccgcccacggccacagaaacgtgttcagaaagctgctggcccagcccgagaaggagaagagcgacatcctgagcctggaggagatcctggccgagggcaccgacctggccgagaccgcccccccccccctgtgcgccagcagaaacagcaaggccaagctgagagccctgagagaggccatgtaccacagcgccgagcacggctacgtggacgtgaccatcgacatcagaagcatcggcgtgccctggaccctgcacacctggctggagagcctgagaatcgccttccagcagcacagaagacccctgatccagtgcctgctgaaggagttcaagaccatccaggaggaggagtacaccgaggagctggtgacccagggcctgcccctgatgttcgagatcctgaaggccagcaagaacgaggtgatcagccagcagctgtgcgtgatcttcacccactgctacggcccctaccccatccccaagctgaccgagatcaagagaaagcagaccagcagactggacccccacttcctgaacaacaaggagatgagcgacgtgaccttcctggtggagggcagacccttctacgcccacaaggtgctgctgttcaccgccagccccagattcaaggccctgctgagcagcaagcccaccaacgacggcacctgcatcgagatcggctacgtgaagtacagcatcttccagctggtgatgcagtacctgtactacggcggccccgagagcctgctgatcaagaacaacgagatcatggagctgctgagcgccgccaagttcttccagctggaggccctgcagagacactgcgagatcatctgcgccaagagcatcaacaccgacaactgcgtggacatctacaaccacgccaagttcctgggcgtgaccgagctgagcgcctactgcgagggctacttcctgaagaacatgatggtgctgatcgagaacgaggccttcaagcagctgctgtacgacaagaacggcgagggcaccggccaggacgtgctgcaggacctgcagagaaccctggccatcagaatccagagcatccacctgagcagcagcaagggcagcgtggtgtag

SEQ ID NO: 27151 - DNA, 3024 bp, Artificial Sequence
  derived and/or modified sequence
atggccagaagaggcaagaagcccgtggtgagaaccctggaggacctgaccctggacagcggctacggcggcgccgccgacagcgtgagaagcagcaacctgagcctgtgctgcagcgacagccaccccgccagcccctacggcggcagctgctggccccccctggccgacagcatgcacagcagacacaacagcttcgacaccgtgaacaccgccctggtggaggacagcgagggcctggactgcgccggccagcactgcagcagactgctgcccgacctggacgaggtgccctggaccctgcaggagctggaggccctgctgctgagaagcagagaccccagagccggccccgccgtgcccggcggcctgcccaaggacgccctggccaagctgagcaccctggtgagcagagccctggtgagaatcgccaaggaggcccagagactgagcctgagattcgccaagtgcaccaagtacgagatccagagcgccatggagatcgtgctgagctggggcctggccgcccactgcaccgccgccgccctggccgccctgagcctgtacaacatgagcagcgccggcggcgacagactgggcagaggcaagagcgccagatgcggcctgaccttcagcgtgggcagagtgtacagatggatggtggacagcagagtggccctgagaatccacgagcacgccgccatctacctgaccgcctgcatggagagcctgttcagagacatctacagcagagtggtggccagcggcgtgcccagaagctgcagcggccccggcagcggcagcggcagcggccccggccccagcagcggccccggcgccgcccccgccgccgacaaggagagagaggcccccggcggcggcgccgccagcggcggcgcctgcagcgccgccagcagcgccagcggcggcagcagctgctgcgccccccccgccgccgccgccgccgccgtgccccccgccgccgccgccaaccaccaccaccaccaccaccacgccctgcacgaggcccccaagttcaccgtggagaccctggagcacaccgtgaacaacgacagcgagatctggggcctgctgcagccctaccagcacctgatctgcggcaagaacgccagcggcgtgctgtgcctgcccgacagcctgaacctgcacagagacccccagagaagcaacaagcccggcgagctgcccatgttcagccagagcgagctgagaaccatcgagcagagcctgctggccaccagagtgggcagcatcgccgagctgagcgacctggtgagcagagccatgcaccacctgcagcccctgaacgccaagcaccacggcaacggcacccccctgcaccacaagcagggcgccctgtactgggagcccgaggccctgtacaccctgtgctacttcatgcactgcccccagatggagtgggagaaccccaacgtggagcccagcaaggtgaacctgcaggtggagagacccttcctggtgctgccccccctgatggagtggatcagagtggccgtggcccacgccggccacagaagaagcttcagcatggacagcgacgacgtgagacaggccgccagactgctgctgcccggcgtggactgcgagcccagacagctgagagccgacgactgcttctgcgccagcagaaagctggacgccgtggccatcgaggccaagttcaagcaggacctgggcttcagaatgctgaactgcggcagaaccgacctggtgaagcaggccgtgagcctgctgggccccgacggcatcaacaccatgagcgagcagggcatgacccccctgatgtacgcctgcgtgagaggcgacgaggccatggtgcagatgctgctggacgccggcgccgacctgaacgtggaggtggtgagcaccccccacaagtaccccagcgtgcaccccgagaccagacactggaccgccctgaccttcgccgtgctgcacggccacatccccgtggtgcagctgctgctggacgccggcgccaaggtggagggcagcgtggagcacggcgaggagaactacagcgagacccccctgcagctggccgccgccgtgggcaacttcgagctggtgagcctgctgctggagagaggcgccgaccccctgatcggcaccatgtacagaaacggcatcagcaccaccccccagggcgacatgaacagcttcagccaggccgccgcccacggccacagaaacgtgttcagaaagctgctggcccagcccgagaaggagaagagcgacatcctgagcctggaggagatcctggccgagggcaccgacctggccgagaccgcccccccccccctgtgcgccagcagaaacagcaaggccaagctgagagccctgagagaggccatgtaccacagcgccgagcacggctacgtggacgtgaccatcgacatcagaagcatcggcgtgccctggaccctgcacacctggctggagagcctgagaatcgccttccagcagcacagaagacccctgatccagtgcctgctgaaggagttcaagaccatccaggaggaggagtacaccgaggagctggtgacccagggcctgcccctgatgttcgagatcctgaaggccagcaagaacgaggtgatcagccagcagctgtgcgtgatcttcacccactgctacggcccctaccccatccccaagctgaccgagatcaagagaaagcagaccagcagactggacccccacttcctgaacaacaaggagatgagcgacgtgaccttcctggtggagggcagacccttctacgcccacaaggtgctgctgttcaccgccagccccagattcaaggccctgctgagcagcaagcccaccaacgacggcacctgcatcgagatcggctacgtgaagtacagcatcttccagctggtgatgcagtacctgtactacggcggccccgagagcctgctgatcaagaacaacgagatcatggaggtgagagaccccctgtggtgctggctgagctag

SEQ ID NO: 27152 - DNA, 3315 bp, Artificial Sequence
  derived and/or modified sequence
atggcacgtcggggaaagaagccggtcgtcagaactttggaagaccttactcttgattcaggctatgggggtgctgccgacagcgtgcgcagttcaaatctgagcttgtgttgctcggacagccaccctgcgtccccatacggaggctcttgctggcccccacttgcagatagtatgcactcccggcataacagtttcgatacagtgaacactgcccttgtagaggactcagagggtctagactgtgccgggcagcattgtagcaggctgctcccagatctcgacgaggttccatggacactacaggaactggaagctctgctattaaggtcccgagacccaagggcgggcccagccgtgcccggcgggctgcccaaagatgctttggcaaaactgtcaaccctggtgtcaagggctctggttcgcattgcgaaggaggcacagcggctcagcctgcgctttgccaagtgcactaagtacgagatccagagtgctatggagattgtgctgtcgtggggattggctgcccactgcacggccgccgctctggccgcactgtcactttataacatgtcatcggcaggtggcgatcgccttggccggggaaagtctgcacgctgtggattgaccttttctgtgggacgtgtgtataggtggatggtggatagccgcgtcgccctgcgtatacatgaacatgccgcaatatatctgacagcctgcatggagagcttattcagggacatctacagccgtgtggttgcttcaggcgtccccaggagttgtagcggacccggaagcgggtctggcagcgggcctggcccttcaagcgggcccggagcagctcccgctgcagacaaggagagagaagccccaggtggcggcgcggcctccggaggcgcatgctccgccgcaagcagtgcttccggcggctcttcctgttgcgcaccccctgctgcagctgcagcagccgtacccccagcagctgctgccaatcatcaccatcaccatcatcacgcccttcatgaggctccaaagtttaccgtcgaaacccttgagcacaccgtaaataatgactcagaaatctgggggctgctgcaaccatatcaacatcttatttgtgggaagaacgccagcggagtattgtgtctccccgattctctgaatcttcatagggacccccagcgttcaaataagcccggtgaactccccatgttctcacagtcagagctgaggaccatcgagcagagcctgctggccacccgcgtgggttccatcgctgaattgagtgacctagtgtctcgagcgatgcatcatctgcagcccctgaacgctaagcaccacgggaatggtacccctctccaccataagcagggggccctttattgggagcccgaagcgctgtacactctctgctactttatgcactgcccgcaaatggagtgggaaaaccccaacgttgaaccaagcaaggtcaacctccaggtagaacgcccatttctggtgctcccccctctaatggagtggatccgtgtggctgtggcccacgccggccacaggcgcagctttagcatggactccgacgacgttcgacaggcagccaggctgttactccctggcgtggattgtgaaccccggcagttgagggccgatgactgtttctgcgcaagccggaagctggacgccgtcgcgattgaagcaaagtttaagcaggatctcggattcaggatgcttaattgtgggcggacggatcttgtgaagcaagcagtgagcctccttggaccagacggaataaacactatgagcgaacagggaatgacccctctgatgtatgcatgcgtgaggggcgacgaagccatggtccagatgctgctggatgctggcgctgacctgaatgtggaagtcgtaagcacaccacacaagtacccatcagtgcaccctgaaacccgacattggacggctctgacattcgcagtgttgcacggacatatcccggtggttcagctactgttggatgccggagcaaaggtcgaaggctcagtggaacatggcgaggaaaactattctgagaccccactgcagttggctgccgcagtgggtaacttcgagcttgtatctcttctgctcgagaggggagctgaccctctgataggaactatgtatcgcaacggtattagcaccacaccccagggggatatgaattctttctcccaggctgcagctcacgggcacaggaacgtgtttagaaaactcctggcccagccggagaaagagaagagcgatattctgtctcttgaagagatcttggccgaaggcactgatctggccgaaactgccccaccgccgctttgtgcctctaggaacagtaaggccaaactccgggcacttcgtgaggcgatgtaccattcggcagagcatgggtacgtggacgtgactatagatattcgctcgataggggtcccctggaccctgcacacctggttagaaagccttcgcatcgcttttcagcaacatagaagaccgttaatacagtgccttctcaaagagtttaagacgattcaggaagaagagtatactgaagaactggttacgcaaggccttccactgatgtttgaaatcctcaaagccagcaaaaacgaggtaataagtcagcagctgtgcgtaatcttcacccattgctatggaccataccccattccaaagttaaccgaaattaagcggaagcagacttcgcggcttgacccccacttcctcaataacaaagagatgtcagatgtgacctttcttgtagagggccgccccttctacgcacacaaggttctgttattcactgcatctccccggtttaaagccctcttgtcatcgaagccaaccaacgacggaacatgtatcgaaatcggatacgtgaaatatagcatcttccagttggtgatgcagtacttatattatggagggcccgagagtttgttgatcaaaaacaacgaaatcatggaattgttaagcgctgcaaaattctttcaattggaagcactccagcgtcactgtgagatcatttgcgctaagagcataaatacagacaactgcgtggatatttataatcacgcgaaattcctgggggtcaccgagctatctgcttattgcgaaggctattttctcaaaaatatgatggtcctgattgagaatgaagccttcaagcagcttctgtatgacaagaatggggagggtacaggccaggacgtcctgcaggacctgcagcgcacccttgccatcagaattcagagcatccacctgtcctcttccaaaggttccgtcgtctag

SEQ ID NO: 27153 - DNA, 3024 bp, Artificial Sequence
  derived and/or modified sequence
atggcacgccgcggcaaaaagccagttgtcagaactctcgaagacttgaccttagattctggctatgggggagccgcagactcagtccggagttcaaatcttagcctatgttgttcggactctcatccagcgtccccctatggcgggagttgctggccacccttggccgactcaatgcactcacggcacaactcatttgacactgtgaacacagccctcgttgaagactcagaaggtctggattgtgccggacagcactgttccaggcttcttcctgatctagatgaagtgccctggacactccaggaactcgaagctctgttacttagatccagagaccccagggcagggcctgctgtgcctggtggactccccaaggacgcgttggcaaagctttccacactggtgtccagggccttggtgagaatcgctaaagaggctcagcggctctcactgcgcttcgccaagtgcacgaaatatgagattcaaagtgccatggagattgtgctctcatggggccttgccgctcactgcaccgccgctgcactcgctgctctgagtctgtataacatgagctcagctggtggggataggctggggcgcggaaaatcagcccgctgcgggctgaccttttcagttgggagagtctacagatggatggtagactcacgcgttgccctccgtattcacgagcacgccgccatatacttgactgcctgcatggagtccctcttccgggatatatacagcagagttgtggcctccggagtgcctaggtcatgtagcggtcctgggtcaggatccggctcaggccccggtccttcctcgggccctggtgccgctcctgctgccgataaggagcgagaagcaccgggcggtggagcagcctccggcggcgcttgttctgccgcctccagcgctagcggggggtccagctgctgcgcacctcccgcagccgcagcagcagcggtgccaccagctgctgccgctaatcaccaccaccaccaccaccatgctctgcacgaagccccgaagttcaccgtggaaaccctagagcacacagtgaataacgattccgagatctgggggctcctgcagccttaccaacacttgatttgcggcaagaacgcaagcggtgtactctgtctccctgactctctcaacctgcacagagatcctcagagatcaaataaacctggggagttgcctatgtttagccagtcggaacttcgtactatcgaacagtccctactggccaccagagtggggtctatcgccgaactgtccgatttggtttcacgtgcaatgcaccatttacaacctttgaatgccaagcatcatggaaacggcacacccctccatcataagcaaggcgcgctgtattgggaaccagaagctctgtacaccctctgctattttatgcattgtccccagatggagtgggaaaaccctaacgtggaaccaagtaaggtgaatctccaagtcgagcgcccttttttagtgctgccccccctgatggagtggattagggttgcggttgctcacgccggccataggcggtccttcagcatggacagcgacgatgtcagacaggccgccagactgctgttaccgggggtggattgcgagccacgtcaactgcgtgcggatgactgcttctgtgctagtcgaaagctggacgccgtggcaatcgaagctaagtttaaacaggatctgggctttcgcatgctgaactgtggaaggactgacctcgtcaaacaagctgtctccctgctcggtccagacggaattaacacaatgtccgagcaggggatgactcccctcatgtacgcctgcgtgcgaggtgacgaggctatggtgcagatgctgctcgatgctggcgctgacttaaatgtggaagtggtcagcaccccgcacaagtatccaagtgtgcaccctgaaacaagacattggacagcgctcaccttcgcagtcctgcacggccacatcccagtggttcagttgctactggacgccggggccaaagttgaaggtagcgttgaacacggggaagagaattacagcgaaaccccactccagctcgcggccgccgtgggcaacttcgagttggtgagcctccttctggaacgtggggccgatcctttgattggaactatgtatcgaaatgggatctcaaccaccccacaaggggacatgaatagttttagtcaggcagcagcacacggtcatcgcaatgtatttcggaagctgctcgcgcagccagaaaaagagaagtccgacatcctgtccctcgaggagatactggcggagggaaccgatctggctgagaccgccccaccaccactgtgcgcatcgcgaaactcaaaggctaaactgagggcactgcgggaggccatgtatcactctgccgagcacggatacgtcgacgttacaatcgatatcaggagtatcggggttccctggacacttcacacttggctcgagtcacttcgtatcgccttccaacaacatcgcaggcctctgatacagtgcctgcttaaggagttcaaaacaatccaggaagaagaatatactgaagagctggtcacgcagggacttcctttgatgtttgaaatcctgaaagcatccaaaaacgaagtcatcagtcagcagctgtgcgtgatttttacgcactgctacggcccctatcccattcctaaactcactgagattaaaagaaaacagacaagccgtttggatccccactttctgaacaataaggaaatgtctgacgttactttcctggttgaaggccggcccttttacgcacataaggtgttactctttacagcttctccgcggttcaaagccctactgagttctaagcctacgaatgatggcacctgtatcgagatcggctatgttaaatactccatcttccagttggtcatgcagtatttgtactacggagggcccgagagtttgctcatcaaaaataacgagattatggaagtgagggaccccttatggtgttggctgtcatag

SEQ ID NO: 27154 - DNA, 3315 bp, Artificial Sequence
  derived and/or modified sequence
atggcccggcggggcaagaagcctgtggtgaggaccctggaggacctgaccctggacagcggctacggcggcgctgctgacagcgtgcgcagcagcaacctgagcctgtgctgcagcgacagccacccagccagcccctatggaggcagctgctggccacccctggccgacagcatgcacagccgccacaacagctttgacacagtgaacacagccctggtggaggacagcgagggcctggactgtgccggccagcactgcagccggctgctgcctgacctggatgaggtgccctggaccctgcaggagctggaggccctgctgctgcggagccgggacccccgggccggccctgctgtgcctgggggcctgcccaaggatgccctggccaagctgagcaccctggtgtcccgggccctggtgagaattgccaaggaggcccagaggctgagcctgcgctttgccaagtgcaccaagtatgagatccagagcgccatggagatcgtgctgtcctggggcctggccgcccactgcacagctgctgccctggccgccctgagcctgtacaacatgagcagcgctggaggagaccggctgggccggggcaagagcgcccgctgtggcctgaccttctctgtgggccgggtgtaccgctggatggtggacagccgggtggccctgcgcatccacgagcacgccgccatctacctgacagcctgcatggagagcctcttccgggacatctacagccgggtggtggccagcggcgtgcccaggagctgcagcggccctggcagcggcagcggcagcggccctggccccagcagcggccctggggccgccccagctgctgacaaggagcgggaggcccctgggggcggggccgccagcggcggggcctgcagcgctgccagcagcgccagcggcggcagcagctgctgtgcccccccagctgctgctgctgctgctgtgcccccagctgctgctgccaaccaccaccaccaccaccaccacgccctgcacgaggcccccaagttcaccgtggagaccctggagcacacagtgaacaatgattctgagatctggggcctgctgcagccctaccagcacctgatctgtgggaagaatgccagcggcgtgctgtgcctgcctgacagcctgaacctgcaccgggacccccagaggagcaacaagccaggagagctgcccatgttcagccagagcgagctgcggaccatcgagcagagcctgctggccaccagggtgggcagcattgctgagctgagtgacctggtgtcccgggccatgcaccacctgcagcccctgaatgccaagcaccacggcaatggcacccccctgcaccacaagcagggcgccctgtactgggagcctgaggccctgtacaccctgtgctacttcatgcactgcccccagatggagtgggagaaccccaacgtggagcccagcaaggtgaacctgcaggtggagcggcccttcctggtgctgccccccctgatggagtggatccgggtggccgtggcccacgccggccacagaagaagcttctccatggacagtgatgatgtgcggcaggccgcccggctgctgctgcccggggtggactgtgagccccggcagctgcgggcagatgactgcttctgtgccagcaggaagctggatgctgtggccatcgaggccaagttcaagcaggacctgggcttcaggatgctgaactgtggccgcacagacctggtgaagcaggccgtgtccctgctgggcccagatggcatcaacaccatgtctgagcagggcatgacccccctgatgtatgcctgtgtgagaggagatgaggccatggtgcagatgctgctggatgctggagctgacctgaatgtggaggtggtgtccaccccccacaagtaccccagcgtgcaccctgagaccaggcactggacagccctgacctttgctgtgctgcacggccacatccctgtggtgcagctgctgctggatgctggggccaaggtggagggctctgtggagcacggggaggagaactacagcgagacccccctgcagctggccgctgctgtgggcaactttgagctggtgtccctgctgctggagagaggagctgaccccctcatcggcaccatgtacagaaatggcatcagcaccaccccccagggcgacatgaacagcttcagccaggccgccgcccacggccacagaaatgtgttcaggaagctgctggcccagcctgagaaggagaagagtgacatcctgagcctggaggagatcctggccgagggcacagacctggccgagacagcccccccacccctgtgtgccagcaggaacagcaaggccaagctgcgggccctgcgggaggccatgtaccacagcgctgagcacggctacgtggatgtgaccatcgacatccgcagcattggagtgccctggaccctgcacacctggctggagagcctgcgcatcgccttccagcagcaccggcggcccctcatccagtgcctgctgaaggagttcaagaccatccaggaggaggagtacacagaggagctggtgacccagggcctgcccctgatgtttgagatcctgaaggccagcaagaatgaggtgatcagccagcagctgtgtgtgatcttcacccactgctacggcccctaccccatccccaagctgacagagatcaagaggaagcagaccagccggctggacccccacttcctgaacaacaaggagatgtctgatgtgaccttcctggtggagggccggcccttctacgcccacaaggtgctgctcttcaccgccagcccccgcttcaaggccctgctgagcagcaagcccaccaatgatggcacctgcattgaaattggctacgtgaagtacagcatcttccagctggtgatgcagtacctgtactacggcggccctgagagcctgctgatcaagaacaatgagatcatggagctgctgtctgctgccaagttcttccagctggaggccctgcagaggcactgtgagatcatctgtgccaagagcatcaacacagacaactgtgtggacatctacaaccacgccaagttcctgggcgtgacagagctgagcgcctactgtgagggctacttcctgaagaacatgatggtgctgattgaaaatgaggccttcaagcagctgctgtatgacaagaatggagagggcaccggccaggatgtgctgcaggacctgcagaggaccctggccatccgcatccagagcatccacctgagcagcagcaagggctctgtggtgtag

SEQ ID NO: 27155 - DNA, 3024 bp, Artificial Sequence
  derived and/or modified sequence
atggcccggcggggcaagaagcctgtggtgaggaccctggaggacctgaccctggacagcggctacggcggcgctgctgacagcgtgcgcagcagcaacctgagcctgtgctgcagcgacagccacccagccagcccctatggaggcagctgctggccacccctggccgacagcatgcacagccgccacaacagctttgacacagtgaacacagccctggtggaggacagcgagggcctggactgtgccggccagcactgcagccggctgctgcctgacctggatgaggtgccctggaccctgcaggagctggaggccctgctgctgcggagccgggacccccgggccggccctgctgtgcctgggggcctgcccaaggatgccctggccaagctgagcaccctggtgtcccgggccctggtgagaattgccaaggaggcccagaggctgagcctgcgctttgccaagtgcaccaagtatgagatccagagcgccatggagatcgtgctgtcctggggcctggccgcccactgcacagctgctgccctggccgccctgagcctgtacaacatgagcagcgctggaggagaccggctgggccggggcaagagcgcccgctgtggcctgaccttctctgtgggccgggtgtaccgctggatggtggacagccgggtggccctgcgcatccacgagcacgccgccatctacctgacagcctgcatggagagcctcttccgggacatctacagccgggtggtggccagcggcgtgcccaggagctgcagcggccctggcagcggcagcggcagcggccctggccccagcagcggccctggggccgccccagctgctgacaaggagcgggaggcccctgggggcggggccgccagcggcggggcctgcagcgctgccagcagcgccagcggcggcagcagctgctgtgcccccccagctgctgctgctgctgctgtgcccccagctgctgctgccaaccaccaccaccaccaccaccacgccctgcacgaggcccccaagttcaccgtggagaccctggagcacacagtgaacaatgattctgagatctggggcctgctgcagccctaccagcacctgatctgtgggaagaatgccagcggcgtgctgtgcctgcctgacagcctgaacctgcaccgggacccccagaggagcaacaagccaggagagctgcccatgttcagccagagcgagctgcggaccatcgagcagagcctgctggccaccagggtgggcagcattgctgagctgagtgacctggtgtcccgggccatgcaccacctgcagcccctgaatgccaagcaccacggcaatggcacccccctgcaccacaagcagggcgccctgtactgggagcctgaggccctgtacaccctgtgctacttcatgcactgcccccagatggagtgggagaaccccaacgtggagcccagcaaggtgaacctgcaggtggagcggcccttcctggtgctgccccccctgatggagtggatccgggtggccgtggcccacgccggccacagaagaagcttctccatggacagtgatgatgtgcggcaggccgcccggctgctgctgcccggggtggactgtgagccccggcagctgcgggcagatgactgcttctgtgccagcaggaagctggatgctgtggccatcgaggccaagttcaagcaggacctgggcttcaggatgctgaactgtggccgcacagacctggtgaagcaggccgtgtccctgctgggcccagatggcatcaacaccatgtctgagcagggcatgacccccctgatgtatgcctgtgtgagaggagatgaggccatggtgcagatgctgctggatgctggagctgacctgaatgtggaggtggtgtccaccccccacaagtaccccagcgtgcaccctgagaccaggcactggacagccctgacctttgctgtgctgcacggccacatccctgtggtgcagctgctgctggatgctggggccaaggtggagggctctgtggagcacggggaggagaactacagcgagacccccctgcagctggccgctgctgtgggcaactttgagctggtgtccctgctgctggagagaggagctgaccccctcatcggcaccatgtacagaaatggcatcagcaccaccccccagggcgacatgaacagcttcagccaggccgccgcccacggccacagaaatgtgttcaggaagctgctggcccagcctgagaaggagaagagtgacatcctgagcctggaggagatcctggccgagggcacagacctggccgagacagcccccccacccctgtgtgccagcaggaacagcaaggccaagctgcgggccctgcgggaggccatgtaccacagcgctgagcacggctacgtggatgtgaccatcgacatccgcagcattggagtgccctggaccctgcacacctggctggagagcctgcgcatcgccttccagcagcaccggcggcccctcatccagtgcctgctgaaggagttcaagaccatccaggaggaggagtacacagaggagctggtgacccagggcctgcccctgatgtttgagatcctgaaggccagcaagaatgaggtgatcagccagcagctgtgtgtgatcttcacccactgctacggcccctaccccatccccaagctgacagagatcaagaggaagcagaccagccggctggacccccacttcctgaacaacaaggagatgtctgatgtgaccttcctggtggagggccggcccttctacgcccacaaggtgctgctcttcaccgccagcccccgcttcaaggccctgctgagcagcaagcccaccaatgatggcacctgcattgaaattggctacgtgaagtacagcatcttccagctggtgatgcagtacctgtactacggcggccctgagagcctgctgatcaagaacaatgagatcatggaggtgcgggaccccctgtggtgctggctgtcctag

SEQ ID NO: 27156 - DNA, 3315 bp, Artificial Sequence
  derived and/or modified sequence
atggcccggcggggcaagaagcccgtggtgcggaccctggaggaccttactctcgacagcggctatggcggagcagcagattccgtgcgaagctctaacctgtctctttgctgcagcgacagccaccccgccagtccatacggtgggtcttgttggccacctttggctgatagcatgcatagcaggcacaactcgttcgataccgtgaacactgcccttgtggaggacagcgaaggcttggactgcgcagggcagcactgttcaagattactccccgatttagacgaggtcccctggacactgcaggaactcgaagcgctcttgttgcggtcccgcgatccgcgcgctgggcccgccgtaccgggcggactccctaaagacgccctggctaaactttcaaccctcgtgagcagagcactggtgagaattgcgaaagaagcgcaaagactatcactgcgatttgccaaatgtacaaaatatgagatccagagcgccatggaaatcgttctgtcctggggcctggccgcccactgcacggctgcagctctcgcagctctgtcattatacaacatgagttcagccggaggggatcgcctgggccgtggtaagtcggctagatgcggcctcaccttttccgtaggcagagtatacagatggatggtcgactcgagggtagctcttcgcattcacgagcacgctgctatttatcttactgcctgcatggagtctttgttccgggatatttactcaagagtggtggccagtggtgtgcctaggagttgctctggtcctggcagcgggagcggcagcggacctggtccaagttccgggcctggtgctgcacccgccgcggacaaggagcgggaagcacccggagggggagccgccagcgggggcgcatgctccgcggcctcgagcgcatccggcggctcaagttgctgtgccccgcctgcagctgcggccgcagctgtgccaccagcagctgcggccaaccatcatcatcatcaccatcacgcactgcacgaagccccaaagttcaccgtggagacccttgaacacaccgtgaataacgattcggagatctggggattgctgcagccttatcaacatctgatctgtggaaagaacgctagcggcgtgttgtgtttgcctgatagccttaatctacaccgcgatccgcagcggtccaataagccaggagagctccccatgtttagccagtccgaattgaggacgattgagcagtcccttctggctaccagagtgggcagtattgctgagctgtcagacctcgttagccgcgccatgcatcatctgcagcctctcaatgccaagcaccacggtaacgggacaccactgcatcataagcagggcgctctgtattgggagcccgaagcgctgtacaccctgtgttatttcatgcattgtccacagatggagtgggaaaatcctaacgtggagccgagcaaggtcaacctccaggtggagcggccattcctggtcctgccaccattaatggaatggatacgtgttgctgtagctcacgctggacaccgaaggagctttagcatggattccgatgatgtgagacaagccgctcgcctgctgctgccaggcgtggactgcgagcctcgacagctgcgggctgacgattgcttctgcgctagccgaaaattggacgccgtggccattgaggctaagtttaaacaggacctcggtttccgaatgctcaactgcggtcgcaccgatctcgtgaagcaggccgtgtctctacttggacccgatggcataaacacaatgtctgagcaaggcatgacccccctcatgtacgcctgtgtacggggggacgaagccatggtgcagatgctcctggacgctggagccgatcttaatgttgaagttgtatcaaccccacacaagtatccatccgtgcaccctgagaccaggcactggactgcactgacctttgctgtgttgcacggacacatacccgtggttcagttactcctcgacgccggagctaaggtggaaggtagcgtggagcacggcgaggaaaactactccgagactcccctgcagcttgctgccgctgtcgggaactttgagctggtcagcctgctgctggagcggggcgccgatcccttgatcgggactatgtatcggaacggaatttcgaccacaccgcagggcgatatgaattccttttcccaggcggccgcacatgggcacagaaatgtctttcgaaaactcttagcgcagccggaaaaggagaaaagtgatattctctctctggaagagattctcgctgaaggcactgacctggcggaaactgccccgccccccctgtgtgcctcgcggaatagcaaggccaaactacgagcgttacgcgaagctatgtaccactcggccgaacacgggtacgtcgacgtgacaatcgacattcgcagtatcggcgtcccttggaccctccatacatggttagagagtctgaggattgcgtttcagcagcaccggaggccactgattcaatgtctgctgaaggagttcaagacaattcaagaggaagaatacaccgaggagttagtgacacaagggttacctttgatgttcgagatcctgaaagcatccaagaacgaggtgatcagccagcagctgtgtgtgatttttacccactgctacgggccttaccccattcctaagctgacggaaattaagcgaaagcaaacatctcggctggaccctcattttctgaacaataaggagatgagtgatgtgacatttttggttgaggggcgccccttttatgcacacaaagtactgctgttcaccgcttcacctaggtttaaagcattacttagtagcaagccgaccaatgatggcacttgcattgagatcggttacgtgaagtactctatcttccaactcgtgatgcagtatttgtactacgggggtccggagtccctcctcattaagaataacgagatcatggagctactgtccgccgctaaatttttccagttagaggcactacaaagacattgcgaaatcatctgcgcaaagtcaattaatactgacaactgcgtcgacatctacaatcatgctaaattcctcggagtgaccgaactgtccgcgtactgtgagggatattttttgaaaaacatgatggtcttaatagagaacgaggcatttaagcagctgctctacgacaaaaacggcgagggtaccggtcaagacgtgcttcaggatttacagaggacactcgccattaggattcagtctatccatttgtctagcagcaagggctccgtcgtgtag

SEQ ID NO: 27157 - DNA, 3024 bp, Artificial Sequence
  derived and/or modified sequence
atggcccggcggggcaagaagcccgtggtgcggaccctggaggacttaactctcgattccggatatggtggggccgctgattccgtacggtcaagtaatttatccctgtgttgtagcgacagtcaccccgcatccccttacggcggtagttgctggcccccactggcggattccatgcactcccggcataattcatttgacacagtaaatactgccttagtcgaggactccgagggacttgactgtgctgggcagcattgtagtcgcctcctgcccgacttggacgaggtcccctggactttgcaggaattagaggcactgctcctgagaagtcgtgaccctcgagctggtcccgcagtgcccggcgggcttcctaaagatgcactggcaaagctgagcacccttgtctcccgcgcgcttgtgagaattgctaaagaagcccagaggttgtctctgcgattcgccaagtgtactaaatacgagatacaatccgcaatggaaatcgtacttagctggggtcttgccgcccactgcaccgccgccgcattggcagctctctccctatataacatgtccagcgccggaggcgataggctgggtagggggaaaagtgcccgatgcgggctcactttctctgtgggtagggtgtaccgctggatggtagactcccgcgtagcactgaggatccacgagcatgctgcgatttacttgactgcttgcatggaaagtctgttcagggacatttacagtcgcgtcgtcgcgagcggagtcccacgcagctgtagcggacccgggagtgggagcgggagcggtcctggtccttcttccggacccggggccgcgcccgctgcagataaggaaagggaggcaccgggcgggggtgctgcctctggaggggcatgttcagccgcgtctagtgcgtcaggcgggtctagttgctgcgccccgcctgccgcggccgcagcagccgtccctccagcggccgctgcaaatcaccaccaccatcaccaccacgcgctgcacgaagctccgaaatttaccgtggagacactggagcacaccgtgaataatgattctgagatttggggccttttacaaccttaccaacacctcatctgcggaaaaaatgcgtccggagtgctatgtctccctgactctttgaatctgcatagagatccccagaggtcaaataagcctggggaactgccaatgttttcacagagcgagctgcggaccatagagcaaagtctcctggctaccagagtgggttcaatcgcagaactcagtgatttagtctcacgcgctatgcaccatctgcaaccattaaatgctaagcaccatgggaacggtacccctttgcaccataagcaaggtgccctttactgggagcccgaggccctgtatactttgtgttactttatgcactgcccacagatggaatgggagaatccgaacgtggagccctcgaaagtgaatcttcaggtggagcggccttttctagtgctgcctccactaatggagtggatccgggtcgccgtggcccatgcgggacacagacggtcgttttctatggattctgatgatgtccgacaggcggcccgcttactgttacctggagtagactgcgaaccgaggcagctccgggcagacgattgcttctgcgccagcagaaagctcgatgcagtcgcaatcgaggcaaaatttaagcaggatctcgggttcagaatgttgaactgcgggcgtaccgatttggtgaaacaggcggtttccctcctaggcccagatggaattaatacaatgtccgaacaggggatgaccccactcatgtatgcttgtgtccggggcgatgaggcaatggtgcagatgctccttgatgcaggcgcagatctaaatgttgaggtggtcagcacaccgcataagtatcccagtgtgcacccagagacccggcactggaccgccctcaccttcgccgtgttgcatggccacatacccgtcgttcagctgctgctcgatgctggcgctaaagtggaggggtcggtggaacacggggaagagaactactcagaaactcctctgcagctcgcagccgccgtggggaatttcgagcttgttagcctcctcctggagcgcggggccgaccccttgatcgggacaatgtatagaaatggcataagtaccactccgcaaggcgacatgaacagtttctctcaggcggcagcccatggccaccggaatgtttttcgtaaactgttagcccaacccgagaaggagaaatccgacatcctgagtctcgaagagattctggccgagggaactgatctggcggaaacggctcccccacccctgtgtgcctctagaaactctaaagctaagctcagggcccttcgggaggctatgtaccactccgctgaacacggctatgtggacgtcacaatcgacatccgctcgataggcgtcccgtggacactgcacacttggctggagtcattgcggatcgcctttcagcaacaccgaaggcctctgatccagtgcttactcaaggagttcaagaccattcaggaggaggaatatacggaggaactcgtgacccagggcctacctctgatgtttgagatcctcaaagcttcaaagaacgaagttatctcccagcagctttgtgttatctttacccattgctacggaccttatccgatccccaaacttacagagatcaaacggaagcagaccagtagacttgacccgcatttcctcaacaataaagaaatgtccgacgtgacgttcttagtggaggggaggcctttttacgcccacaaagtgcttctgttcacagccagtccacggttcaaggcactgctctccagcaaacccactaacgacggcacttgcattgagatcggatacgttaaatactcaatatttcaactagtgatgcagtacctttactacggcggccctgagagtttactgattaaaaacaatgagatcatggaggttcgcgaccccctctggtgctggctttcatag

SEQ ID NO: 27158 - DNA, 3315 bp, Artificial Sequence
  derived and/or modified sequence
atggcacggagaggcaaaaagccagtggtaagaaccctggaagatctgactctggattctggctacggtggggctgcggatagtgtgcgctctagcaatttatctttgtgctgcagcgactcccacccggcaagcccatacggcggttcttgttggcctccattagcagattcgatgcatagtcggcataactctttcgacacagttaacacagccctggtcgaagactctgagggcctggactgtgccggtcagcactgcagcagactgttgcctgacttggacgaggttccctggacactccaggagctggaggctctacttcttcggtctcgggacccaagggccggacctgctgtgcccggtggcctgcctaaggacgccttagccaaactcagcacgctggtcagccgggctctggttcgcattgccaaggaggctcaaagattgagcctccgatttgctaaatgcaccaagtatgaaattcaatccgctatggaaattgtgctatcttggggactggcagctcattgcacggccgcagccttagcagccctgagcttgtataacatgtcatccgccggaggggaccgactggggcgagggaagtccgcccgatgtggactcactttctctgtggggagggtgtatcgctggatggtcgattcaagggtagccttgcgcattcatgagcatgcggctatctacctgaccgcttgtatggagtcattattccgggacatttactccagggtcgtcgccagcggcgtccctcggtcttgcagcggaccagggtccggcagtggcagcggccctgggccatccagtggccctggagctgcgccagccgctgataaagaaagagaggctccgggtgggggagccgcaagtggcggagcttgctcagcagctagttcagcctcgggcggtagctcatgttgtgcaccacccgcagccgctgcggctgccgtgccacccgcagcagccgcaaaccaccatcatcatcatcaccacgctcttcacgaggcgcctaaatttactgtagagaccctggagcatacagttaataatgactctgaaatatggggcctgcttcaaccctatcaacatcttatttgcggcaagaacgcttcgggcgtgttgtgcctcccagactccctcaatctgcatcgggacccccagcgctccaacaaacccggtgaacttcctatgttttcccaatcagagttaaggacaatcgagcaaagcctgctggcgacacgtgttggcagcatcgctgagttgtctgaccttgtgtcccgggctatgcaccatcttcagcctctcaacgcaaagcaccatgggaacggcactcctttacaccacaagcagggggctctgtattgggagccagaagcactatacactttatgttactttatgcattgcccacagatggagtgggaaaatccaaacgtcgagccttctaaggtgaacctccaagtggaaaggccatttttggtgctcccccctctaatggagtggatcagggtggccgtggcccatgccggtcatcgtcggagcttttccatggatagcgacgatgttagacaggcagcacgactcttattaccaggggtggactgcgaaccaaggcagctgagagcagacgactgtttctgcgcttcgcgaaaactagatgccgtggcaatagaggccaaattcaaacaagatttgggcttccggatgctgaattgcggcaggaccgacctggtaaaacaggcggtgtccctgttgggacctgacgggatcaacactatgtccgaacagggaatgaccccactgatgtacgcctgtgtacgaggcgatgaagccatggtccaaatgctcttggacgctggtgccgacctgaatgtcgaggtggtcagtacgccccataaatacccctctgtgcatccagagaccaggcattggacagccctgactttcgctgtgcttcacgggcacattccggtggttcagctgctgttagacgccggagctaaagtggaaggaagtgttgagcacggggaagagaattattctgagacacccttgcagctggccgcagctgtgggtaatttcgaactcgtgagcctgctcctggaaaggggagccgaccccctgatcggtactatgtaccggaatggcataagcacaacaccccagggcgacatgaactcgttctcacaggccgcagcgcatggacaccggaacgtgttccgcaagctgctggcccaacccgaaaaggagaagtctgacatcctcagtctagaagaaatccttgcagaaggcactgacctagcagaaactgcccctccccctttatgcgcatccaggaatagtaaagcaaaactgagggctcttagagaggctatgtatcatagtgccgagcatggatatgttgatgtaaccatcgacattcgttcaataggagtcccctggaccctgcatacttggctcgaatccttgaggatagctttccaacaacacaggcgtccactgattcagtgtttacttaaggaattcaagactatccaggaggaggagtacaccgaggagctcgtgactcaaggactccctttgatgttcgaaatcttgaaagcctcgaagaacgaagtgatttcacagcagctctgcgttatctttacacattgttacggaccatacccgataccaaagctgaccgagattaagcgcaaacagacctctcgtctggaccctcactttctgaacaacaaggagatgagtgacgtgactttcctggtggaggggaggcccttttacgcacacaaagtgctgctgtttacagcaagtcccaggttcaaagccctcttgtcaagcaagcctacaaatgacggtacctgcattgaaattgggtacgtcaaatactcgatttttcagctcgtaatgcagtatttatattatggcggacccgaatccctccttataaagaacaacgaaataatggaacttttgtcggccgctaaattctttcagttggaagccctgcagaggcattgcgagattatatgcgccaaaagcatcaacactgacaactgcgtggatatctacaaccacgccaagttccttggcgtgaccgagctttccgcctattgcgagggatattttctgaagaacatgatggtgctaatcgaaaatgaggcctttaaacagttgctctacgataagaacggagagggtacgggccaggatgtcctgcaggacctccagagaacactggccatcaggatacagtccatacatttgtcatcctcgaagggtagcgttgtctag

SEQ ID NO: 27159 - DNA, 3024 bp, Artificial Sequence
  derived and/or modified sequence
atggcacggcgaggcaagaaacctgttgtccgcacgttggaggacctgacacttgattctggatatggtggggcagctgactccgtgaggtcatccaacctgtctttgtgttgctcagattcccaccccgcttcgccctatggtggctcttgttggccccctttagcagattccatgcactccaggcataactcattcgatacagtgaataccgctctcgtggaagattcagaaggcctggattgcgctggccagcactgttcccggttactgcccgatcttgacgaggtgccctggacactgcaggagctggaggccctactactcagatctagagaccctagggcgggaccagcagtccccggaggactccctaaggatgccctggccaagctgtccaccctggtctctagagccctcgtgcgcatcgctaaagaggcccagagactgtcactcagattcgcaaagtgtactaaatacgagatacagtctgcgatggagatagttttgtcttggggtcttgctgctcattgcacagccgctgctctggccgctttgtccttgtataacatgtcctccgctggcggagacaggctcggcagaggaaagtcagcaagatgtgggctgacgttttctgtggggagggtttacagatggatggtggattcaagggtggccctccgcatccacgagcatgcagctatttatctaacagcctgcatggagtctctcttccgggatatttacagtcgggttgtggctagcggcgtaccacgaagctgttccgggcctggctccggatccggttccggaccgggaccgagcagtggacctggcgctgctccagccgcagacaaagagagggaggctccaggaggcggagccgcttcaggaggggcatgctctgctgcctctagtgcctcagggggaagctcttgctgcgcacctccagcagcagccgctgcagcagtgccgcctgccgcagctgctaaccatcaccaccatcaccatcatgccctgcatgaagctccaaaattcacagttgaaactcttgagcatacggtcaataatgattccgagatttggggactcctgcagccatatcagcatctgatctgtgggaagaacgcttctggggtgctttgtctacctgattcactcaatctccaccgggatcctcaacgatctaataagcccggagagttgccaatgttctcccagagcgaactgcggactattgagcaatctttgctcgcgacacgtgtgggctccatcgctgagttgtccgatctagtctctcgcgctatgcaccacctgcaaccactcaacgccaaacatcacggcaacggcacgcctctacaccacaagcaaggcgctttgtattgggagccggaagcattatacactctgtgttatttcatgcactgcccacagatggagtgggagaacccaaacgtcgaaccctcgaaggttaatctgcaggtggaacgcccatttctggttctgcctcctctgatggaatggatcagagtagcagtggcgcatgcagggcatagaaggagcttttcaatggattctgacgacgtaaggcaggctgctcgcctcttgctgccaggtgtggactgtgaacctcgtcagctgcgggctgatgattgtttctgcgccagtcggaaattggatgccgtggcaatcgaggcaaaattcaagcaggacctgggtttcaggatgctcaattgcgggaggacggacctggtgaagcaggctgtgtctctccttggacccgatggtatcaacacgatgagtgaacaggggatgaccccattgatgtatgcttgtgtaaggggtgatgaggctatggtgcaaatgctccttgatgccggagcagatcttaatgtggaggtggtcagtacaccacataagtatccatccgtccatcccgagactcgccactggacagctctcacttttgcagtgctgcacggacatattccggtcgtacagctgctcctggatgcaggcgcaaaagttgagggttcggttgagcatggcgaagaaaactacagcgaaacgcccctccaactggcagcagccgtgggtaatttcgagctggtgtccctcctgctggaacggggagctgaccctctgatcggcaccatgtatcgcaacggcatctctactaccccccagggagatatgaatagttttagccaggccgctgctcatggacatagaaatgtgttcagaaagctacttgctcagccagaaaaggagaagtctgacatcctgtcactggaggaaatcttggcggaaggaacagatctcgcagagacagcgcctccacccctgtgtgcttccagaaattcaaaggccaaactgagggctctgcgcgaggccatgtatcatagtgccgaacacggatatgttgacgtgaccatcgatattcggagcataggggtaccatggacacttcacacttggctggaaagtctgcgtatcgcctttcagcagcaccgtcgcccacttattcagtgcttgcttaaggagtttaaaactattcaggaggaggagtacaccgaggaactggtcacgcagggccttcctctaatgttcgagatactgaaggccagcaagaacgaggtgatctcccagcagctgtgcgtgatattcacccactgctacggcccttaccccattcccaaattaaccgagataaaaaggaaacaaacatccaggctggatccccatttcctgaacaacaaggaaatgtctgacgtgaccttcctggttgaaggccgtccattctacgcccacaaggtgcttctttttaccgcatctccaaggttcaaagccctactgtccagcaagcctaccaatgacggcacctgcattgagatcggttacgtcaagtactccatcttccagctcgtgatgcagtacctctattacggtggaccagagtctctgctcatcaagaacaatgaaattatggaggtgagagatcccctctggtgctggttgagctag

SEQ ID NO: 27160 - DNA, 5767 bp, Artificial Sequence
  derived and/or modified sequence
ggttcggcaaggtttgcagccgccacggccgctgctgcgctccggtgcagggcaggctggcgccgagcgaaccagggccgggaactgggagccgggagccgggagccagctgcccgcggagctgcggcggcggcggcatctggggtggtctcagtcccacgaacaccgtggccggcgcccggtggctactgcgcccagcggggctcagggaagagcggtctagacactttttattttggaagaaaggggcaagccccggcgggagcttccttcccggcctggctcgctccccattgcgcccagctccggcccggactctggaagatgactccagggtctgctctgtatattccagcggcggcagttccgggaggcagccgaaagtactaacagttggtagcagcggctagtggaaaagtgagccaaggcggcgcggactcggctctccccgcgccccgcggcactcgctgctcctcgccgctccttccctttggctcccaggcggctgcagcatgaagtggcgcagcgatggccaggagaggtaagaagcccgtggtgagaacgctggaggatctgacgctggactcgggttatggtggcgcggcggactcggtgcgctcctccaacttgtctttgtgctgttccgactcgcacccggcgtccccgtatggcgggagctgctggccgcctctagctgactccatgcacagccggcacaacagctttgacactgtcaacactgccctggtggaagactccgaggggctggactgcgccggccagcactgctcgcggctgctgccggacctagacgaggtcccctggactctccaggagctggaggcgctgctgctgcgttcgcgggatccccgggcaggcccggcggtccccggcggcctgcccaaggacgcgctggccaagctgtcgacgctggtgagccgggcgctggtgcgcatagccaaagaggcgcagcgcctgagcctgcgcttcgccaagtgcaccaagtacgagatccagagcgccatggagatcgtgctgtcctggggcctggccgcgcactgtacggcggctgcgctggccgcactgtccctctacaacatgagcagcgccggcggcgaccgcctgggccgcggcaagtcggcccgctgcggcctcaccttctccgtgggccgcgtgtatcgctggatggtggacagccgcgtggcgctgcgcatccacgagcacgccgccatctacctgacagcctgcatggagagcctcttccgggacatctactcgcgggtcgtggcctccggggtgccccggagctgcagtggccctgggtcaggctcgggctccggcccaggcccgagctcgggccctggtgcggcccccgcggcggataaagagcgggaggcgcccgggggaggagcggcgagcggcggcgcctgcagcgcagccagcagcgccagcgggggcagcagctgttgcgccccgccggccgccgcggccgccgcagtcccgccggcagccgccgccaaccaccaccatcaccaccaccatgcgctccacgaggcgcccaagttcaccgtggagaccctggagcacacggtcaacaacgactcggagatctggggtctcctgcagccctaccagcacctgatctgcgggaagaacgccagcggggtgctgtgcctaccagacagcctgaatcttcacagagacccacagcggtcaaacaagccaggggaactgcccatgttcagccagtcggagctgaggaccatcgagcagtctttgctggccacgcgcgtaggcagcatcgccgaattgagtgacctggtgtcccgtgcaatgcatcacctgcagcccctcaatgccaagcaccacggcaatggcacccccctgcaccacaagcagggggcactgtactgggagcccgaggccctgtacaccctttgctatttcatgcactgcccacaaatggaatgggaaaaccccaacgtggagccttccaaagtcaacctccaggtggaaaggcccttcctcgtgctgccgccgctgatggagtggatccgggtggccgtggcgcacgccggccaccgccgcagcttctccatggacagcgacgacgtccgccaggcggcccggctgctgctgcccggcgtggactgcgagccgcgccagctcagggccgacgactgcttttgtgcatctcgaaagctggatgcggtggccatcgaagccaagtttaagcaggacctgggtttccggatgctgaactgtggacgaacagacctggtgaagcaggcagtgtctctgctggggcccgatgggatcaacaccatgagcgaacagggcatgactcccctgatgtatgcctgcgtccgtggggacgaggcgatggttcagatgctgctggatgccggagctgacctgaatgtggaggttgtcagtactcctcataaatatccatccgtccaccccgagacccgccattggacggctctgacttttgctgtgttgcatggacatattcctgtagttcagctcctcctggatgctggggccaaggtggaaggctcagtggagcatggcgaggagaactactcggaaacacccctccagctggcagctgctgtaggaaattttgagctggttagtttgctgttggagcgtggtgccgatcccctgataggaaccatgtacaggaatggaatttctacaaccccccagggtgatatgaactctttcagccaggctgcagcccacggacacaggaatgtgttccgcaaactgctcgcccagccagagaaggagaagagtgatatcctgtccctggaggagattctggccgaggggactgacctggcggagacagccccgccccccttgtgcgccagccgcaacagcaaggccaaactgagggccctgagggaggccatgtatcacagcgctgagcatggctacgtggatgtcacaattgatatcaggagcataggcgtcccgtggactctgcacacgtggctggagtctttgcggatcgccttccagcagcaccgcaggcctctcatccagtgcttgttaaaggagtttaagaccattcaggaggaggaatacacggaggagctcgttacccaaggcctgcccctgatgtttgagatcctgaaagcgagcaagaatgaagtgatcagccagcagctgtgcgtcatcttcacacactgctacgggccctaccccatccccaagctcacagaaatcaaacggaaacagacctcgcgcttggatcctcattttcttaacaataaagaaatgtctgatgttacatttctggtagaaggaagaccattttatgctcacaaagtgctgttatttacagcctctccaaggttcaaagcactcctctccagcaagccgacaaatgatggcacctgcatagagattggttatgtgaaatactccatctttcagctggttatgcagtatctctactatggtggcccagagtcactgctcattaaaaacaatgagatcatggagcttctgtctgctgctaagtttttccagctggaggctttgcagcgacactgtgagattatctgtgcgaaaagcatcaataccgacaactgtgtggatatttacaaccatgccaagtttcttggagtcacagagctctcagcatattgcgaaggctactttctcaaaaacatgatggtcctcattgaaaacgaagcattcaagcagctcctgtatgacaaaaatggtgaagggaccggccaggatgtgctccaggacttacagaggacgttggccatcagaattcagtccatccacttgtcgtcttccaaaggttccgtggtatgaaacgcctagtgcagggaatgcttcccgggaactttccagttctcctgccgcattggctttacacaaacacagacaaattccacctggcacctgtttttggctgggccaaggagctgcctctactgctcccacgtgttcctgttgaaaaacaaaggactttccactggtctgcagatcagatcagctgggtccagagtttaatgggcaactggacaaccaagttaaccccaattgaaagcacccctaggaccattgaacacccactgccggggaccactgtccagtgaatggattgaggccttttaaaggtcactcaggttccaggttgacagttggaggacttcaccgtaccaaccctgaagagattgtattacacattaaggaccttggtagctgtgcttcagcaaacgtcaaccatggtagcaaattggtgaggctgtgaccaataatgaggaaataatctggcaaatttttaggggtgggaacttttttaaatgttcatttaaaaaaaaacaaaaacagggcagtcttgtagtttaaaatatatttctaaaagcttaacagttcgttttcaactaaattgtgtttagggatctgtgtttgagatttttctttatttcttttttttttttaaatagtaagtcacaggtccacactgtgtaaacatgcatctgataagatactgctgatattctaaacaagttgaaataatcttgccttagtgatcatgattacacaaaagaggtgcactgccaataagtatctctaattcaatagttgaaagcaacctgcatgctaatcgtggtttcggggtgagaataaaacacccccacataacatgcatttgcatgggcccgaacctgtgaaatgttacgtttgtgcttcatttttgccaaggtaaaaatgttccatcatttctagctaaaactccatttggtgaaaccaacatatccatttcttttcctagttacggatgatttggggatgcttttgcagaaatgtgttcatagatgatgctgaatgggggaggggggcagcacgtcagagaatttactattaatcccagagttttctctgtattctcagaagatgttaatagtttgttactagccagagagtatgactatgttagattatttttaaagatgaaacatgtatgataggatggattctttctgtattctgagagtgtacagtacaggattattataatgaaagtttatatcaacagggtttcgttggctctgccatatattataagcaaaagagattggtaaagtgccacagtattccagataacttttcagttgcggcctttcttctcgttctttaatttgaaacctagatacatgcagtaaaaactaggagaatgacttttacccttggggacagccaagttttgttgataaacctatttcctagcatgccttcaggaagttgtgccagaccctagattgtgaaggacccactgttcttctgttgtacgagctccctgaaccattgttcagaggaccaatgtcacatcgcttcatgggcatggcccatggagcatctgggtgatatctgtctacagtattggctcttctgcgaggctgatacacaaggcctctcttccacatgatcatttgcaaacctcccccagcccctaccatccaatgtggaaggaaaacaagaactgcctgaagaagagtccaagctacagatacacagcgtgtgcattgcggctgtcaccttcctcctcccacttctgtatcctcagagatgctgcgtggatgtttccttaacctcagctgacttccctgtgaatgtctaatgctagttcagggcctccaggcattgatttgtacagtggtaactcccaatgaggcttctgttatcatttggtgtgctttctctgtcattaaaagaaatgattttcccaggc

SEQ ID NO: 27161 - DNA, 4614 bp, Artificial Sequence
  derived and/or modified sequence
atggccaggagaggtaagaagcccgtggtgagaacgctggaggatctgacgctggactcgggttatggtggcgcggcggactcggtgcgctcctccaacttgtctttgtgctgttccgactcgcacccggcgtccccgtatggcgggagctgctggccgcctctagctgactccatgcacagccggcacaacagctttgacactgtcaacactgccctggtggaagactccgaggggctggactgcgccggccagcactgctcgcggctgctgccggacctagacgaggtcccctggactctccaggagctggaggcgctgctgctgcgttcgcgggatccccgggcaggcccggcggtccccggcggcctgcccaaggacgcgctggccaagctgtcgacgctggtgagccgggcgctggtgcgcatagccaaagaggcgcagcgcctgagcctgcgcttcgccaagtgcaccaagtacgagatccagagcgccatggagatcgtgctgtcctggggcctggccgcgcactgtacggcggctgcgctggccgcactgtccctctacaacatgagcagcgccggcggcgaccgcctgggccgcggcaagtcggcccgctgcggcctcaccttctccgtgggccgcgtgtatcgctggatggtggacagccgcgtggcgctgcgcatccacgagcacgccgccatctacctgacagcctgcatggagagcctcttccgggacatctactcgcgggtcgtggcctccggggtgccccggagctgcagtggccctgggtcaggctcgggctccggcccaggcccgagctcgggccctggtgcggcccccgcggcggataaagagcgggaggcgcccgggggaggagcggcgagcggcggcgcctgcagcgcagccagcagcgccagcgggggcagcagctgttgcgccccgccggccgccgcggccgccgcagtcccgccggcagccgccgccaaccaccaccatcaccaccaccatgcgctccacgaggcgcccaagttcaccgtggagaccctggagcacacggtcaacaacgactcggagatctggggtctcctgcagccctaccagcacctgatctgcgggaagaacgccagcggggtgctgtgcctaccagacagcctgaatcttcacagagacccacagcggtcaaacaagccaggggaactgcccatgttcagccagtcggagctgaggaccatcgagcagtctttgctggccacgcgcgtaggcagcatcgccgaattgagtgacctggtgtcccgtgcaatgcatcacctgcagcccctcaatgccaagcaccacggcaatggcacccccctgcaccacaagcagggggcactgtactgggagcccgaggccctgtacaccctttgctatttcatgcactgcccacaaatggaatgggaaaaccccaacgtggagccttccaaagtcaacctccaggtggaaaggcccttcctcgtgctgccgccgctgatggagtggatccgggtggccgtggcgcacgccggccaccgccgcagcttctccatggacagcgacgacgtccgccaggcggcccggctgctgctgcccggcgtggactgcgagccgcgccagctcagggccgacgactgcttttgtgcatctcgaaagctggatgcggtggccatcgaagccaagtttaagcaggacctgggtttccggatgctgaactgtggacgaacagacctggtgaagcaggcagtgtctctgctggggcccgatgggatcaacaccatgagcgaacagggcatgactcccctgatgtatgcctgcgtccgtggggacgaggcgatggttcagatgctgctggatgccggagctgacctgaatgtggaggttgtcagtactcctcataaatatccatccgtccaccccgagacccgccattggacggctctgacttttgctgtgttgcatggacatattcctgtagttcagctcctcctggatgctggggccaaggtggaaggctcagtggagcatggcgaggagaactactcggaaacacccctccagctggcagctgctgtaggaaattttgagctggttagtttgctgttggagcgtggtgccgatcccctgataggaaccatgtacaggaatggaatttctacaaccccccagggtgatatgaactctttcagccaggctgcagcccacggacacaggaatgtgttccgcaaactgctcgcccagccagagaaggagaagagtgatatcctgtccctggaggagattctggccgaggggactgacctggcggagacagccccgccccccttgtgcgccagccgcaacagcaaggccaaactgagggccctgagggaggccatgtatcacagcgctgagcatggctacgtggatgtcacaattgatatcaggagcataggcgtcccgtggactctgcacacgtggctggagtctttgcggatcgccttccagcagcaccgcaggcctctcatccagtgcttgttaaaggagtttaagaccattcaggaggaggaatacacggaggagctcgttacccaaggcctgcccctgatgtttgagatcctgaaagcgagcaagaatgaagtgatcagccagcagctgtgcgtcatcttcacacactgctacgggccctaccccatccccaagctcacagaaatcaaacggaaacagacctcgcgcttggatcctcattttcttaacaataaagaaatgtctgatgttacatttctggtagaaggaagaccattttatgctcacaaagtgctgttatttacagcctctccaaggttcaaagcactcctctccagcaagccgacaaatgatggcacctgcatagagattggttatgtgaaatactccatctttcagctggttatgcagtatctctactatggtggcccagagtcactgctcattaaaaacaatgagatcatggaggtaagggatccattgtggtgttggctatcataggtcccttgggtgagtggcacttctgtaaactcgggtcaccagcctgcatggaagtgtctggaaggacccgtgttgggttttcatttggatgaagacttggggctcttgttccttcctgactcctcagtcctcccaaacaggaagggcttctcatcagagaccttccctggcaggctggggtgctagtgcacttgcttgcctgactgcttttagtagccactgagtgaaacccaattttaactggcattggtggtaagggggcagggaagggaaggaatttgactgaaaagtctgaggctacagctgaggcgttaatagtgatatcatcaggaaatatcctagatgacgtcttctcccttgtcactaataaaagaattatatcccctaaaaacatccctcaaatcacaacactgtctgttcttccaagatatagaagctgagggcagattacagtctcctcctggctttcctcaaactgagcatcccacagtcatgaagcccacgcctgcttccttcactctccccagccccctgtctgcctcttgtaattcaactggttctagccccgcctgtctaggagtcttgtttctgcctgcttttgtccaaagccaagattttcccctgttccttgccaaaagtggaaatcttgttcattttcctaattgaaactgggagctttgaaccagaagccaaaaatcacccccaattaatcctcagcaaaagagccaggatctcggtcagttatctgacgtctggggggtacctggctgatgagagatgtcaggacacaatcaactgttcaagagcagacctcacacagtggttacaacacggaagctgggccagactagtctaaatccaggctccactgcttctgagctgtgtgactgtggacaagttatttaacctcatatcctcagcttccttacccataaaatggggataactatctacctcactgggttttttagaggatcttaaaatatgctaaggtgcttagaacagtgcctggcacacagtgatcgccaataggactatgtattcactgcaggcccacttatcctttcttcctattctgtgaaaccttccgtggtcactctctccccacccaaacacacacatggacacacagtgactctcttgtctccctggactactcctctgatggttttagtctcgaggatgtgggcttatttgtaaacaaaagtgcgctggtgtttacaactaatttttgtgtgtgtgtgaaacagtctcactctgcccccaggctggagtgcagtggtgcaatttcggctcactgcaacctctgcctcctgggttcacaccattctcctgcctcggcctcccgagtagctaggattacaggcacctgccaccacacccagctaatttgttgtatttttagtagagacggggtttcaccatgttggccagatggtctcgaactcctgacctcagcctcccaaagtgttgggattacaggcatgagccactgcacacggctgtttacaactaactgatcacaaccagttatggatttctgtattccttctccactcccactgcttcatttgtctagccttaacaaaa

SEQ ID NO: 27162 - protein, 441 aa, Artificial Sequence
  derived and/or modified sequence
MAALYRPGLRLNWHGLSPLGWPSCRSIQTLRVLSGDLGQLPTGIRDFVEHSARLCQPEGIHICDGTEAENTATLTLLEQQGLIRKLPKYNNCWLARTDPKDVARVESKTVIVTPSQRDTVQLPPGGARGQLGNWMSPADFQRAVDERFPGCMQGRTMYVLPFSMGPVGSPLSRIGVQLTDSAYVVASMRIMTRLGTPVLQALGDGDFVKCLHSVGQPLTGQGEPVSQWPCNPEKTLIGHVPDQREIISFGSGYGGNSLLGKKCFALRIASRLARDEGWLAEHMLILGITSPAGKKRYVAAAFPSACGKTNLAMMRPALPGWKVECVGDDIAWMRFDSEGRLRAINPENGFFGVAPGTSATTNPNAMATIQSNTIFTNVAETSDGGVYWEGIDQPLPPGVTVTSWLGKPWKPGMCGGEGVAQPPGLSTLMVEKLSPQPPTIF

SEQ ID NO: 27163 - DNA, 1326 bp, Artificial Sequence
  derived and/or modified sequence
atggccgctctatatcgccctggcctgagactcaactggcacggcctgtcaccactgggctggccaagttgccggtcgattcagacccttagggtactttccggagacttaggccagctgccgacagggattcgggatttcgttgagcatagcgcaagattgtgtcagcccgaggggattcacatctgtgatggaaccgaggcagagaatacagccacactaacactgctggaacagcagggcctcatccgcaaacttcctaaatataataattgttggctggctagaacagatcctaaggatgtggccagagtggaaagcaaaactgtgatcgtaactccgtcacaacgggacaccgtgcagctcccgcctggaggggcaaggggacaactggggaattggatgtcccccgccgattttcagcgggccgtggacgaacggttccccgggtgcatgcaagggcggacaatgtacgtgttgccttttagtatggggcctgtcggttctcctctgtcccgtatcggggtccagctgacagactccgcctacgtcgtggcatccatgcgcattatgacacggctggggacgcccgtcctccaggcactgggagacggcgactttgtcaaatgcctccacagcgtgggccagcctctgactggccaaggagagcccgtgtcccaatggccttgtaatccggagaagactctgatcggtcacgtgcccgaccaacgcgagatcataagcttcgggtctgggtatggcggaaactctcttctcggaaagaagtgtttcgcacttagaatcgcttcgcgccttgcccgggacgagggatggctggccgaacacatgctgattcttggcattaccagtcccgctggaaagaaaaggtatgtcgcagctgcatttccctcagcctgtggtaagaccaacctcgctatgatgagaccagctctgcctggatggaaggtggaatgcgtgggggatgacatagcatggatgcggtttgactcagaggggcgattgcgggcaattaatccagaaaatggctttttcggcgttgccccaggcaccagcgctacaacaaaccccaacgccatggctacaatccaaagcaacaccatctttaccaacgtggctgaaacatcagatggtggagtgtactgggagggcatcgaccagcctctacctcctggtgtaacggttacatcgtggttgggcaagccatggaaaccgggcatgtgcggcggtgaaggagtggcccagcccccaggtctgtccacgttgatggtggagaagctttcaccacagcccccgaccattttctag

SEQ ID NO: 27164 - DNA, 1326 bp, Artificial Sequence
  derived and/or modified sequence
atggccgccctgtacagacctggcctgcggctgaactggcacggcctgagccccctgggctggcccagctgccgcagcatccagaccctgcgggtgctgagcggggacctgggccagctgcccaccggcatccgggactttgtggagcacagcgcccggctgtgccagcctgagggcatccacatctgtgatggaacagaagcagaaaatacagccaccctgaccctgctggagcagcagggcctcatcaggaagctgcccaagtacaacaactgctggctggccaggacagaccccaaggatgtggcccgggtggagagcaagacagtgattgtgacccccagccagagggacacagtgcagctgcccccaggaggagcccggggccagctgggcaactggatgagccctgctgacttccagagagctgtggatgagcgcttccctggctgcatgcagggccgcaccatgtatgtgctgcccttctccatgggccctgtgggcagccccctgagccgcatcggcgtgcagctgacagattctgcctacgtggtggcctccatgaggatcatgacccggctgggcacccctgtgctgcaggccctgggagatggagactttgtgaagtgcctgcacagcgtgggccagcccctgaccggccagggcgagcctgtgtcccagtggccctgcaaccctgagaagaccctgattggacatgtgcctgaccagcgggagatcatcagctttggaagtggctatggaggcaacagcctgctgggcaagaagtgctttgccctgcgcatcgccagccggctggccagagatgagggctggctggccgagcacatgctgatcctgggcatcaccagccctgctgggaagaagagatatgtggccgccgccttccccagcgcctgtgggaagaccaacctggccatgatgaggcctgccctgcccggctggaaggtggagtgtgtgggagatgacatcgcctggatgagatttgattctgagggccgcctgcgggccatcaacccagaaaatggcttctttggagtggcccctggcaccagcgccaccaccaaccccaatgccatggccaccatccagagcaacaccatcttcaccaacgtggccgagaccagtgatggaggagtgtactgggagggcatcgaccagcccctgcccccaggagtgacagtgacctcctggctgggcaagccctggaagccaggcatgtgtggcggggagggcgtggcccagcccccaggcctgagcaccctgatggtggagaagctgagcccccagccccccaccatcttctag

SEQ ID NO: 27165 - DNA, 1326 bp, Artificial Sequence
  derived and/or modified sequence
atggccgccctgtaccggcccggcctgcggctgaactggcacggcctaagccctttgggctggccaagctgtcggagcatccagacacttcgcgtactgtctggcgacttgggacagctcccaacaggcatcagggatttcgtcgaacatagcgcccgtctctgtcagcctgaaggaattcacatatgcgatgggacagaagcggaaaataccgctactctgaccctgctggagcagcaaggacttatccggaagctgcccaagtataataactgctggctcgccaggactgaccctaaggatgtagcccgcgtggagagcaagacggtgattgtgacgccatctcagcgggataccgtccagttaccaccgggaggcgcacgggggcagctcggcaactggatgagccctgccgacttccagcgtgctgttgatgagcgcttccctggctgcatgcaagggagaaccatgtacgtgcttcctttttctatgggcccagtcggctccccactgagcagaatcggagtccagctgacagattcggcatacgttgtggctagtatgaggatcatgacacgactgggaacacccgtgctgcaggcattgggcgacggggattttgtcaaatgcctgcattccgtgggccagccactgactggacaaggcgaaccagtgtcccagtggccttgcaatcccgaaaaaacgctgattggtcatgtgcctgatcaaagagagatcatatcatttggatccgggtacggcggaaactcgctgctcggcaaaaaatgttttgccttgcggatcgccagtcggctagcacgagacgaaggctggttggccgaacacatgctgatattgggaatcacgagtccagctggcaagaagcgctatgtggcagcagcctttccctccgcatgtggtaagactaacctcgcaatgatgagacccgcacttccgggctggaaggtggaatgtgtaggtgatgacatcgcctggatgaggttcgactccgagggccggctgagggcgattaatccggagaacggattcttcggtgtggcgcccggcacaagtgccacaaccaatcctaacgccatggccacaatacagtcaaacacaattttcaccaatgtggccgagaccagcgatggcggagtgtactgggaggggatagaccagccattgccgccaggagtgaccgtgacttcatggcttggtaaaccttggaagcctggcatgtgtgggggagaaggggtggcacagccaccaggactgagcacccttatggttgagaagttgtccccccagccacctaccatcttttag

SEQ ID NO: 27166 - DNA, 1830 bp, Artificial Sequence
  derived and/or modified sequence
ggggcggcggctgggctgacctggagcctggagccccggggccgagggagctggcctgccagcggggcggaggaaagctagtgccagccctaccaggttccgcccccgcgcctgcccccctcctttttaagcgcctcccgccagcctctgctgtggctcgcttcgccgcgctccctccttccccgccttccatacctccccggctccgctcggttcctggccaccccgcagcccctgcccaggtgccatggccgcattgtaccgccctggcctgcggcttaactggcatgggctgagccccttgggctggccatcatgccgtagcatccagaccctgcgagtgcttagtggagatctgggccagcttcccactggcattcgagattttgtagagcacagtgcccgcctgtgccaaccagagggcatccacatctgtgatggaactgaggctgagaatactgccacactgaccctgctggagcagcagggcctcatccgaaagctccccaagtacaataactgctggctggcccgcacagaccccaaggatgtggcacgagtagagagcaagacggtgattgtaactccttctcagcgggacacggtacaactcccgcctggtggggcccgtgggcagctgggcaactggatgtccccagctgatttccagcgagctgtggatgagaggtttccaggctgcatgcagggccgcaccatgtatgtgcttccattcagcatgggtcctgtgggctccccgctgtcccgcatcggggtgcagctcactgactcagcctatgtggtggcaagcatgcgtattatgacccgactggggacacctgtgcttcaggccctgggagatggtgactttgtcaagtgtctgcactccgtgggccagcccctgacaggacaaggggagccagtgagccagtggccgtgcaacccagagaaaaccctgattggccacgtgcccgaccagcgggagatcatctccttcggcagcggctatggtggcaactccctgctgggcaagaagtgctttgccctacgcatcgcctctcggctggcccgggatgagggctggctggcagagcacatgctgatcctgggcatcaccagccctgcagggaagaagcgctatgtggcagccgccttccctagtgcctgtggcaagaccaacctggctatgatgcggcctgcactgccaggctggaaagtggagtgtgtgggggatgatattgcttggatgaggtttgacagtgaaggtcgactccgggccatcaaccctgagaacggcttctttggggttgcccctggtacctctgccaccaccaatcccaacgccatggctacaatccagagtaacactatttttaccaatgtggctgagaccagtgatggtggcgtgtactgggagggcattgaccagcctcttccacctggtgttactgtgacctcctggctgggcaaaccctggaaacctggtatgtgcggtggggaaggtgtggcacagcctccaggcctcagcaccttaatggtggaaaagctttctccacaacctccaaccatcttctaggactgccaggaggcacagaagtcatgaacgtttgcagtttccagtcccaggcaaaatctcagttcatgtcccaactccaccagtcactggttttgtgatctggctaagttgctcaacttccctaagctttagtttccacatcagttgaatgagggtagttgtgatagtacctatctcatgagattgttggaggattaaatagtgcataaaaagggtttatcacactgacaaatacacagtaaattctcaataataaa

SEQ ID NO: 27167 - DNA, 1326 bp, Artificial Sequence
  derived and/or modified sequence
atggccgctctctatcgccctggactgcgccttaactggcacggcctgtccccgctaggatggccatcttgccggtcaatacagacattgcgagtgttaagcggagatctggggcagctccctactggaatccgggatttcgtggaacacagcgcgagactgtgccaacccgaggggattcatatttgcgatggcacggaagcagaaaacaccgccacattgaccctgctggagcagcaggggctcatcagaaaattgcctaaatacaataactgctggctggcacgcacagatcccaaggacgtggcacgagtcgaatccaaaacagtcattgtcacgccatctcagcgcgacactgtgcagcttccccctggcggagcgcgtgggcagttggggaactggatgagtccagccgattttcagagggctgtggacgagcggttccctggttgcatgcagggcagaaccatgtacgtcctcccatttagcatggggccagtcggaagcccactttctcgaataggcgtacagttgacagacagtgcctacgtggtcgccagcatgcggatcatgaccagactggggactccggtgctccaggccctgggggatggcgacttcgtgaagtgtttgcacagtgttggtcagccactgaccggccagggggagcctgtgtctcagtggccatgtaaccctgagaagacactaatcggacacgtgccagaccagcgcgagattatcagctttgggtcggggtacggagggaacagcctgctggggaaaaagtgtttcgccctgcggatcgcttctcggttagccagggacgaaggatggctggccgagcacatgctgatcctgggtatcacaagcccagctgggaagaagcgatacgtggcggctgctttcccgagtgcctgcggaaaaaccaacctggctatgatgcggccagccttaccaggatggaaggtcgaatgtgtgggcgacgacattgcgtggatgaggttcgactccgagggcagactgcgtgccattaatccagaaaacggattcttcggagtggccccaggcacttctgcgaccaccaaccctaatgctatggctacaatccaaagcaacacgatcttcaccaatgtagctgagaccagcgatgggggagtttattgggaaggcatcgaccagcccctccctcccggagtgacggtgacatcttggctgggaaagccctggaaacccggtatgtgcggaggagaaggagtggcgcagcctcccggactctctacccttatggtggagaagttatctccacaaccccctaccattttttag

SEQ ID NO: 27168 - DNA, 1326 bp, Artificial Sequence
  derived and/or modified sequence
atggccgccctgtacagacccggcctgagactgaactggcacggcctgagccccctgggctggcccagctgcagaagcatccagaccctgagagtgctgagcggcgacctgggccagctgcccaccggcatcagagacttcgtggagcacagcgccagactgtgccagcccgagggcatccacatctgcgacggcaccgaggccgagaacaccgccaccctgaccctgctggagcagcagggcctgatcagaaagctgcccaagtacaacaactgctggctggccagaaccgaccccaaggacgtggccagagtggagagcaagaccgtgatcgtgacccccagccagagagacaccgtgcagctgccccccggcggcgccagaggccagctgggcaactggatgagccccgccgacttccagagagccgtggacgagagattccccggctgcatgcagggcagaaccatgtacgtgctgcccttcagcatgggccccgtgggcagccccctgagcagaatcggcgtgcagctgaccgacagcgcctacgtggtggccagcatgagaatcatgaccagactgggcacccccgtgctgcaggccctgggcgacggcgacttcgtgaagtgcctgcacagcgtgggccagcccctgaccggccagggcgagcccgtgagccagtggccctgcaaccccgagaagaccctgatcggccacgtgcccgaccagagagagatcatcagcttcggcagcggctacggcggcaacagcctgctgggcaagaagtgcttcgccctgagaatcgccagcagactggccagagacgagggctggctggccgagcacatgctgatcctgggcatcaccagccccgccggcaagaagagatacgtggccgccgccttccccagcgcctgcggcaagaccaacctggccatgatgagacccgccctgcccggctggaaggtggagtgcgtgggcgacgacatcgcctggatgagattcgacagcgagggcagactgagagccatcaaccccgagaacggcttcttcggcgtggcccccggcaccagcgccaccaccaaccccaacgccatggccaccatccagagcaacaccatcttcaccaacgtggccgagaccagcgacggcggcgtgtactgggagggcatcgaccagcccctgccccccggcgtgaccgtgaccagctggctgggcaagccctggaagcccggcatgtgcggcggcgagggcgtggcccagccccccggcctgagcaccctgatggtggagaagctgagcccccagccccccaccatcttctag

SEQ ID NO: 27169 - protein, 777 aa, Artificial Sequence
  derived and/or modified sequence
MDSKESLTPGREENPSSVLAQERGDVMDFYKTLRGGATVKVSASSPSLAVASQSDSKQRRLLVDFPKGSVSNAQQPDLSKAVSLSMGLYMGETETKVMGNDLGFPQQGQISLSSGETDLKLLEESIANLNRSTSVPENPKSSASTAVSAAPTEKEFPKTHSDVSSEQQHLKGQTGTNGGNVKLYTTDQSTFDILQDLEFSSGSPGKETNESPWRSDLLIDENCLLSPLAGEDDSFLLEGNSNEDCKPLILPDTKPKIKDNGDLVLSSPSNVTLPQVKTEKEDFIELCTPGVIKQEKLGTVYCQASFPGANIIGNKMSAISVHGVSTSGGQMYHYDMNTASLSQQQDQKPIFNVIPPIPVGSENWNRCQGSGDDNLTSLGTLNFPGRTVFSNGYSSPSMRPDVSSPPSSSSTATTGPPPKLCLVCSDEASGCHYGVLTCGSCKVFFKRAVEGQHNYLCAGRNDCIIDKIRRKNCPACRYRKCLQAGMNLEARKTKKKIKGIQQATTGVSQETSENPGNKTIVPATLPQLTPTLVSLLEVIEPEVLYAGYDSSVPDSTWRIMTTLNMLGGRQVIAAVKWAKAIPGFRNLHLDDQMTLLQYSWMFLMAFALGWRSYRQSSANLLCFAPDLIINEQRMTLPCMYDQCKHMLYVSSELHRLQVSYEEYLCMKTLLLLSSVPKDGLKSQELFDEIRMTYIKELGKAIVKREGNSSQNWQRFYQLTKLLDSMHEVVENLLNYCFQTFLDKTMSIEFPEMLAEIITNQIPKYSNGNIKKLLFHQK

SEQ ID NO: 27170 - protein, 593 aa, Artificial Sequence
  derived and/or modified sequence
MDSKESLTPGREENPSSVLAQERGDVMDFYKTLRGGATVKVSASSPSLAVASQSDSKQRRLLVDFPKGSVSNAQQPDLSKAVSLSMGLYMGETETKVMGNDLGFPQQGQISLSSGETDLKLLEESIANLNRSTSVPENPKSSASTAVSAAPTEKEFPKTHSDVSSEQQHLKGQTGTNGGNVKLYTTDQSTFDILQDLEFSSGSPGKETNESPWRSDLLIDENCLLSPLAGEDDSFLLEGNSNEDCKPLILPDTKPKIKDNGDLVLSSPSNVTLPQVKTEKEDFIELCTPGVIKQEKLGTVYCQASFPGANIIGNKMSAISVHGVSTSGGQMYHYDMNTASLSQQQDQKPIFNVIPPIPVGSENWNRCQGSGDDNLTSLGTLNFPGRTVFSNGYSSPSMRPDVSSPPSSSSTATTGPPPKLCLVCSDEASGCHYGVLTCGSCKVFFKRAVEGQHNYLCAGRNDCIIDKIRRKNCPACRYRKCLQAGMNLEVVPKDGLKSQELFDEIRMTYIKELGKAIVKREGNSSQNWQRFYQLTKLLDSMHEVVENLLNYCFQTFLDKTMSIEFPEMLAEIITNQIPKYSNGNIKKLLFHQK

SEQ ID NO: 27171 - protein, 380 aa, Artificial Sequence
  derived and/or modified sequence
MRPDVSSPPSSSSTATTGPPPKLCLVCSDEASGCHYGVLTCGSCKVFFKRAVEGQHNYLCAGRNDCIIDKIRRKNCPACRYRKCLQAGMNLEARKTKKKIKGIQQATTGVSQETSENPGNKTIVPATLPQLTPTLVSLLEVIEPEVLYAGYDSSVPDSTWRIMTTLNMLGGRQVIAAVKWAKAIPGFRNLHLDDQMTLLQYSWMFLMAFALGWRSYRQSSANLLCFAPDLIINEQRMTLPCMYDQCKHMLYVSSELHRLQVSYEEYLCMKTLLLLSSVPKDGLKSQELFDEIRMTYIKELGKAIVKREGNSSQNWQRFYQLTKLLDSMHEVVENLLNYCFQTFLDKTMSIEFPEMLAEIITNQIPKYSNGNIKKLLFHQK

SEQ ID NO: 27172 - protein, 751 aa, Artificial Sequence
  derived and/or modified sequence
MDSKESLTPGREENPSSVLAQERGDVMDFYKTLRGGATVKVSASSPSLAVASQSDSKQRRLLVDFPKGSVSNAQQPDLSKAVSLSMGLYMGETETKVMGNDLGFPQQGQISLSSGETDLKLLEESIANLNRSTSVPENPKSSASTAVSAAPTEKEFPKTHSDVSSEQQHLKGQTGTNGGNVKLYTTDQSTFDILQDLEFSSGSPGKETNESPWRSDLLIDENCLLSPLAGEDDSFLLEGNSNEDCKPLILPDTKPKIKDNGDLVLSSPSNVTLPQVKTEKEDFIELCTPGVIKQEKLGTVYCQASFPGANIIASLSQQQDQKPIFNVIPPIPVGSENWNRCQGSGDDNLTSLGTLNFPGRTVFSNGYSSPSMRPDVSSPPSSSSTATTGPPPKLCLVCSDEASGCHYGVLTCGSCKVFFKRAVEGQHNYLCAGRNDCIIDKIRRKNCPACRYRKCLQAGMNLEARKTKKKIKGIQQATTGVSQETSENPGNKTIVPATLPQLTPTLVSLLEVIEPEVLYAGYDSSVPDSTWRIMTTLNMLGGRQVIAAVKWAKAIPGFRNLHLDDQMTLLQYSWMFLMAFALGWRSYRQSSANLLCFAPDLIINEQRMTLPCMYDQCKHMLYVSSELHRLQVSYEEYLCMKTLLLLSSVPKDGLKSQELFDEIRMTYIKELGKAIVKREGNSSQNWQRFYQLTKLLDSMHEVVENLLNYCFQTFLDKTMSIEFPEMLAEIITNQIPKYSNGNIKKLLFHQK

SEQ ID NO: 27173 - DNA, 6784 bp, Artificial Sequence
  derived and/or modified sequence
ggcgccgcctccacccgctccccgctcggtcccgctcgctcgcccaggccgggctgccctttcgcgtgtccgcgctctcttccctccgccgccgcctcctccattttgcgagctcgtgtctgtgacgggagcccgagtcaccgcctgcccgtcggggacggattctgtgggtggaaggagacgccgcagccggagcggccgaagcagctgggaccgggacggggcacgcgcgcccggaacctcgacccgcggagcccggcgcggggcggagggctggcttgtcagctgggcaatgggagactttcttaaataggggctctccccccacccatggagaaaggggcggctgtttacttcctttttttagaaaaaaaaaatatatttccctcctgctccttctgcgttcacaagctaagttgtttatctcggctgcggcgggaactgcggacggtggcgggcgagcggctcctctgccagagttgatattcactgatggactccaaagaatcattaactcctggtagagaagaaaaccccagcagtgtgcttgctcaggagaggggagatgtgatggacttctataaaaccctaagaggaggagctactgtgaaggtttctgcgtcttcaccctcactggctgtcgcttctcaatcagactccaagcagcgaagacttttggttgattttccaaaaggctcagtaagcaatgcgcagcagccagatctgtccaaagcagtttcactctcaatgggactgtatatgggagagacagaaacaaaagtgatgggaaatgacctgggattcccacagcagggccaaatcagcctttcctcgggggaaacagacttaaagcttttggaagaaagcattgcaaacctcaataggtcgaccagtgttccagagaaccccaagagttcagcatccactgctgtgtctgctgcccccacagagaaggagtttccaaaaactcactctgatgtatcttcagaacagcaacatttgaagggccagactggcaccaacggtggcaatgtgaaattgtataccacagaccaaagcacctttgacattttgcaggatttggagttttcttctgggtccccaggtaaagagacgaatgagagtccttggagatcagacctgttgatagatgaaaactgtttgctttctcctctggcgggagaagacgattcattccttttggaaggaaactcgaatgaggactgcaagcctctcattttaccggacactaaacccaaaattaaggataatggagatctggttttgtcaagccccagtaatgtaacactgccccaagtgaaaacagaaaaagaagatttcatcgaactctgcacccctggggtaattaagcaagagaaactgggcacagtttactgtcaggcaagctttcctggagcaaatataattggtaataaaatgtctgccatttctgttcatggtgtgagtacctctggaggacagatgtaccactatgacatgaatacagcatccctttctcaacagcaggatcagaagcctatttttaatgtcattccaccaattcccgttggttccgaaaattggaataggtgccaaggatctggagatgacaacttgacttctctggggactctgaacttccctggtcgaacagttttttctaatggctattcaagccccagcatgagaccagatgtaagctctcctccatccagctcctcaacagcaacaacaggaccacctcccaaactctgcctggtgtgctctgatgaagcttcaggatgtcattatggagtcttaacttgtggaagctgtaaagttttcttcaaaagagcagtggaaggacagcacaattacctatgtgctggaaggaatgattgcatcatcgataaaattcgaagaaaaaactgcccagcatgccgctatcgaaaatgtcttcaggctggaatgaacctggaagctcgaaaaacaaagaaaaaaataaaaggaattcagcaggccactacaggagtctcacaagaaacctctgaaaatcctggtaacaaaacaatagttcctgcaacgttaccacaactcacccctaccctggtgtcactgttggaggttattgaacctgaagtgttatatgcaggatatgatagctctgttccagactcaacttggaggatcatgactacgctcaacatgttaggagggcggcaagtgattgcagcagtgaaatgggcaaaggcaataccaggtttcaggaacttacacctggatgaccaaatgaccctactgcagtactcctggatgtttcttatggcatttgctctggggtggagatcatatagacaatcaagtgcaaacctgctgtgttttgctcctgatctgattattaatgagcagagaatgactctaccctgcatgtacgaccaatgtaaacacatgctgtatgtttcctctgagttacacaggcttcaggtatcttatgaagagtatctctgtatgaaaaccttactgcttctctcttcagttcctaaggacggtctgaagagccaagagctatttgatgaaattagaatgacctacatcaaagagctaggaaaagccattgtcaagagggaaggaaactccagccagaactggcagcggttttatcaactgacaaaactcttggattctatgcatgaagtggttgaaaatctccttaactattgcttccaaacatttttggataagaccatgagtattgaattccccgagatgttagctgaaatcatcaccaatcagataccaaaatattcaaatggaaatatcaaaaaacttctgtttcatcaaaagtgactgccttaataagaatggttgccttaaagaaagtcgaattaatagcttttattgtataaactatcagtttgtcctgtagaggttttgttgttttattttttattgttttcatctgttgttttgttttaaatacgcactacatgtggtttatagagggccaagacttggcaacagaagcagttgagtcgtcatcacttttcagtgatgggagagtagatggtgaaatttattagttaatatatcccagaaattagaaaccttaatatgtggacgtaatctccacagtcaaagaaggatggcacctaaaccaccagtgcccaaagtctgtgtgatgaactttctcttcatactttttttcacagttggctggatgaaattttctagactttctgttggtgtatcccccccctgtatagttaggatagcatttttgatttatgcatggaaacctgaaaaaaagtttacaagtgtatatcagaaaagggaagttgtgccttttatagctattactgtctggttttaacaatttcctttatatttagtgaactacgcttgctcattttttcttacataattttttattcaagttattgtacagctgtttaagatgggcagctagttcgtagctttcccaaataaactctaaacattaatcaatcatctgtgtgaaaatgggttggtgcttctaacctgatggcacttagctatcagaagaccacaaaaattgactcaaatctccagtattcttgtcaaaaaaaaaaaaaaaaaagctcatattttgtatatatctgcttcagtggagaattatataggttgtgcaaattaacagtcctaactggtatagagcacctagtccagtgacctgctgggtaaactgtggatgatggttgcaaaagactaatttaaaaaataactaccaagaggccctgtctgtacctaacgccctatttttgcaatggctatatggcaagaaagctggtaaactatttgtctttcaggaccttttgaagtagtttgtataacttcttaaaagttgtgattccagataaccagctgtaacacagctgagagacttttaatcagacaaagtaattcctctcactaaactttacccaaaaactaaatctctaatatggcaaaaatggctagacacccattttcacattcccatctgtcaccaattggttaatctttcctgatggtacaggaaagctcagctactgatttttgtgatttagaactgtatgtcagacatccatgtttgtaaaactacacatccctaatgtgtgccatagagtttaacacaagtcctgtgaatttcttcactgttgaaaattattttaaacaaaatagaagctgtagtagccctttctgtgtgcaccttaccaactttctgtaaactcaaaacttaacatatttactaagccacaagaaatttgatttctattcaaggtggccaaattatttgtgtaatagaaaactgaaaatctaatattaaaaatatggaacttctaatatatttttatatttagttatagtttcagatatatatcatattggtattcactaatctgggaagggaagggctactgcagctttacatgcaatttattaaaatgattgtaaaatagcttgtatagtgtaaaataagaatgatttttagatgagattgttttatcatgacatgttatatattttttgtaggggtcaaagaaatgctgatggataacctatatgatttatagtttgtacatgcattcatacaggcagcgatggtctcagaaaccaaacagtttgctctaggggaagagggagatggagactggtcctgtgtgcagtgaaggttgctgaggctctgacccagtgagattacagaggaagttatcctctgcctcccattctgaccacccttctcattccaacagtgagtctgtcagcgcaggtttagtttactcaatctccccttgcactaaagtatgtaaagtatgtaaacaggagacaggaaggtggtgcttacatccttaaaggcaccatctaatagcgggttactttcacatacagccctcccccagcagttgaatgacaacagaagcttcagaagtttggcaatagtttgcatagaggtaccagcaatatgtaaatagtgcagaatctcataggttgccaataatacactaattcctttctatcctacaacaagagtttatttccaaataaaatgaggacatgtttttgttttctttgaatgctttttgaatgttatttgttattttcagtattttggagaaattatttaataaaaaaacaatcatttgctttttgaatgctctctaaaagggaatgtaatattttaagatggtgtgtaacccggctggataaatttttggtgcctaagaaaactgcttgaatattcttatcaatgacagtgttaagtttcaaaaagagcttctaaaacgtagattatcattcctttatagaatgttatgtggttaaaaccagaaagcacatctcacacattaatctgattttcatcccaacaatcttggcgctcaaaaaatagaactcaatgagaaaaagaagattatgtgcacttcgttgtcaataataagtcaactgatgctcatcgacaactataggaggcttttcattaaatgggaaaagaagctgtgcccttttaggatacgtgggggaaaagaaagtcatcttaattatgtttaattgtggatttaagtgctatatggtggtgctgtttgaaagcagatttatttcctatgtatgtgttatctggccatcccaacccaaactgttgaagtttgtagtaacttcagtgagagttggttactcacaacaaatcctgaaaagtatttttagtgtttgtaggtattctgtgggatactatacaagcagaactgaggcacttaggacataacacttttggggtatatatatccaaatgcctaaaactatgggaggaaaccttggccaccccaaaaggaaaactaacatgatttgtgtctatgaagtgctggataattagcatgggatgagctctgggcatgccatgaaggaaagccacgctcccttcagaattcagaggcagggagcaattccagtttcacctaagtctcataattttagttcccttttaaaaaccctgaaaactacatcaccatggaatgaaaaatattgttatacaatacattgatctgtcaaacttccagaaccatggtagccttcagtgagatttccatcttggctggtcactccctgactgtagctgtaggtgaatgtgtttttgtgtgtgtgtgtctggttttagtgtcagaagggaaataaaagtgtaaggaggacactttaaaccctttgggtggagtttcgtaatttcccagactattttcaagcaacctggtccacccaggattagtgaccaggttttcaggaaaggatttgcttctctctagaaaatgtctgaaaggattttattttctgatgaaaggctgtatgaaaataccctcctcaaataacttgcttaactacatatagattcaagtgtgtcaatattctattttgtatattaaatgctatataatggggacaaatctatattatactgtgtatggcattattaagaagctttttcattattttttatcacagtaattttaaaatgtgtaaaaattaaaaccagtgactcctgtttaaaaataaaagttgtagttttttattcatgctgaataataatctgtagttaaaaaaaaagtgtctttttacctacgcagtgaaatgtcagactgtaaaaccttgtgtggaaatgtttaacttttattttttcatttaaatttgctgttctggtattaccaaaccacacatttgtaccgaattggcagtaaatgttagccatttacagcaatgccaaatatggagaaacatcataataaaaaaatctgctttttcatta

SEQ ID NO: 27174 - DNA, 2334 bp, Artificial Sequence
  derived and/or modified sequence
atggacagcaaggagagcctgacccccggcagagaggagaaccccagcagcgtgctggcccaggagagaggcgacgtgatggacttctacaagaccctgagaggcggcgccaccgtgaaggtgagcgccagcagccccagcctggccgtggccagccagagcgacagcaagcagagaagactgctggtggacttccccaagggcagcgtgagcaacgcccagcagcccgacctgagcaaggccgtgagcctgagcatgggcctgtacatgggcgagaccgagaccaaggtgatgggcaacgacctgggcttcccccagcagggccagatcagcctgagcagcggcgagaccgacctgaagctgctggaggagagcatcgccaacctgaacagaagcaccagcgtgcccgagaaccccaagagcagcgccagcaccgccgtgagcgccgcccccaccgagaaggagttccccaagacccacagcgacgtgagcagcgagcagcagcacctgaagggccagaccggcaccaacggcggcaacgtgaagctgtacaccaccgaccagagcaccttcgacatcctgcaggacctggagttcagcagcggcagccccggcaaggagaccaacgagagcccctggagaagcgacctgctgatcgacgagaactgcctgctgagccccctggccggcgaggacgacagcttcctgctggagggcaacagcaacgaggactgcaagcccctgatcctgcccgacaccaagcccaagatcaaggacaacggcgacctggtgctgagcagccccagcaacgtgaccctgccccaggtgaagaccgagaaggaggacttcatcgagctgtgcacccccggcgtgatcaagcaggagaagctgggcaccgtgtactgccaggccagcttccccggcgccaacatcatcggcaacaagatgagcgccatcagcgtgcacggcgtgagcaccagcggcggccagatgtaccactacgacatgaacaccgccagcctgagccagcagcaggaccagaagcccatcttcaacgtgatcccccccatccccgtgggcagcgagaactggaacagatgccagggcagcggcgacgacaacctgaccagcctgggcaccctgaacttccccggcagaaccgtgttcagcaacggctacagcagccccagcatgagacccgacgtgagcagcccccccagcagcagcagcaccgccaccaccggccccccccccaagctgtgcctggtgtgcagcgacgaggccagcggctgccactacggcgtgctgacctgcggcagctgcaaggtgttcttcaagagagccgtggagggccagcacaactacctgtgcgccggcagaaacgactgcatcatcgacaagatcagaagaaagaactgccccgcctgcagatacagaaagtgcctgcaggccggcatgaacctggaggccagaaagaccaagaagaagatcaagggcatccagcaggccaccaccggcgtgagccaggagaccagcgagaaccccggcaacaagaccatcgtgcccgccaccctgccccagctgacccccaccctggtgagcctgctggaggtgatcgagcccgaggtgctgtacgccggctacgacagcagcgtgcccgacagcacctggagaatcatgaccaccctgaacatgctgggcggcagacaggtgatcgccgccgtgaagtgggccaaggccatccccggcttcagaaacctgcacctggacgaccagatgaccctgctgcagtacagctggatgttcctgatggccttcgccctgggctggagaagctacagacagagcagcgccaacctgctgtgcttcgcccccgacctgatcatcaacgagcagagaatgaccctgccctgcatgtacgaccagtgcaagcacatgctgtacgtgagcagcgagctgcacagactgcaggtgagctacgaggagtacctgtgcatgaagaccctgctgctgctgagcagcgtgcccaaggacggcctgaagagccaggagctgttcgacgagatcagaatgacctacatcaaggagctgggcaaggccatcgtgaagagagagggcaacagcagccagaactggcagagattctaccagctgaccaagctgctggacagcatgcacgaggtggtggagaacctgctgaactactgcttccagaccttcctggacaagaccatgagcatcgagttccccgagatgctggccgagatcatcaccaaccagatccccaagtacagcaacggcaacatcaagaagctgctgttccaccagaagtag

SEQ ID NO: 27175 - DNA, 2256 bp, Artificial Sequence
  derived and/or modified sequence
atggacagcaaggagagcctgacccccggcagagaggagaaccccagcagcgtgctggcccaggagagaggcgacgtgatggacttctacaagaccctgagaggcggcgccaccgtgaaggtgagcgccagcagccccagcctggccgtggccagccagagcgacagcaagcagagaagactgctggtggacttccccaagggcagcgtgagcaacgcccagcagcccgacctgagcaaggccgtgagcctgagcatgggcctgtacatgggcgagaccgagaccaaggtgatgggcaacgacctgggcttcccccagcagggccagatcagcctgagcagcggcgagaccgacctgaagctgctggaggagagcatcgccaacctgaacagaagcaccagcgtgcccgagaaccccaagagcagcgccagcaccgccgtgagcgccgcccccaccgagaaggagttccccaagacccacagcgacgtgagcagcgagcagcagcacctgaagggccagaccggcaccaacggcggcaacgtgaagctgtacaccaccgaccagagcaccttcgacatcctgcaggacctggagttcagcagcggcagccccggcaaggagaccaacgagagcccctggagaagcgacctgctgatcgacgagaactgcctgctgagccccctggccggcgaggacgacagcttcctgctggagggcaacagcaacgaggactgcaagcccctgatcctgcccgacaccaagcccaagatcaaggacaacggcgacctggtgctgagcagccccagcaacgtgaccctgccccaggtgaagaccgagaaggaggacttcatcgagctgtgcacccccggcgtgatcaagcaggagaagctgggcaccgtgtactgccaggccagcttccccggcgccaacatcatcgccagcctgagccagcagcaggaccagaagcccatcttcaacgtgatcccccccatccccgtgggcagcgagaactggaacagatgccagggcagcggcgacgacaacctgaccagcctgggcaccctgaacttccccggcagaaccgtgttcagcaacggctacagcagccccagcatgagacccgacgtgagcagcccccccagcagcagcagcaccgccaccaccggccccccccccaagctgtgcctggtgtgcagcgacgaggccagcggctgccactacggcgtgctgacctgcggcagctgcaaggtgttcttcaagagagccgtggagggccagcacaactacctgtgcgccggcagaaacgactgcatcatcgacaagatcagaagaaagaactgccccgcctgcagatacagaaagtgcctgcaggccggcatgaacctggaggccagaaagaccaagaagaagatcaagggcatccagcaggccaccaccggcgtgagccaggagaccagcgagaaccccggcaacaagaccatcgtgcccgccaccctgccccagctgacccccaccctggtgagcctgctggaggtgatcgagcccgaggtgctgtacgccggctacgacagcagcgtgcccgacagcacctggagaatcatgaccaccctgaacatgctgggcggcagacaggtgatcgccgccgtgaagtgggccaaggccatccccggcttcagaaacctgcacctggacgaccagatgaccctgctgcagtacagctggatgttcctgatggccttcgccctgggctggagaagctacagacagagcagcgccaacctgctgtgcttcgcccccgacctgatcatcaacgagcagagaatgaccctgccctgcatgtacgaccagtgcaagcacatgctgtacgtgagcagcgagctgcacagactgcaggtgagctacgaggagtacctgtgcatgaagaccctgctgctgctgagcagcgtgcccaaggacggcctgaagagccaggagctgttcgacgagatcagaatgacctacatcaaggagctgggcaaggccatcgtgaagagagagggcaacagcagccagaactggcagagattctaccagctgaccaagctgctggacagcatgcacgaggtggtggagaacctgctgaactactgcttccagaccttcctggacaagaccatgagcatcgagttccccgagatgctggccgagatcatcaccaaccagatccccaagtacagcaacggcaacatcaagaagctgctgttccaccagaagtag

SEQ ID NO: 27176 - DNA, 2334 bp, Artificial Sequence
  derived and/or modified sequence
atggattccaaggagtctttgacccctgggcgggaagagaacccttctagtgtgctggcccaagagcgaggcgatgtgatggacttctacaagactttgcgcgggggggctacagtgaaggtttccgcctcaagcccttccctcgctgtggcctcccagtctgactctaaacaacggaggctgttggtggacttcccaaaggggtcggtgtcaaacgctcagcagccagacctttctaaggctgtgtcgctgtccatgggcctttacatgggggaaacagaaactaaggtgatgggtaacgacctgggcttcccccagcagggccagatatccctgagctccggtgagactgacctaaaacttttggaggagtctattgccaaccttaataggagtacatcagtgccggagaatcctaaaagctccgcatccacggccgtatcagccgctcctaccgagaaggagtttccaaagacccattcagatgtatcctccgagcagcaacaccttaaaggccagaccgggactaatggcggaaacgtgaaactgtacaccacagatcaatcaactttcgacatcctccaggaccttgagttttcaagcggtagtcccggcaaggagactaatgagtctccttggagatcagacttgctcattgatgaaaactgtctgttgtccccactcgcgggggaggatgactcttttctgctagagggaaactctaacgaggattgcaagccattgatcctgcctgacacgaagccgaagattaaggataacggcgatctggtcctgtcctcaccctcaaatgtgacattgcctcaagtgaaaaccgaaaaagaagattttattgagctgtgcactcccggagtgatcaaacaggagaagctagggacagtatattgccaggcgtcattcccgggggccaatatcataggcaacaagatgtccgctatcagtgtccatggagtctcgacatcaggaggccagatgtaccattacgacatgaacacagcaagcttaagtcaacagcaggaccagaagcctatttttaacgtcattccgccaatcccagttggctctgaaaattggaatagatgccaggggtctggcgacgacaatttgacatccctcgggactctcaacttccctggtcgtactgtgttctcaaatggatattcttccccctctatgcggccagatgtgtccagcccccccagctcctcatctaccgctactactggccccccacccaaactatgcctggtctgtagtgatgaggcctccggatgtcattacggggtcttaacatgtggatcatgcaaggtgttttttaaaagagcagtagagggccagcataactatttatgtgccggcagaaacgactgtatcatcgacaagattcgccgtaagaactgtccggcatgccgctatcgtaagtgtctacaagctggaatgaacctggaggcacggaaaacaaaaaagaagataaaaggcatacaacaagcaactacaggcgtctctcaggaaactagcgagaaccctggaaataaaactattgtgcccgctacgttacctcagctaacacctacactagtgagcctcctcgaggtaatcgagccagaagtcctctacgccgggtatgattcttcagtcccagattcaacatggcgcataatgactacactcaatatgctgggggggcgccaggtgatcgcagccgtgaagtgggcgaaagccattcccggtttccggaacctgcacctggatgaccagatgaccttactccagtactcctggatgtttttgatggcattcgccctggggtggaggtcatatcgacagtcctctgcgaacttgttatgtttcgctcctgatttgataattaatgaacagcgtatgaccctcccttgcatgtatgatcaatgtaaacacatgctctatgtgagcagtgagttgcaccgcctgcaagtaagttacgaagagtacctgtgcatgaaaaccctactgctgctctctagcgtccccaaggacggcctgaagtcacaagaactgttcgatgaaatcagaatgacttacattaaggagctggggaaggccatcgtgaagcgggaggggaacagcagtcagaactggcagcgattttaccagcttacaaagctgctggactcgatgcacgaggtcgtcgagaacctgctgaactattgttttcagacattcttagacaagacaatgagtattgaattccccgagatgctagccgagattatcaccaatcagatcccgaagtacagcaatggcaatatcaagaagctgttattccaccaaaagtag

SEQ ID NO: 27177 - DNA, 2334 bp, Artificial Sequence
  derived and/or modified sequence
atggattcaaaggaaagcctcactccaggtcgcgaggagaacccgagctccgtcctcgctcaggaacgaggggacgtgatggacttttataaaacgctgagggggggggcaaccgttaaggtatcagcttcaagcccatctctggccgttgcaagccaaagcgactccaagcaaaggcgtctgctggtggacttccccaagggcagtgttagcaatgctcaacaaccagatctcagcaaagctgtctcgctgtcaatgggactgtacatgggagagactgaaactaaagtgatgggtaatgatctgggatttcctcagcaggggcagatctctctgagctcaggagagactgacttgaaactgttagaggagtcgatcgctaatttaaacaggagtacttctgtgcccgaaaaccccaaatctagcgctagtactgctgtttcggcagcgcctaccgaaaaggagtttcccaaaacacactccgacgtttcttctgaacaacagcatctgaaaggccagacagggactaacgggggcaatgtcaagctgtatactaccgaccagtccacgttcgacattctgcaagatcttgaattcagctccggctcccctgggaaagagacgaacgaatctccctggaggtccgacttgttgatcgatgaaaattgtcttttaagtcccctggctggggaggacgacagctttctgttggaagggaacagcaacgaagactgcaagcctctaatcctccccgatacaaagcccaagattaaagataatggtgatctcgtgctgtcttccccgtccaatgtgaccctccctcaggtgaagaccgaaaaagaagacttcattgagctgtgcacacctggagtgataaagcaagaaaagctgggcacagtctattgccaggctagcttccctggcgctaatattattgggaacaaaatgtccgcaatatcggtgcacggggtcagtacctcaggcggacagatgtaccactacgatatgaacacagcctccctatcgcagcagcaggatcagaagccgattttcaatgtaattccacccatccctgtcgggagcgaaaattggaaccgttgtcaagggtcaggcgacgataacctcacaagtctcggcacacttaactttccaggaagaacagtgttcagtaatggatactccagcccctctatgcgccccgatgtgagcagtcctcccagctccagtagcacagcgacgactggacccccgcccaagctgtgcctcgtgtgcagtgacgaggcatctggctgccattacggagtcttaacgtgtggctcatgtaaggtgtttttcaagcgagccgtagagggacagcataactacttgtgcgccggcaggaatgattgtatcattgataagatacggcggaagaactgtcccgcttgtcgttataggaagtgtctgcaagccgggatgaatctagaagcccgaaaaacaaaaaagaagatcaagggtatccagcaggcaacaaccggagtgagtcaggagacctccgaaaatccgggaaacaagacaatagtgcctgctacactgccccaacttacacctactttggtgtctttgttggaagtcattgagcctgaagtgctgtatgccgggtacgactcatcagtgcccgattcaacgtggaggattatgactacactgaacatgctgggaggccgccaggttatcgccgccgtcaagtgggcgaaggctattcctggcttccgcaacctccacctggatgatcagatgacccttctgcagtactcatggatgttcctaatggcctttgcacttgggtggcgatcctaccgacagagctctgcgaacctgctttgttttgctcctgatctgataatcaatgagcagcgaatgactcttccttgcatgtatgatcagtgcaaacacatgctgtatgtgagtagtgaattgcatagactgcaggtcagttatgaagaatatctgtgtatgaagacactgcttttgttaagttccgtacctaaggatggcttaaaaagccaggagctgttcgatgagatcagaatgacttacatcaaggagttgggaaaggcaatagtgaaacgagaaggaaactcttctcaaaattggcagcgattctaccagctgacaaagctgctggattctatgcacgaggttgttgaaaatttgctaaattactgctttcagaccttccttgataagactatgtctatcgaatttcccgagatgcttgccgaaattatcaccaaccagattcctaagtactccaatggcaacatcaaaaagctgcttttccatcagaagtag

SEQ ID NO: 27178 - DNA, 2256 bp, Artificial Sequence
  derived and/or modified sequence
atggattcaaaggagtccttaacacctggaagggaggaaaacccttcaagcgtgctggctcaggaaaggggggatgtgatggatttttacaaaaccctgcgcggtggcgcaactgtcaaggtgtccgctagtagcccaagtcttgctgtggcgtctcaaagcgattctaaacagcggcggctgctggtggatttcccaaaaggcagcgtgtcaaacgcacagcagccagatctatccaaggccgtatctctcagtatgggactgtatatgggcgagactgagactaaggtgatgggaaatgatctcggctttccccagcaggggcagatctctttgagcagcggcgaaaccgacctgaaactgttggaagagagtattgccaatctgaacaggtcaacatccgtcccagagaacccaaaaagtagcgcctcgacagcagtgagtgctgctccaaccgaaaaagagtttcccaaaacgcactctgacgtatcttctgagcagcagcacctgaaaggtcagactggtaccaatggcggaaacgtaaaactatatactaccgatcaaagtaccttcgacatattgcaggaccttgagttctcgtcaggaagcccgggcaaggagactaatgagtccccctggcgcagcgatctgctgattgatgagaactgtctgctctctcctttggccggagaagacgacagttttctgctcgaaggaaactccaacgaggactgcaaaccacttatactgcccgacaccaagcccaagataaaggacaacggcgacctggtcctgtcgtcgccctctaacgtgacacttccacaggtgaagacagagaaggaagatttcatagaactttgtactcctggagtcatcaaacaggaaaagcttggtaccgtctattgtcaggcctccttccctggggcaaatatcatagcgtctctctctcagcagcaggatcagaaaccaatctttaacgtgatccctccaatacccgtcggctccgaaaactggaaccgatgccagggctccggagacgataacttaacaagcctgggcacactcaatttccctgggcgcacagtttttagcaatgggtacagctctccctccatgcgacccgacgtctctagccccccgtccagctccagtacagcgactacagggccacctcccaagctgtgcttagtttgttccgatgaagcgtctgggtgtcactatggagtgctcacctgcggttcctgcaaggtgttcttcaagcgcgccgtggagggccagcataattacttgtgtgcaggaaggaacgattgtatcattgacaaaatacgccggaaaaactgccccgcttgtaggtaccggaagtgtcttcaggctggaatgaacctggaagccagaaaaactaaaaagaagattaagggtattcagcaggctacaacaggagtgtcccaggaaacatctgaaaacccagggaacaaaaccatagttccagcaactttgccccagctcacccctacactcgttagtctgctcgaggtgatcgaacccgaggtactctatgccggatacgactcctccgttcctgattctacctggcgcatcatgacaaccttaaatatgttaggaggacgccaggtgatagcagccgtgaagtgggccaaagcgataccagggttcagaaatctgcaccttgatgatcagatgactctgctccagtactcctggatgtttttaatggcctttgccctcggctggcggagctatagacagagctcagcaaatcttctgtgcttcgcacctgacctcataattaatgaacaaagaatgactttgccttgtatgtatgaccaatgtaagcatatgctgtatgtttcctcagaattgcatcgcctacaagtctcctacgaggagtacctatgtatgaaaactctgctcctcttatcctcagtccccaaggatggtctgaaatctcaggagctgtttgatgaaattaggatgacctacattaaggaactgggtaaggccattgtgaagcgcgagggtaactcctcacagaattggcagcgcttctaccagctgacaaagctgctcgacagcatgcatgaagtggtcgagaatcttctaaactactgtttccaaacattccttgataagacaatgagcatcgagtttccagagatgctcgccgaaatcattacaaatcagattcctaagtatagcaatggcaatattaagaagcttcttttccaccagaaatag

SEQ ID NO: 27179 - DNA, 2334 bp, Artificial Sequence
  derived and/or modified sequence
atggattccaaagagagcctgacgccaggtagggaggagaatcctagctccgtcctagcccaggagagaggagacgtgatggacttctataaaacactgcgggggggggccactgtcaaggtctccgcctcttcaccaagcctggccgtggcctctcagtcggacagcaaacagcgtagattgttagtcgatttccccaaaggttccgtctctaacgcccagcagcctgatctgtcgaaggctgtttcactgtccatggggctgtacatgggcgagactgagaccaaggtgatgggtaacgatctaggtttcccgcagcaaggacaaatctccctgtcttccggcgagacagatctaaagttgctggaggagtcaatcgcaaatctgaatcgcagtacttccgtccctgaaaatccaaagtcctcagccagcactgccgtgtctgctgccccaactgagaaggaatttcccaagacacatagcgatgtgtcttctgaacagcagcatctaaagggccaaaccggcaccaacggcgggaacgtcaagctttacaccactgaccaatctacctttgacatactccaagatctggaattctcgagtggaagcccaggtaaggaaactaacgagagcccttggcggtctgatttgctgatcgacgaaaactgtttgctttctccgctggcgggcgaggatgactctttcctgttggagggtaacagcaatgaggactgcaagcccctgattctgcctgatacaaagcctaaaatcaaagacaacggagatctcgtgctcagttccccatcaaacgtaactctgccccaagtcaaaaccgaaaaggaggattttattgagctttgtactccgggggttatcaaacaggagaagttaggtaccgtgtactgccaggcgtccttccctggtgccaatatcatcggcaacaaaatgtcagctatcagtgtgcatggcgtatcaacttctggtggacagatgtaccattacgacatgaatactgccagcctgtctcagcagcaggaccagaagcccatctttaacgtaattccacctattcctgttgggagcgaaaactggaaccgttgccaggggtcaggcgacgacaacttaactagcctcggcactctgaacttccccggtcgcaccgttttctccaatgggtacagcagtccctctatgcgccctgacgtgtccagtcccccatcctccagctcaactgctaccaccgggcccccccctaagctgtgtctggtgtgtagtgacgaggctagcggatgccactatggagttttgacttgtggcagttgtaaggtgttttttaaaagagcagtagagggccaacacaattatctgtgcgccggaaggaatgattgcattatcgacaaaattcggagaaaaaactgtccggcttgcagataccgcaaatgccttcaagctggcatgaacctggaagctcgcaagactaagaagaaaattaaaggtatccagcaagctacgacaggggtgtctcaggagaccagcgaaaaccccggtaacaagactatcgtgcccgctactttgcctcagctgactcccaccttggtaagccttctggaagttatcgaacctgaggtactctatgccggttacgattcttcagtcccagacagtacctggcggatcatgacaacgttaaatatgctgggtggcaggcaagtcatcgcagctgtgaagtgggccaaggccattccagggttcaggaatcttcacctcgacgaccaaatgaccctcctacaatattcatggatgttcctgatggcttttgcactcggctggagaagctaccggcagtcctctgccaatctgctgtgttttgctcccgaccttataatcaacgagcagagaatgacgctgccatgtatgtatgatcagtgcaagcacatgctgtatgtgtcatccgagctgcacaggctccaggtttcttatgaagagtatctgtgcatgaaaacattgttgctcttgagctccgttcccaaggatgggcttaagtcccaggaactttttgacgaaatcagaatgacatacattaaggagcttggaaaggcaatcgtgaagcgggaggggaatagttctcagaactggcagcgcttttaccaactgacaaaactgctggactccatgcacgaggttgtggaaaacttgcttaactattgttttcagaccttcctcgacaaaacgatgtccattgagttcccagaaatgctagccgaaatcataaccaaccagatccctaagtattcgaatggtaatatcaagaagctgctgttccatcaaaaatag

SEQ ID NO: 27180 - DNA, 2334 bp, Artificial Sequence
  derived and/or modified sequence
atggacagcaaggagagcctgaccccaggccgggaggagaaccccagctctgtgctggcccaggagagaggagatgtgatggacttctacaagaccctgcggggcggggccaccgtgaaggtgtctgccagcagccccagcctggccgtggccagccagagcgacagcaagcagaggcggctgctggtggacttccccaagggctctgtgtccaatgcccagcagcctgacctgagcaaggctgtgtccctgtccatgggcctgtacatgggagaaacagagaccaaggtgatgggaaatgacctgggcttcccccagcagggccagatcagcctgagcagcggggagacagacctgaagctgctggaggagagcatcgccaacctgaacagaagcacctctgtgcctgagaaccccaagagcagcgccagcacagctgtgtctgctgcccccacagagaaggagttccccaagacccacagtgatgtgtcctctgagcagcagcacctgaagggccagacaggcaccaatggaggaaatgtgaagctgtacaccacagaccagagcacctttgacatcctgcaggacctggagttcagcagcggcagccctgggaaggagaccaatgaaagcccctggaggagtgacctgctgattgatgagaactgcctgctgagccccctggccggagaagatgacagcttcctgctggagggcaacagcaatgaagactgcaagcccctcatcctgcctgacaccaagcccaagatcaaggacaacggggacctggtgctgagcagccccagcaatgtgaccctgccccaggtgaagacagagaaggaggacttcatcgagctgtgcaccccaggagtcatcaagcaggagaagctgggcaccgtgtactgccaggccagcttccctggggccaacatcatcggcaacaagatgtctgccatctctgtgcacggcgtgtccaccagcggcggccagatgtaccactatgacatgaacacagccagcctgagccagcagcaggaccagaagcccatcttcaacgtcatcccccccatccctgtgggcagcgagaactggaaccgctgccagggcagcggagatgacaacctgaccagcctgggcaccctgaacttccctggccgcacagtgttcagcaatggctacagcagccccagcatgaggccagatgtgagcagcccccccagcagcagcagcacagccaccaccggccccccacccaagctgtgcctggtgtgcagtgatgaggccagcggctgccactatggagtgctgacctgtggcagctgcaaggtgttcttcaagagagctgtggagggccagcacaactacctgtgtgccggcagaaatgactgcatcatcgacaagatccggaggaagaactgcccagcctgccgctacaggaagtgcctgcaggccggcatgaacctggaggccaggaagaccaagaagaagatcaagggcatccagcaggccaccactggagtgtcccaggagaccagtgaaaatcctggcaacaagaccatcgtgcctgccaccctgccccagctgacccccaccctggtgtccctgctggaggtgattgagcctgaggtgctgtatgccggctatgacagctctgtgcctgacagcacctggaggatcatgaccaccctgaacatgctgggcggccggcaggtgattgctgctgtgaagtgggccaaggccatccctggcttcaggaacctgcacctggatgaccagatgaccctgctgcagtacagctggatgttcctgatggcctttgccctgggctggaggagctaccggcagagcagcgccaacctgctgtgctttgccccagacctgatcatcaatgagcagaggatgaccctgccctgcatgtatgaccagtgcaagcacatgctgtatgtgtcctctgagctgcaccggctgcaggtgtcctatgaggagtacctgtgcatgaagaccctgctgctgctgagctctgtgcccaaggatggcctgaagagccaggagctgtttgatgagatccgcatgacctacatcaaggagctgggcaaggccatcgtgaagcgggagggcaacagcagccagaactggcagcgcttctaccagctgaccaagctgctggacagcatgcatgaggtggtggagaacctgctgaactactgcttccagaccttcctggacaagaccatgagcattgagttccctgagatgctggccgagatcatcaccaaccagatccccaagtacagcaatggaaacatcaagaagctgctcttccaccagaagtag

SEQ ID NO: 27181 - DNA, 2256 bp, Artificial Sequence
  derived and/or modified sequence
atggacagcaaggagagcctgaccccaggccgggaggagaaccccagctctgtgctggcccaggagagaggagatgtgatggacttctacaagaccctgcggggcggggccaccgtgaaggtgtctgccagcagccccagcctggccgtggccagccagagcgacagcaagcagaggcggctgctggtggacttccccaagggctctgtgtccaatgcccagcagcctgacctgagcaaggctgtgtccctgtccatgggcctgtacatgggagaaacagagaccaaggtgatgggaaatgacctgggcttcccccagcagggccagatcagcctgagcagcggggagacagacctgaagctgctggaggagagcatcgccaacctgaacagaagcacctctgtgcctgagaaccccaagagcagcgccagcacagctgtgtctgctgcccccacagagaaggagttccccaagacccacagtgatgtgtcctctgagcagcagcacctgaagggccagacaggcaccaatggaggaaatgtgaagctgtacaccacagaccagagcacctttgacatcctgcaggacctggagttcagcagcggcagccctgggaaggagaccaatgaaagcccctggaggagtgacctgctgattgatgagaactgcctgctgagccccctggccggagaagatgacagcttcctgctggagggcaacagcaatgaagactgcaagcccctcatcctgcctgacaccaagcccaagatcaaggacaacggggacctggtgctgagcagccccagcaatgtgaccctgccccaggtgaagacagagaaggaggacttcatcgagctgtgcaccccaggagtcatcaagcaggagaagctgggcaccgtgtactgccaggccagcttccctggggccaacatcatcgccagcctgagccagcagcaggaccagaagcccatcttcaacgtcatcccccccatccctgtgggcagcgagaactggaaccgctgccagggcagcggagatgacaacctgaccagcctgggcaccctgaacttccctggccgcacagtgttcagcaatggctacagcagccccagcatgaggccagatgtgagcagcccccccagcagcagcagcacagccaccaccggccccccacccaagctgtgcctggtgtgcagtgatgaggccagcggctgccactatggagtgctgacctgtggcagctgcaaggtgttcttcaagagagctgtggagggccagcacaactacctgtgtgccggcagaaatgactgcatcatcgacaagatccggaggaagaactgcccagcctgccgctacaggaagtgcctgcaggccggcatgaacctggaggccaggaagaccaagaagaagatcaagggcatccagcaggccaccactggagtgtcccaggagaccagtgaaaatcctggcaacaagaccatcgtgcctgccaccctgccccagctgacccccaccctggtgtccctgctggaggtgattgagcctgaggtgctgtatgccggctatgacagctctgtgcctgacagcacctggaggatcatgaccaccctgaacatgctgggcggccggcaggtgattgctgctgtgaagtgggccaaggccatccctggcttcaggaacctgcacctggatgaccagatgaccctgctgcagtacagctggatgttcctgatggcctttgccctgggctggaggagctaccggcagagcagcgccaacctgctgtgctttgccccagacctgatcatcaatgagcagaggatgaccctgccctgcatgtatgaccagtgcaagcacatgctgtatgtgtcctctgagctgcaccggctgcaggtgtcctatgaggagtacctgtgcatgaagaccctgctgctgctgagctctgtgcccaaggatggcctgaagagccaggagctgtttgatgagatccgcatgacctacatcaaggagctgggcaaggccatcgtgaagcgggagggcaacagcagccagaactggcagcgcttctaccagctgaccaagctgctggacagcatgcatgaggtggtggagaacctgctgaactactgcttccagaccttcctggacaagaccatgagcattgagttccctgagatgctggccgagatcatcaccaaccagatccccaagtacagcaatggaaacatcaagaagctgctcttccaccagaagtag

SEQ ID NO: 27182 - DNA, 2334 bp, Artificial Sequence
  derived and/or modified sequence
atggacagcaaggagagcctgacccccggccgggaggagaacccctcctctgtcctggcccaggaaaggggagatgtcatggatttttacaaaaccctgagaggtggcgctacagtcaaggtatctgcatctagtccttcacttgcggtagcttcacaatcggacagtaagcagaggcgcctgcttgtcgatttccccaagggctcagtgtctaacgctcagcagcctgatctcagcaaggccgtgagcctgtccatgggcttatatatgggagaaacagagaccaaggtgatggggaacgacctaggctttccccagcagggccagattagtctgtcttctggagagacagacttgaagctgcttgaggagtcaatcgccaacctaaaccggtcgacctcagtacccgagaaccctaaatcctccgcttcaaccgcggtctctgctgcccccactgagaaggagtttcctaagacacattctgacgtgtccagtgagcaacagcatcttaagggccaaacagggactaacggtggtaacgtgaagctgtacacaaccgaccagtcaacattcgatatcctacaggaccttgagttctcgagtggttcccccggtaaagagaccaatgagtcaccatggagaagcgacttgctgatagatgagaattgcctgttgagcccgctcgcaggcgaggacgactcattcctcctggagggaaattcaaatgaggattgcaaacccttaattctgcctgacactaaaccgaaaatcaaggataacggggacttggtgctaagcagtccatccaacgtgacgttacctcaagttaagaccgaaaaggaagactttatcgagttatgcactccaggcgtgataaagcaggaaaagctgggaactgtctattgtcaagcttcctttccaggcgctaacatcatcggtaacaagatgagcgccatatcagttcatggtgtgtctacttccggaggccagatgtaccactacgatatgaacacagcttctctttcccaacagcaggatcaaaagccgatcttcaatgttataccaccaattcccgttgggagcgaaaattggaataggtgccaagggtccggggatgataatctgaccagcttaggcacattgaacttccccgggcgtaccgtattttccaacggctatagcagtcccagtatgaggccggacgtaagcagccccccttcgagctcctctacagctacaacagggccccccccaaagctctgcttggtgtgttccgacgaagcatccggctgtcactatggcgtgctcacctgcggaagctgtaaagtgttcttcaaacgggctgtggaagggcaacacaattacctgtgtgccggccggaacgattgtatcatagacaaaattaggaggaagaattgccctgcatgccgatatcggaagtgtctgcaggccggcatgaaccttgaggctcgtaagaccaaaaagaagatcaaagggatacagcaggccaccactggagtatcccaggaaacctccgagaaccctggaaacaagacaattgtgccagcgactctgccccagctgacgcctaccctggtatccctactagaggtgatcgagcccgaggtgctctacgcaggctacgattcaagcgtgcctgattcaacctggagaatcatgacaacgctcaacatgctggggggccggcaggttatagccgccgtgaagtgggcaaaggcaatcccaggcttccgaaatctgcatctggacgatcaaatgaccctgctccagtactcctggatgtttcttatggcatttgctctcgggtggagatcataccgtcaaagctccgccaaccttctttgttttgcccctgatctcattatcaatgagcagcgcatgaccctcccatgcatgtatgatcaatgtaagcatatgctgtatgtgagtagtgagttgcaccgcttgcaagttagctatgaggagtatctctgtatgaagactctactgctgttgtcaagcgttcccaaggacgggctgaagtcacaggaactgttcgatgagatcaggatgacatacatcaaggagctgggaaaggcaatcgtgaagcgcgaggggaactctagtcagaactggcagcgcttctaccagttgactaagctgttggactccatgcatgaggtggtggagaacttgcttaattactgctttcagacattcctggacaaaacaatgtccattgaattccctgaaatgctggccgagataataaccaatcaaatccccaagtattcgaacggcaacatcaagaagctcctgtttcatcaaaagtag

SEQ ID NO: 27183 - DNA, 2334 bp, Artificial Sequence
  derived and/or modified sequence
atggacagcaaggagagcctgacccccggccgggaggagaaccccagctctgtattggcacaggagcggggcgacgtcatggatttctacaaaaccctgcggggtggggccacagttaaggtgagcgcctcctccccttcgctcgccgttgccagccaaagtgactccaagcagagacggctgcttgtcgacttcccaaaggggtctgtgtcaaacgctcagcagcctgatctgtccaaagccgtgtccctgtccatgggactttacatgggggagactgagacaaaggtcatgggaaatgatctaggatttccgcagcaagggcagatctcattgtcatcaggcgaaacggacctcaagctgctcgaggaatcgattgcaaaccttaacaggtcaacaagcgtgcctgagaatcccaagtctagcgccagcactgcggtgtcagccgcaccaaccgaaaaagagtttcctaaaacacattccgacgttagcagcgagcaacaacatctaaagggacagacggggaccaatggcggaaatgtcaagttgtataccactgatcagagcacatttgatattctccaagacctggagttttcatcagggagccctggaaaagaaactaacgaaagcccctggcggtccgacttattaatcgatgagaattgcctgctgtctcctctggccggagaagacgatagcttcctcctggaggggaacagtaatgaggattgtaagcctttgatcctgcccgacaccaaacccaagatcaaagacaatggcgaccttgttctctcaagtccatccaatgtgactctccctcaggtgaaaaccgagaaagaggactttatcgaactgtgcacgcctggagtcatcaaacaggagaaattgggcaccgtgtactgtcaagcctcttttccgggagccaatattatcgggaacaaaatgagtgcgatctctgtgcatggagtgtccacttccggaggacagatgtatcactacgacatgaacactgcatctttaagccagcaacaggaccagaaacctattttcaatgttatccctccaatccctgtggggtccgaaaactggaaccgttgtcagggcagtggcgatgataacctgaccagtttaggaaccctgaattttcctggacgaaccgtgttcagcaatggatacagctctccttcaatgcggccagacgtttcttctcccccaagttcaagcagtactgccactacaggtccgccgcccaaactgtgtttggtctgctcggatgaggccagtggttgccactatggggtgctgacctgcggttcgtgcaaagtgttctttaagcgggccgtagaaggccaacacaactatctgtgcgctggcaggaacgattgtatcatagacaagattcgaaggaagaactgtccagcctgtagatatagaaaatgtctgcaggcagggatgaatcttgaagcgcggaagacaaaaaagaagatcaaaggtatccagcaggcgacaactggggtttcacaggaaacttccgaaaaccccggcaacaaaacgatcgtccccgccacgctaccgcagttgaccccaactcttgtgtcactattggaagtcatcgaaccggaagtgctgtacgcaggctatgactcatccgtgccagattcaacatggcgtatcatgaccacgctgaacatgctgggcgggagacaggtgatcgctgccgtgaagtgggctaaagccatccctgggtttcgcaatctccatctggacgaccagatgactctgctgcagtactcctggatgttcttaatggctttcgccctcgggtggaggagttaccgccagtcttcagccaatttactgtgcttcgctccagatttaataataaatgagcagcggatgaccctcccctgcatgtacgatcagtgtaagcacatgctgtacgtcagttccgagctccaccggcttcaggtttcctacgaggagtatctgtgtatgaagaccctgctcctgctgagctctgtgcctaaagacgggcttaaaagccaggaactgttcgatgaaatccgcatgacatatatcaaggagcttggtaaagccatcgtaaagagagagggtaattcttctcagaactggcagcggttctatcagctgacaaagttgctggactcaatgcacgaagtcgtggaaaatctcctgaactactgtttccagaccttcttggacaaaaccatgtcgattgagttcccagaaatgctggctgaaatcatcacaaatcagatcccaaaatattccaacggaaacatcaagaaactgctgtttcaccaaaagtag

SEQ ID NO: 27184 - DNA, 2256 bp, Artificial Sequence
  derived and/or modified sequence
atggacagcaaggagagcctgacccccggccgggaggagaaccccagctcagtcctcgctcaggaacgtggcgatgtcatggacttctacaaaacgttgagaggtggggccacggtcaaggtttctgcctcaagccctagtcttgcagtggcttcccagagtgatagcaaacaacggagactcctggtagattttcctaagggaagtgtttccaatgcacagcaaccagatctcagtaaggcagtctccctctcaatgggcctgtacatgggcgagacagagacgaaagtgatggggaacgatttagggtttccgcaacaggggcagatttctctcagctcaggggagacggacctgaagcttctggaggaatctattgccaacctcaatcgctctacgtctgtgccagagaatcctaagtcgagtgccagcaccgccgtgagcgccgcccctaccgagaaggagttcccaaagactcacagtgacgtgagctccgagcaacaacatctcaaagggcaaactggcaccaatggtggaaacgtgaagctgtacactaccgatcagtcaactttcgatatcttgcaagatctggagttctctagcggaagccccgggaaggaaaccaacgagtcaccctggagaagcgatttgctcatcgatgagaactgcctcctgtctcccctagcaggtgaagatgactcttttctcctggagggcaattcaaatgaggactgtaagcctctcattctgcccgatactaaaccaaagatcaaggataatggcgatctggtgctatcttctccctcaaacgtgacccttccccaggttaagacagagaaggaagattttatagaactctgcactcccggagtgatcaagcaggaaaagctgggaaccgtgtattgccaggctagttttcccggagccaacatcattgcctccctctctcagcagcaggatcagaaacctattttcaatgtgattccgccgattcccgtggggagcgagaactggaacaggtgccagggctcaggagacgataatctgacatctcttggtactctgaacttccccgggcgcacagtgttttcaaatgggtattcgagcccctcaatgaggcccgatgtttcgagcccaccatcaagtagcagcactgcaacaaccgggccaccaccgaagctgtgcttggtgtgttcagacgaggcaagtggctgccattacggtgtcttaacgtgcggttcgtgtaaagtattttttaagcgggccgtagaaggtcagcacaactatctatgcgcagggcgcaacgattgcattatagacaagattcgcagaaagaactgcccagcgtgcagatatcgcaagtgtctccaggccggcatgaatttggaagctagaaagacgaagaagaaaattaaaggcattcaacaggctactactggagtgtcacaggaaacttccgagaaccctggaaacaagaccattgtaccagccaccctgccgcaactgacaccgacacttgtttctctactggaggtgatcgagccggaggtcctctatgctggatacgattctagcgttccagacagcacttggcggatcatgaccacgctcaacatgctgggagggcggcaggtgatcgcagccgtgaaatgggctaaggccatccccggatttcgcaatctccacttagacgatcagatgacactcctccagtatagttggatgtttttgatggcctttgcgttgggctggagatcatatcgacaatccagcgccaacctgctctgtttcgctccagacctcattataaacgaacagcgcatgacccttccctgcatgtacgaccagtgcaagcacatgctgtacgtatcatctgaactgcatcgtttgcaagttagctatgaggagtatctttgtatgaagactttattgttgctgagctccgtacccaaagacggactgaagagtcaagaactgtttgatgaaatcagaatgacgtacataaaagaacttggcaaagctattgtgaaaagagaggggaacagctctcagaattggcagcggttctatcaactgacgaaactgttggactctatgcacgaggtggttgagaacctgcttaactattgctttcagacatttctggacaagacaatgtccatcgaattccccgagatgctggctgagattattactaaccagattccaaaatacagcaatggaaacattaaaaagttactgtttcatcagaagtag

SEQ ID NO: 27185 - DNA, 2334 bp, Artificial Sequence
  derived and/or modified sequence
atggacagcaaggagagcctgacccccggccgggaggagaacccctcctccgtgttggcccaagaaaggggcgacgtgatggacttttacaaaaccttgagaggcggagcgaccgtaaaggttagcgcaagcagcccttccctggccgtcgcatctcagagcgatagtaaacagaggcggctactggtggattttcctaaaggcagcgttagtaacgctcagcagcccgatctctcgaaagcggtgagcctgagtatgggattgtatatgggcgaaacagaaaccaaggtgatgggtaatgatttaggattccctcagcagggacagatttcacttagttccggtgagacagacttaaagctgttggaggaaagtatcgcaaatctgaatcgctctaccagcgtgcccgagaacccaaagagctccgcctctaccgctgttagtgccgcccccaccgagaaggagttccccaaaacccacagtgacgtgagctctgagcagcagcaccttaaaggtcagaccggcacgaacggcggcaacgttaagctgtatactacagatcagtccacattcgatatcctccaggacctcgagtttagcagtggcagtcctggcaaggagaccaatgagtccccgtggcgctcagacttacttatcgacgagaactgcctcctcagcccactggcgggagaggatgattctttcctgctagagggtaacagcaatgaagattgtaagccgcttatcttgcctgacaccaagccaaagatcaaagataatggtgatctggtgctgtcaagcccatctaatgtaactctgccccaggttaagacggagaaagaggatttcatcgagctttgcacacctggtgtgatcaagcaggagaaactcggcactgtgtactgccaggcctcctttcccggagcgaatattattggcaacaaaatgtccgctatcagcgtgcacggtgtctcaaccagtggaggtcagatgtaccactatgatatgaataccgcatcactgtcacagcagcaagatcaaaaaccgatctttaacgtaattccacctataccagtcggctctgagaactggaaccgatgccagggatctggcgacgataacttgacctccttaggtaccctcaactttcccggccgcactgttttctctaatggctatagttctccgtccatgcggcctgatgttagttcaccccccagcagcagtagcacagcgaccacaggtcccccacccaagctgtgcctggtctgctcagatgaggctagcggctgtcactatggggtgctgacatgcggctcttgcaaagtcttctttaagcgcgctgtcgagggacagcataactacctgtgtgcaggccgaaacgactgtatcatcgacaagataagacggaagaattgccccgcctgtcggtatagaaagtgtctgcaggctggaatgaatctagaagcccggaagaccaagaaaaagattaaaggcattcagcaggcaaccacaggggtgtctcaggagacttccgaaaatcccggaaataagacgattgttcctgcaactttgccgcaactcacccctactctggtgtctctgcttgaggtaatcgagccagaggtgctttatgctggctatgattccagcgtgccggattctacatggagaattatgaccaccctaaatatgttggggggtcgccaggtcatcgctgccgtgaagtgggctaaagctattccagggttccgcaatctccatttagatgatcagatgacactactccagtactcatggatgttcctgatggccttcgcgctgggctggcggtcttaccgacaaagctctgccaacttactgtgttttgcacctgatctgatcattaacgaacagaggatgactttgccctgcatgtacgatcagtgtaaacatatgctgtatgtgtctagcgaactgcaccgcctccaggtctcttacgaagaatacttatgcatgaaaacactcttgctccttagctctgtgcctaaggacggcctgaaatcccaggagctgttcgatgagattcgcatgacctacattaaggaactgggaaaggcaatagtgaagagagagggaaactccagccagaattggcaacggttctaccaactcaccaagctgcttgattctatgcacgaagtggtggaaaacctgctaaattactgcttccaaactttcctggacaagaccatgtccattgaattccctgaaatgctggctgagataatcacaaaccagatccctaaatacagtaacggtaatatcaagaagctgctgttccatcagaagtag

SEQ ID NO: 27186 - DNA, 7286 bp, Artificial Sequence
  derived and/or modified sequence
aggttatgtaagggtttgctttcaccccattcaaaaggtacctcttcctcttctcttgctccctctcgccctcattcttgtgcctatgcagacatttgagtagaggcgaatcactttcacttctgctggggaaattgcaacacgcttctttaaatggcagagagaaggagaaaacttagatcttctgataccaaatcactggaccttagaaggtcagaaatctttcaagccctgcaggaccgtaaaatgcgcatgtgtccaacggaagcactggggcatgagtggggaaggaatagaaacagaaagagggtaagagaagaaaaaagggaaagtggtgaaggcagggaggaaaattgcttagtgtgaatatgcacgcattcatttagttttcaaatccttgttgagcatgataaaattcccagcatcagacctcacatgttggtttccattaggatctgcctgggggaatatctgctgaatcagtggctctgagctgaactaggaaattcaccataattaggagagtcactgtatttctctccaaaaaaaaaaaagttatacccgagagacaggatcttctgatctgaaattttcttcacttctgaaattctctggtttgtgctcatcgttggtagctatttgttcatcaagagttgtgtagctggcttcttctgaaaaaaggaatctgcgtcatatctaagtcagatttcattctggtgctctcagagcagttagcccaggaaaggggccagcttctgtgacgactgctgcagaggcaggtgcagtttgtgtgccacagatattaactttgataagcacttaatgagtgccttctctgtgcgagaatggggaggaacaaaatgcagctcctaccctcctcgggctttagttgtaccttaataacaggaattttcatctgcctggctcctttcctcaaagaacaaagaagactttgcttcattaaagtgtctgagaaggaagttgatattcactgatggactccaaagaatcattaactcctggtagagaagaaaaccccagcagtgtgcttgctcaggagaggggagatgtgatggacttctataaaaccctaagaggaggagctactgtgaaggtttctgcgtcttcaccctcactggctgtcgcttctcaatcagactccaagcagcgaagacttttggttgattttccaaaaggctcagtaagcaatgcgcagcagccagatctgtccaaagcagtttcactctcaatgggactgtatatgggagagacagaaacaaaagtgatgggaaatgacctgggattcccacagcagggccaaatcagcctttcctcgggggaaacagacttaaagcttttggaagaaagcattgcaaacctcaataggtcgaccagtgttccagagaaccccaagagttcagcatccactgctgtgtctgctgcccccacagagaaggagtttccaaaaactcactctgatgtatcttcagaacagcaacatttgaagggccagactggcaccaacggtggcaatgtgaaattgtataccacagaccaaagcacctttgacattttgcaggatttggagttttcttctgggtccccaggtaaagagacgaatgagagtccttggagatcagacctgttgatagatgaaaactgtttgctttctcctctggcgggagaagacgattcattccttttggaaggaaactcgaatgaggactgcaagcctctcattttaccggacactaaacccaaaattaaggataatggagatctggttttgtcaagccccagtaatgtaacactgccccaagtgaaaacagaaaaagaagatttcatcgaactctgcacccctggggtaattaagcaagagaaactgggcacagtttactgtcaggcaagctttcctggagcaaatataattggtaataaaatgtctgccatttctgttcatggtgtgagtacctctggaggacagatgtaccactatgacatgaatacagcatccctttctcaacagcaggatcagaagcctatttttaatgtcattccaccaattcccgttggttccgaaaattggaataggtgccaaggatctggagatgacaacttgacttctctggggactctgaacttccctggtcgaacagttttttctaatggctattcaagccccagcatgagaccagatgtaagctctcctccatccagctcctcaacagcaacaacaggaccacctcccaaactctgcctggtgtgctctgatgaagcttcaggatgtcattatggagtcttaacttgtggaagctgtaaagttttcttcaaaagagcagtggaaggacagcacaattacctatgtgctggaaggaatgattgcatcatcgataaaattcgaagaaaaaactgcccagcatgccgctatcgaaaatgtcttcaggctggaatgaacctggaagctcgaaaaacaaagaaaaaaataaaaggaattcagcaggccactacaggagtctcacaagaaacctctgaaaatcctggtaacaaaacaatagttcctgcaacgttaccacaactcacccctaccctggtgtcactgttggaggttattgaacctgaagtgttatatgcaggatatgatagctctgttccagactcaacttggaggatcatgactacgctcaacatgttaggagggcggcaagtgattgcagcagtgaaatgggcaaaggcaataccaggtttcaggaacttacacctggatgaccaaatgaccctactgcagtactcctggatgtttcttatggcatttgctctggggtggagatcatatagacaatcaagtgcaaacctgctgtgttttgctcctgatctgattattaatgagcagagaatgactctaccctgcatgtacgaccaatgtaaacacatgctgtatgtttcctctgagttacacaggcttcaggtatcttatgaagagtatctctgtatgaaaaccttactgcttctctcttcagttcctaaggacggtctgaagagccaagagctatttgatgaaattagaatgacctacatcaaagagctaggaaaagccattgtcaagagggaaggaaactccagccagaactggcagcggttttatcaactgacaaaactcttggattctatgcatgaagtggttgaaaatctccttaactattgcttccaaacatttttggataagaccatgagtattgaattccccgagatgttagctgaaatcatcaccaatcagataccaaaatattcaaatggaaatatcaaaaaacttctgtttcatcaaaagtgactgccttaataagaatggttgccttaaagaaagtcgaattaatagcttttattgtataaactatcagtttgtcctgtagaggttttgttgttttattttttattgttttcatctgttgttttgttttaaatacgcactacatgtggtttatagagggccaagacttggcaacagaagcagttgagtcgtcatcacttttcagtgatgggagagtagatggtgaaatttattagttaatatatcccagaaattagaaaccttaatatgtggacgtaatctccacagtcaaagaaggatggcacctaaaccaccagtgcccaaagtctgtgtgatgaactttctcttcatactttttttcacagttggctggatgaaattttctagactttctgttggtgtatcccccccctgtatagttaggatagcatttttgatttatgcatggaaacctgaaaaaaagtttacaagtgtatatcagaaaagggaagttgtgccttttatagctattactgtctggttttaacaatttcctttatatttagtgaactacgcttgctcattttttcttacataattttttattcaagttattgtacagctgtttaagatgggcagctagttcgtagctttcccaaataaactctaaacattaatcaatcatctgtgtgaaaatgggttggtgcttctaacctgatggcacttagctatcagaagaccacaaaaattgactcaaatctccagtattcttgtcaaaaaaaaaaaaaaaaaagctcatattttgtatatatctgcttcagtggagaattatataggttgtgcaaattaacagtcctaactggtatagagcacctagtccagtgacctgctgggtaaactgtggatgatggttgcaaaagactaatttaaaaaataactaccaagaggccctgtctgtacctaacgccctatttttgcaatggctatatggcaagaaagctggtaaactatttgtctttcaggaccttttgaagtagtttgtataacttcttaaaagttgtgattccagataaccagctgtaacacagctgagagacttttaatcagacaaagtaattcctctcactaaactttacccaaaaactaaatctctaatatggcaaaaatggctagacacccattttcacattcccatctgtcaccaattggttaatctttcctgatggtacaggaaagctcagctactgatttttgtgatttagaactgtatgtcagacatccatgtttgtaaaactacacatccctaatgtgtgccatagagtttaacacaagtcctgtgaatttcttcactgttgaaaattattttaaacaaaatagaagctgtagtagccctttctgtgtgcaccttaccaactttctgtaaactcaaaacttaacatatttactaagccacaagaaatttgatttctattcaaggtggccaaattatttgtgtaatagaaaactgaaaatctaatattaaaaatatggaacttctaatatatttttatatttagttatagtttcagatatatatcatattggtattcactaatctgggaagggaagggctactgcagctttacatgcaatttattaaaatgattgtaaaatagcttgtatagtgtaaaataagaatgatttttagatgagattgttttatcatgacatgttatatattttttgtaggggtcaaagaaatgctgatggataacctatatgatttatagtttgtacatgcattcatacaggcagcgatggtctcagaaaccaaacagtttgctctaggggaagagggagatggagactggtcctgtgtgcagtgaaggttgctgaggctctgacccagtgagattacagaggaagttatcctctgcctcccattctgaccacccttctcattccaacagtgagtctgtcagcgcaggtttagtttactcaatctccccttgcactaaagtatgtaaagtatgtaaacaggagacaggaaggtggtgcttacatccttaaaggcaccatctaatagcgggttactttcacatacagccctcccccagcagttgaatgacaacagaagcttcagaagtttggcaatagtttgcatagaggtaccagcaatatgtaaatagtgcagaatctcataggttgccaataatacactaattcctttctatcctacaacaagagtttatttccaaataaaatgaggacatgtttttgttttctttgaatgctttttgaatgttatttgttattttcagtattttggagaaattatttaataaaaaaacaatcatttgctttttgaatgctctctaaaagggaatgtaatattttaagatggtgtgtaacccggctggataaatttttggtgcctaagaaaactgcttgaatattcttatcaatgacagtgttaagtttcaaaaagagcttctaaaacgtagattatcattcctttatagaatgttatgtggttaaaaccagaaagcacatctcacacattaatctgattttcatcccaacaatcttggcgctcaaaaaatagaactcaatgagaaaaagaagattatgtgcacttcgttgtcaataataagtcaactgatgctcatcgacaactataggaggcttttcattaaatgggaaaagaagctgtgcccttttaggatacgtgggggaaaagaaagtcatcttaattatgtttaattgtggatttaagtgctatatggtggtgctgtttgaaagcagatttatttcctatgtatgtgttatctggccatcccaacccaaactgttgaagtttgtagtaacttcagtgagagttggttactcacaacaaatcctgaaaagtatttttagtgtttgtaggtattctgtgggatactatacaagcagaactgaggcacttaggacataacacttttggggtatatatatccaaatgcctaaaactatgggaggaaaccttggccaccccaaaaggaaaactaacatgatttgtgtctatgaagtgctggataattagcatgggatgagctctgggcatgccatgaaggaaagccacgctcccttcagaattcagaggcagggagcaattccagtttcacctaagtctcataattttagttcccttttaaaaaccctgaaaactacatcaccatggaatgaaaaatattgttatacaatacattgatctgtcaaacttccagaaccatggtagccttcagtgagatttccatcttggctggtcactccctgactgtagctgtaggtgaatgtgtttttgtgtgtgtgtgtctggttttagtgtcagaagggaaataaaagtgtaaggaggacactttaaaccctttgggtggagtttcgtaatttcccagactattttcaagcaacctggtccacccaggattagtgaccaggttttcaggaaaggatttgcttctctctagaaaatgtctgaaaggattttattttctgatgaaaggctgtatgaaaataccctcctcaaataacttgcttaactacatatagattcaagtgtgtcaatattctattttgtatattaaatgctatataatggggacaaatctatattatactgtgtatggcattattaagaagctttttcattattttttatcacagtaattttaaaatgtgtaaaaattaaaaccagtgactcctgtttaaaaataaaagttgtagttttttattcatgctgaataataatctgtagttaaaaaaaaagtgtctttttacctacgcagtgaaatgtcagactgtaaaaccttgtgtggaaatgtttaacttttattttttcatttaaatttgctgttctggtattaccaaaccacacatttgtaccgaattggcagtaaatgttagccatttacagcaatgccaaatatggagaaacatcataataaaaaaatctgctttttcatta

SEQ ID NO: 27187 - DNA, 6795 bp, Artificial Sequence
  derived and/or modified sequence
gtgcgcgccgtggcgccgcctccacccgctccccgctcggtcccgctcgctcgcccaggccgggctgccctttcgcgtgtccgcgctctcttccctccgccgccgcctcctccattttgcgagctcgtgtctgtgacgggagcccgagtcaccgcctgcccgtcggggacggattctgtgggtggaaggagacgccgcagccggagcggccgaagcagctgggaccgggacggggcacgcgcgcccggaacctcgacccgcggagcccggcgcggggcggagggctggcttgtcagctgggcaatgggagactttcttaaataggggctctccccccacccatggagaaaggggcggctgtttacttcctttttttagaaaaaaaaaatatatttccctcctgctccttctgcgttcacaagctaagttgtttatctcggctgcggcgggaactgcggacggtggcgggcgagcggctcctctgccagagttgatattcactgatggactccaaagaatcattaactcctggtagagaagaaaaccccagcagtgtgcttgctcaggagaggggagatgtgatggacttctataaaaccctaagaggaggagctactgtgaaggtttctgcgtcttcaccctcactggctgtcgcttctcaatcagactccaagcagcgaagacttttggttgattttccaaaaggctcagtaagcaatgcgcagcagccagatctgtccaaagcagtttcactctcaatgggactgtatatgggagagacagaaacaaaagtgatgggaaatgacctgggattcccacagcagggccaaatcagcctttcctcgggggaaacagacttaaagcttttggaagaaagcattgcaaacctcaataggtcgaccagtgttccagagaaccccaagagttcagcatccactgctgtgtctgctgcccccacagagaaggagtttccaaaaactcactctgatgtatcttcagaacagcaacatttgaagggccagactggcaccaacggtggcaatgtgaaattgtataccacagaccaaagcacctttgacattttgcaggatttggagttttcttctgggtccccaggtaaagagacgaatgagagtccttggagatcagacctgttgatagatgaaaactgtttgctttctcctctggcgggagaagacgattcattccttttggaaggaaactcgaatgaggactgcaagcctctcattttaccggacactaaacccaaaattaaggataatggagatctggttttgtcaagccccagtaatgtaacactgccccaagtgaaaacagaaaaagaagatttcatcgaactctgcacccctggggtaattaagcaagagaaactgggcacagtttactgtcaggcaagctttcctggagcaaatataattggtaataaaatgtctgccatttctgttcatggtgtgagtacctctggaggacagatgtaccactatgacatgaatacagcatccctttctcaacagcaggatcagaagcctatttttaatgtcattccaccaattcccgttggttccgaaaattggaataggtgccaaggatctggagatgacaacttgacttctctggggactctgaacttccctggtcgaacagttttttctaatggctattcaagccccagcatgagaccagatgtaagctctcctccatccagctcctcaacagcaacaacaggaccacctcccaaactctgcctggtgtgctctgatgaagcttcaggatgtcattatggagtcttaacttgtggaagctgtaaagttttcttcaaaagagcagtggaaggacagcacaattacctatgtgctggaaggaatgattgcatcatcgataaaattcgaagaaaaaactgcccagcatgccgctatcgaaaatgtcttcaggctggaatgaacctggaagctcgaaaaacaaagaaaaaaataaaaggaattcagcaggccactacaggagtctcacaagaaacctctgaaaatcctggtaacaaaacaatagttcctgcaacgttaccacaactcacccctaccctggtgtcactgttggaggttattgaacctgaagtgttatatgcaggatatgatagctctgttccagactcaacttggaggatcatgactacgctcaacatgttaggagggcggcaagtgattgcagcagtgaaatgggcaaaggcaataccaggtttcaggaacttacacctggatgaccaaatgaccctactgcagtactcctggatgtttcttatggcatttgctctggggtggagatcatatagacaatcaagtgcaaacctgctgtgttttgctcctgatctgattattaatgagcagagaatgactctaccctgcatgtacgaccaatgtaaacacatgctgtatgtttcctctgagttacacaggcttcaggtatcttatgaagagtatctctgtatgaaaaccttactgcttctctcttcagttcctaaggacggtctgaagagccaagagctatttgatgaaattagaatgacctacatcaaagagctaggaaaagccattgtcaagagggaaggaaactccagccagaactggcagcggttttatcaactgacaaaactcttggattctatgcatgaagtggttgaaaatctccttaactattgcttccaaacatttttggataagaccatgagtattgaattccccgagatgttagctgaaatcatcaccaatcagataccaaaatattcaaatggaaatatcaaaaaacttctgtttcatcaaaagtgactgccttaataagaatggttgccttaaagaaagtcgaattaatagcttttattgtataaactatcagtttgtcctgtagaggttttgttgttttattttttattgttttcatctgttgttttgttttaaatacgcactacatgtggtttatagagggccaagacttggcaacagaagcagttgagtcgtcatcacttttcagtgatgggagagtagatggtgaaatttattagttaatatatcccagaaattagaaaccttaatatgtggacgtaatctccacagtcaaagaaggatggcacctaaaccaccagtgcccaaagtctgtgtgatgaactttctcttcatactttttttcacagttggctggatgaaattttctagactttctgttggtgtatcccccccctgtatagttaggatagcatttttgatttatgcatggaaacctgaaaaaaagtttacaagtgtatatcagaaaagggaagttgtgccttttatagctattactgtctggttttaacaatttcctttatatttagtgaactacgcttgctcattttttcttacataattttttattcaagttattgtacagctgtttaagatgggcagctagttcgtagctttcccaaataaactctaaacattaatcaatcatctgtgtgaaaatgggttggtgcttctaacctgatggcacttagctatcagaagaccacaaaaattgactcaaatctccagtattcttgtcaaaaaaaaaaaaaaaaaagctcatattttgtatatatctgcttcagtggagaattatataggttgtgcaaattaacagtcctaactggtatagagcacctagtccagtgacctgctgggtaaactgtggatgatggttgcaaaagactaatttaaaaaataactaccaagaggccctgtctgtacctaacgccctatttttgcaatggctatatggcaagaaagctggtaaactatttgtctttcaggaccttttgaagtagtttgtataacttcttaaaagttgtgattccagataaccagctgtaacacagctgagagacttttaatcagacaaagtaattcctctcactaaactttacccaaaaactaaatctctaatatggcaaaaatggctagacacccattttcacattcccatctgtcaccaattggttaatctttcctgatggtacaggaaagctcagctactgatttttgtgatttagaactgtatgtcagacatccatgtttgtaaaactacacatccctaatgtgtgccatagagtttaacacaagtcctgtgaatttcttcactgttgaaaattattttaaacaaaatagaagctgtagtagccctttctgtgtgcaccttaccaactttctgtaaactcaaaacttaacatatttactaagccacaagaaatttgatttctattcaaggtggccaaattatttgtgtaatagaaaactgaaaatctaatattaaaaatatggaacttctaatatatttttatatttagttatagtttcagatatatatcatattggtattcactaatctgggaagggaagggctactgcagctttacatgcaatttattaaaatgattgtaaaatagcttgtatagtgtaaaataagaatgatttttagatgagattgttttatcatgacatgttatatattttttgtaggggtcaaagaaatgctgatggataacctatatgatttatagtttgtacatgcattcatacaggcagcgatggtctcagaaaccaaacagtttgctctaggggaagagggagatggagactggtcctgtgtgcagtgaaggttgctgaggctctgacccagtgagattacagaggaagttatcctctgcctcccattctgaccacccttctcattccaacagtgagtctgtcagcgcaggtttagtttactcaatctccccttgcactaaagtatgtaaagtatgtaaacaggagacaggaaggtggtgcttacatccttaaaggcaccatctaatagcgggttactttcacatacagccctcccccagcagttgaatgacaacagaagcttcagaagtttggcaatagtttgcatagaggtaccagcaatatgtaaatagtgcagaatctcataggttgccaataatacactaattcctttctatcctacaacaagagtttatttccaaataaaatgaggacatgtttttgttttctttgaatgctttttgaatgttatttgttattttcagtattttggagaaattatttaataaaaaaacaatcatttgctttttgaatgctctctaaaagggaatgtaatattttaagatggtgtgtaacccggctggataaatttttggtgcctaagaaaactgcttgaatattcttatcaatgacagtgttaagtttcaaaaagagcttctaaaacgtagattatcattcctttatagaatgttatgtggttaaaaccagaaagcacatctcacacattaatctgattttcatcccaacaatcttggcgctcaaaaaatagaactcaatgagaaaaagaagattatgtgcacttcgttgtcaataataagtcaactgatgctcatcgacaactataggaggcttttcattaaatgggaaaagaagctgtgcccttttaggatacgtgggggaaaagaaagtcatcttaattatgtttaattgtggatttaagtgctatatggtggtgctgtttgaaagcagatttatttcctatgtatgtgttatctggccatcccaacccaaactgttgaagtttgtagtaacttcagtgagagttggttactcacaacaaatcctgaaaagtatttttagtgtttgtaggtattctgtgggatactatacaagcagaactgaggcacttaggacataacacttttggggtatatatatccaaatgcctaaaactatgggaggaaaccttggccaccccaaaaggaaaactaacatgatttgtgtctatgaagtgctggataattagcatgggatgagctctgggcatgccatgaaggaaagccacgctcccttcagaattcagaggcagggagcaattccagtttcacctaagtctcataattttagttcccttttaaaaaccctgaaaactacatcaccatggaatgaaaaatattgttatacaatacattgatctgtcaaacttccagaaccatggtagccttcagtgagatttccatcttggctggtcactccctgactgtagctgtaggtgaatgtgtttttgtgtgtgtgtgtctggttttagtgtcagaagggaaataaaagtgtaaggaggacactttaaaccctttgggtggagtttcgtaatttcccagactattttcaagcaacctggtccacccaggattagtgaccaggttttcaggaaaggatttgcttctctctagaaaatgtctgaaaggattttattttctgatgaaaggctgtatgaaaataccctcctcaaataacttgcttaactacatatagattcaagtgtgtcaatattctattttgtatattaaatgctatataatggggacaaatctatattatactgtgtatggcattattaagaagctttttcattattttttatcacagtaattttaaaatgtgtaaaaattaaaaccagtgactcctgtttaaaaataaaagttgtagttttttattcatgctgaataataatctgtagttaaaaaaaaagtgtctttttacctacgcagtgaaatgtcagactgtaaaaccttgtgtggaaatgtttaacttttattttttcatttaaatttgctgttctggtattaccaaaccacacatttgtaccgaattggcagtaaatgttagccatttacagcaatgccaaatatggagaaacatcataataaaaaaatctgctttttcatta

SEQ ID NO: 27188 - DNA, 4591 bp, Artificial Sequence
  derived and/or modified sequence
ttgatattcactgatggactccaaagaatcattaactcctggtagagaagaaaaccccagcagtgtgcttgctcaggagaggggagatgtgatggacttctataaaaccctaagaggaggagctactgtgaaggtttctgcgtcttcaccctcactggctgtcgcttctcaatcagactccaagcagcgaagacttttggttgattttccaaaaggctcagtaagcaatgcgcagcagccagatctgtccaaagcagtttcactctcaatgggactgtatatgggagagacagaaacaaaagtgatgggaaatgacctgggattcccacagcagggccaaatcagcctttcctcgggggaaacagacttaaagcttttggaagaaagcattgcaaacctcaataggtcgaccagtgttccagagaaccccaagagttcagcatccactgctgtgtctgctgcccccacagagaaggagtttccaaaaactcactctgatgtatcttcagaacagcaacatttgaagggccagactggcaccaacggtggcaatgtgaaattgtataccacagaccaaagcacctttgacattttgcaggatttggagttttcttctgggtccccaggtaaagagacgaatgagagtccttggagatcagacctgttgatagatgaaaactgtttgctttctcctctggcgggagaagacgattcattccttttggaaggaaactcgaatgaggactgcaagcctctcattttaccggacactaaacccaaaattaaggataatggagatctggttttgtcaagccccagtaatgtaacactgccccaagtgaaaacagaaaaagaagatttcatcgaactctgcacccctggggtaattaagcaagagaaactgggcacagtttactgtcaggcaagctttcctggagcaaatataattgcatccctttctcaacagcaggatcagaagcctatttttaatgtcattccaccaattcccgttggttccgaaaattggaataggtgccaaggatctggagatgacaacttgacttctctggggactctgaacttccctggtcgaacagttttttctaatggctattcaagccccagcatgagaccagatgtaagctctcctccatccagctcctcaacagcaacaacaggaccacctcccaaactctgcctggtgtgctctgatgaagcttcaggatgtcattatggagtcttaacttgtggaagctgtaaagttttcttcaaaagagcagtggaaggacagcacaattacctatgtgctggaaggaatgattgcatcatcgataaaattcgaagaaaaaactgcccagcatgccgctatcgaaaatgtcttcaggctggaatgaacctggaagctcgaaaaacaaagaaaaaaataaaaggaattcagcaggccactacaggagtctcacaagaaacctctgaaaatcctggtaacaaaacaatagttcctgcaacgttaccacaactcacccctaccctggtgtcactgttggaggttattgaacctgaagtgttatatgcaggatatgatagctctgttccagactcaacttggaggatcatgactacgctcaacatgttaggagggcggcaagtgattgcagcagtgaaatgggcaaaggcaataccaggtttcaggaacttacacctggatgaccaaatgaccctactgcagtactcctggatgtttcttatggcatttgctctggggtggagatcatatagacaatcaagtgcaaacctgctgtgttttgctcctgatctgattattaatgagcagagaatgactctaccctgcatgtacgaccaatgtaaacacatgctgtatgtttcctctgagttacacaggcttcaggtatcttatgaagagtatctctgtatgaaaaccttactgcttctctcttcagttcctaaggacggtctgaagagccaagagctatttgatgaaattagaatgacctacatcaaagagctaggaaaagccattgtcaagagggaaggaaactccagccagaactggcagcggttttatcaactgacaaaactcttggattctatgcatgaagtggttgaaaatctccttaactattgcttccaaacatttttggataagaccatgagtattgaattccccgagatgttagctgaaatcatcaccaatcagataccaaaatattcaaatggaaatatcaaaaaacttctgtttcatcaaaagtgactgccttaataagaatggttgccttaaagaaagtcgaattaatagcttttattgtataaactatcagtttgtcctgtagaggttttgttgttttattttttattgttttcatctgttgttttgttttaaatacgcactacatgtggtttatagagggccaagacttggcaacagaagcagttgagtcgtcatcacttttcagtgatgggagagtagatggtgaaatttattagttaatatatcccagaaattagaaaccttaatatgtggacgtaatctccacagtcaaagaaggatggcacctaaaccaccagtgcccaaagtctgtgtgatgaactttctcttcatactttttttcacagttggctggatgaaattttctagactttctgttggtgtatcccccccctgtatagttaggatagcatttttgatttatgcatggaaacctgaaaaaaagtttacaagtgtatatcagaaaagggaagttgtgccttttatagctattactgtctggttttaacaatttcctttatatttagtgaactacgcttgctcattttttcttacataattttttattcaagttattgtacagctgtttaagatgggcagctagttcgtagctttcccaaataaactctaaacattaatcaatcatctgtgtgaaaatgggttggtgcttctaacctgatggcacttagctatcagaagaccacaaaaattgactcaaatctccagtattcttgtcaaaaaaaaaaaaaaaaaagctcatattttgtatatatctgcttcagtggagaattatataggttgtgcaaattaacagtcctaactggtatagagcacctagtccagtgacctgctgggtaaactgtggatgatggttgcaaaagactaatttaaaaaataactaccaagaggccctgtctgtacctaacgccctatttttgcaatggctatatggcaagaaagctggtaaactatttgtctttcaggaccttttgaagtagtttgtataacttcttaaaagttgtgattccagataaccagctgtaacacagctgagagacttttaatcagacaaagtaattcctctcactaaactttacccaaaaactaaatctctaatatggcaaaaatggctagacacccattttcacattcccatctgtcaccaattggttaatctttcctgatggtacaggaaagctcagctactgatttttgtgatttagaactgtatgtcagacatccatgtttgtaaaactacacatccctaatgtgtgccatagagtttaacacaagtcctgtgaatttcttcactgttgaaaattattttaaacaaaatagaagctgtagtagccctttctgtgtgcaccttaccaactttctgtaaactcaaaacttaacatatttactaagccacaagaaatttgatttctattcaaggtggccaaattatttgtgtaatagaaaactgaaaatctaatattaaaaatatggaacttctaatatatttttatatttagttatagtttcagatatatatcatattggtattcactaatctgggaagggaagggctactgcagctttacatgcaatttattaaaatgattgtaaaatagcttgtatagtgtaaaataagaatgatttttagatgagattgttttatcatgacatgttatatattttttgtaggggtcaaagaaatgctgatggataacctatatgatttatagtttgtacatgcattcatacaggcagcgatggtctcagaaaccaaacagtttgctctaggggaagagggagatggagactggtcctgtgtgcagtgaaggttgctgaggctctgacccagtgagattacagaggaagttatcctctgcctcccattctgaccacccttctcattccaacagtgagtctgtcagcgcaggtttagtttactcaatctccccttgcactaaagtatgtaaagtatgtaaacaggagacaggaaggtggtgcttacatccttaaaggcaccatctaatagcgggttactttcacatacagccctcccccagcagttgaatgacaacagaagcttcagaagtttggcaatagtttgcatagaggtaccagcaatatgtaaatagtgcagaatctcataggttgccaataatacactaattcctttctatcctacaacaagagtttatttccaaataaaatgaggacatgtttttgttttctttgaatgctttttgaatgttatttgttattttcagtattttggagaaattatttaataaaaaaacaatcatttgctttttg

SEQ ID NO: 27189 - DNA, 2594 bp, Artificial Sequence
  derived and/or modified sequence
gcagactcggggaagagggtgggggacggtcggggcgcgggggagggtgggttctgctttgcaacttctctcccagtgcgagagcgcggcggcggcagctgaagacccggccgcccagatgatgcggtggtgggggacctgccggcacgcgactccccccgggcccaaattgatattcactgatggactccaaagaatcattaactcctggtagagaagaaaaccccagcagtgtgcttgctcaggagaggggagatgtgatggacttctataaaaccctaagaggaggagctactgtgaaggtttctgcgtcttcaccctcactggctgtcgcttctcaatcagactccaagcagcgaagacttttggttgattttccaaaaggctcagtaagcaatgcgcagcagccagatctgtccaaagcagtttcactctcaatgggactgtatatgggagagacagaaacaaaagtgatgggaaatgacctgggattcccacagcagggccaaatcagcctttcctcgggggaaacagacttaaagcttttggaagaaagcattgcaaacctcaataggtcgaccagtgttccagagaaccccaagagttcagcatccactgctgtgtctgctgcccccacagagaaggagtttccaaaaactcactctgatgtatcttcagaacagcaacatttgaagggccagactggcaccaacggtggcaatgtgaaattgtataccacagaccaaagcacctttgacattttgcaggatttggagttttcttctgggtccccaggtaaagagacgaatgagagtccttggagatcagacctgttgatagatgaaaactgtttgctttctcctctggcgggagaagacgattcattccttttggaaggaaactcgaatgaggactgcaagcctctcattttaccggacactaaacccaaaattaaggataatggagatctggttttgtcaagccccagtaatgtaacactgccccaagtgaaaacagaaaaagaagatttcatcgaactctgcacccctggggtaattaagcaagagaaactgggcacagtttactgtcaggcaagctttcctggagcaaatataattggtaataaaatgtctgccatttctgttcatggtgtgagtacctctggaggacagatgtaccactatgacatgaatacagcatccctttctcaacagcaggatcagaagcctatttttaatgtcattccaccaattcccgttggttccgaaaattggaataggtgccaaggatctggagatgacaacttgacttctctggggactctgaacttccctggtcgaacagttttttctaatggctattcaagccccagcatgagaccagatgtaagctctcctccatccagctcctcaacagcaacaacaggaccacctcccaaactctgcctggtgtgctctgatgaagcttcaggatgtcattatggagtcttaacttgtggaagctgtaaagttttcttcaaaagagcagtggaaggacagcacaattacctatgtgctggaaggaatgattgcatcatcgataaaattcgaagaaaaaactgcccagcatgccgctatcgaaaatgtcttcaggctggaatgaacctggaagctcgaaaaacaaagaaaaaaataaaaggaattcagcaggccactacaggagtctcacaagaaacctctgaaaatcctggtaacaaaacaatagttcctgcaacgttaccacaactcacccctaccctggtgtcactgttggaggttattgaacctgaagtgttatatgcaggatatgatagctctgttccagactcaacttggaggatcatgactacgctcaacatgttaggagggcggcaagtgattgcagcagtgaaatgggcaaaggcaataccaggtttcaggaacttacacctggatgaccaaatgaccctactgcagtactcctggatgtttcttatggcatttgctctggggtggagatcatatagacaatcaagtgcaaacctgctgtgttttgctcctgatctgattattaatgagcagagaatgactctaccctgcatgtacgaccaatgtaaacacatgctgtatgtttcctctgagttacacaggcttcaggtatcttatgaagagtatctctgtatgaaaaccttactgcttctctcttcagttcctaaggacggtctgaagagccaagagctatttgatgaaattagaatgacctacatcaaagagctaggaaaagccattgtcaagagggaaggaaactccagccagaactggcagcggttttatcaactgacaaaactcttggattctatgcatgaagtggttgaaaatctccttaactattgcttccaaacatttttggataagaccatgagtattgaattccccgagatgttagctgaaatcatcaccaatcagataccaaaatattcaaatggaaatatcaaaaaacttctgtttcatcaaaagtgactgccttaataagaatggttgccttaaagaaagtcgaattaatagcttttattgtataaactatcagtttgtcctgta

SEQ ID NO: 27190 - DNA, 2334 bp, Artificial Sequence
  derived and/or modified sequence
atggattccaaggagtcactgacccctggccgagaggagaacccttcctcagtcctcgctcaggagcggggagacgtaatggatttctataaaaccctccggggtggtgccactgtaaaagtctctgcatcgtcgccctccctggcagttgcgtcccagtccgactccaaacagcggaggctattagtggacttcccaaaaggatccgtttccaatgcccagcagcctgatctgtccaaggccgtgtcattatctatgggactttatatgggagagaccgagactaaagtcatgggcaacgacctggggttccctcagcagggtcaaatctcactttccagcggtgagacagatctgaagttgttggaagaatcaattgccaacctcaacaggtcgacaagcgtccccgagaatccaaagtcttcagcgtccacagccgtgagtgccgctccgaccgaaaaggagttcccaaagacccacagtgatgtgagttccgaacagcagcacctgaaaggtcagaccggcaccaatggtggaaacgtgaagctgtacaccaccgaccagtccacctttgatatcttgcaagacttagagttttcgtcagggtcgccaggcaaggagacaaacgaatccccctggcggagtgatctactgatcgacgagaattgcctgttgagtccgttggctggggaagatgactccttcttattggagggcaattccaatgaagattgcaaacctcttattctgcctgataccaagcccaaaataaaggacaacggggacttagttttgagctccccaagcaatgttacccttcctcaggtcaaaacggaaaaggaggattttatcgagctttgcactcccggtgttatcaagcaggaaaaattgggcacagtgtattgtcaggccagctttcccggagcaaatataattggtaataagatgagcgccatttctgtccacggggtgagcaccagcggaggacagatgtatcactacgatatgaatacggcctcgctgtcacagcagcaggaccagaagcctatttttaatgtgatccctccaatccctgttggctccgagaattggaatcggtgtcagggttctggggacgacaatctgaccagcctgggcacactgaactttccaggccgaactgtgttctcaaatgggtatagttcaccttccatgcgccctgatgtaagtagtcctccgtccagttcttctaccgctactaccggacctcctcctaagctgtgtctggtatgctccgatgaggcctctggatgccactacggagtgctcacctgtgggagctgtaaggtgttctttaaacgggcagtggaaggccagcacaattatttgtgcgcgggtcgaaacgactgtattatagacaaaattcggagaaagaactgtccggcatgtagataccgcaagtgcttacaggctggaatgaatctggaggcccgtaagacaaaaaaaaagattaaaggcatccagcaggctactaccggagtttctcaggaaacttctgaaaaccccggaaataagacgattgtccccgcaacactcccccagttgacgccaactctcgtcagccttctcgaggtcatcgaacctgaggtgctgtacgccggttatgacagtagcgtgcccgactcaacttggaggattatgactactctcaatatgctcggtggcaggcaggtcattgcagccgtcaagtgggccaaggccatcccgggatttcgcaacttgcatctggatgatcaaatgacactgctccaatacagctggatgtttcttatggctttcgcactcggctggaggagctaccgtcaatctagcgccaatctgctgtgcttcgcgcctgacctgatcattaacgagcagcgaatgacccttccttgtatgtatgaccaatgtaaacacatgttatatgtcagctctgagttgcatcggctgcaggtatcctatgaagagtacttatgtatgaaaactctactcttgctgagctccgtaccaaaagacggactgaaaagtcaagagctgtttgacgagattcgaatgacctatattaaggagcttggcaaggcgattgttaagcgggagggcaatagctcgcagaactggcaacgtttctaccaactgacaaagttactggacagcatgcatgaagttgtggaaaaccttttaaattactgcttccagacgtttctggataagaccatgtctatagagttcccagaaatgctggcagagattatcacaaatcagatccccaaatactctaacggcaacattaaaaagttattattccatcaaaaatag

SEQ ID NO: 27191 - DNA, 2334 bp, Artificial Sequence
  derived and/or modified sequence
atggactccaaagaatcattgaccccaggacgcgaggaaaatccaagctccgtgctcgcccaagaaaggggagatgtcatggacttctacaagacccttcgtggcggtgcaaccgtgaaggtttccgctagcagtccctctctggcagtagccagtcagagcgattcaaaacaacgcagactgcttgtagatttccccaaaggaagtgttagcaatgcgcagcagcccgatctgagtaaggcagtgtctctgagcatgggactctacatgggtgaaaccgagaccaaggtgatgggcaacgacctcggttttccccaacagggtcagatctccctgtccagcggagagacggatttaaaattgttggaggagtctatcgcaaacctgaataggtctacctcggtcccggagaacccgaagtcatccgcttcgaccgccgtcagcgccgcacctactgaaaaggaatttcccaagacacattccgacgtgagcagtgagcagcaacacctcaaagggcagaccggcactaatggagggaatgtgaaactgtacaccactgatcagtccacctttgacattcttcaggatctcgagtttagcagcgggtctcccggtaaagagactaacgaatccccatggcgatccgacctactgattgacgagaattgtctcttgtcaccactggcgggtgaagatgactcattcctgttagaagggaacagtaatgaagactgtaaacctcttatcctgcctgacaccaaacctaagatcaaggacaacggtgatctcgtactgagctcacccagtaacgtcactctcccccaagtcaaaacagaaaaagaggactttattgaactgtgcaccccgggtgtgataaagcaggaaaaactgggaactgtgtattgccaggcatcattcccgggagctaacatcatcggcaataagatgagtgccatttccgtacatggggtgagcacatcaggcggtcagatgtatcattatgacatgaataccgcctcactctctcagcagcaagaccagaaaccaattttcaatgtgatcccacctattcctgtgggttctgaaaactggaaccgctgccagggcagtggcgatgataatctcacctccctgggcacgctgaactttccgggtcgcactgtgttctccaatggttattcttcaccaagcatgaggccagacgttagtagtcccccatcctcatcgagcacagccacaacagggccacctcccaaactgtgtttggtgtgctcagacgaggcctccgggtgtcattatggagtgctgacatgtggcagctgtaaggtatttttcaagcgggctgtcgaaggacagcataattacctgtgcgcgggacgtaatgactgcatcattgataagatcaggcgcaaaaactgccccgcttgccgctaccgtaaatgcttgcaggccggaatgaatctggaagccagaaagacgaagaagaagatcaagggtatccagcaagctactactggcgtgtctcaggaaacaagcgaaaacccagggaataaaactattgtacctgctaccctccctcagttgacccctaccctggtaagcctcttagaagtgatcgaacccgaagtgctgtacgcagggtatgatagctccgttcctgattccacatggcggattatgacgacattgaacatgctgggcggacgccaggtgatcgcggcagtgaagtgggccaaagcaatccccggatttcgtaacctgcacctcgatgaccagatgaccctcttacaatacagttggatgtttctcatggcatttgctttagggtggcggtcttaccgtcaaagttcggccaacctgctctgtttcgctcctgatctgattattaatgaacagcggatgactctgccgtgtatgtatgatcagtgcaaacacatgctgtacgtaagtagcgagctccacaggcttcaggttagttacgaggagtatctatgcatgaagacgttactactactctcttcagtgcccaaggacgggctgaagagccaggagctgttcgacgaaatcaggatgacttacattaaggagcttggaaaagctattgtaaaacgtgaaggaaattccagccagaattggcaacgattctaccagctcaccaaactgctcgattcaatgcacgaggttgtcgagaatttgctgaactattgttttcaaacgtttctcgataaaacgatgtccatagagttcccagagatgttagcggagatcattacaaaccagatacccaaatattcaaatgggaacattaagaaattactttttcaccagaaatag

SEQ ID NO: 27192 - DNA, 2256 bp, Artificial Sequence
  derived and/or modified sequence
atggacagcaaggaatcgctcacgcccggtcgagaagagaatccgagtagcgttctcgcacaggaaaggggagacgtcatggacttttacaagactctccggggaggcgcaactgtgaaagtatcggcatcttccccgtccctagcagtggcatcacaaagcgatagcaaacagcggcgtctcctggttgactttcccaaggggtctgtgtccaatgcccagcaaccagacctatccaaggcagtcagtctgagcatggggctgtacatgggcgagacagagactaaagttatgggcaatgaccttggattcccgcagcagggccagatctccctatctagtggagagacggaccttaaactgctagaggagtctatagccaacctgaaccgatctactagcgttcccgaaaatccaaagtcttctgcatccaccgcggttagcgctgctcccactgagaaggagttccccaaaacacactctgacgtgtcgagtgaacaacaacatcttaagggccagaccggcacaaacgggggaaatgtaaaactgtacacgaccgatcagtcaacatttgatattctccaggacttggaattttctagcggcagccctgggaaggaaactaatgagagcccttggcgcagcgacctgctgatcgacgagaactgcctgctgtcacccctggccggtgaagatgactcttttctccttgaaggcaacagcaatgaggactgtaagcccctgatcctcccagacacaaagccgaagatcaaagataatggggatctggtcctttcatcgccgagcaatgttaccctcccacaggtgaagaccgagaaagaggacttcatagaactgtgcacacctggcgttatcaagcaagaaaaactcggcactgtgtactgccaagcatcgttccccggagccaacattatcgcaagcctctcacaacagcaggaccagaagccaatttttaacgtcatacctccaattcctgtagggagcgaaaattggaatcgctgccaggggtcaggcgatgataacctgacttccctgggcacactcaatttccctggcagaaccgtgttctccaacggatactcaagtcctagtatgagaccagacgtgagtagtccaccctcctcctctagcaccgcaactactgggcctccgcctaaactttgcctagtgtgttcggacgaggctagcggctgtcactacggggtcctgacttgcggttcttgtaaagtcttttttaagcgggctgtggagggccagcacaattacctctgcgctggcagaaacgattgcataattgacaagattcgaagaaagaattgtccggcttgtcgttacaggaagtgtctgcaggccggtatgaaccttgaggctcgtaagacaaagaaaaagataaagggcatccagcaagccacgactggcgtctctcaagaaacttccgagaatcctggcaacaagaccattgtgcccgctacattgccgcagctgactcccaccctggtgagcctgttggaggtgatagaaccagaagtactgtatgctgggtatgatagtagcgtgcccgactcaacctggcgaattatgacaaccctcaacatgctaggtggtcgtcaagtgatagcggctgttaagtgggcaaaggccatccctggcttccggaacttgcacctggacgatcaaatgaccctgctccaatactcctggatgtttctgatggcatttgctctgggttggaggagttaccgccagtctagcgccaacctcttatgcttcgcaccagacctcatcataaatgaacagcggatgacactgccctgtatgtacgaccaatgtaaacacatgctgtatgtgtctagtgagttgcaccggttgcaggtgagctatgaggagtacctctgcatgaaaacactgctgcttctctcttccgttcctaaggatggacttaaatctcaggagctcttcgatgagattcgcatgacttatatcaaggagctaggaaaggcgattgtgaagcgtgaaggcaactccagtcagaattggcagcggttttaccaactgacaaagctcctcgactcaatgcacgaagtcgtggaaaatctactgaactattgttttcaaacgtttttggacaagactatgtcgattgaatttcccgagatgctggccgaaattatcaccaatcaaatcccgaaatatagtaacgggaatattaagaaactgctttttcaccagaagtag

SEQ ID NO: 27193 - DNA, 2334 bp, Artificial Sequence
  derived and/or modified sequence
atggacagtaaggagagcctgactcccggtagggaagaaaacccctcctctgtactagcacaagagcggggagacgtaatggatttctataagaccctacgcggaggcgctacagtcaaggtctccgcctctagtccaagcctggcagtagcgtctcaatcagacagtaagcagagacgtctacttgtggatttccccaaggggagtgtgtcaaatgctcagcaacccgacctgagtaaagcagtgagcctctctatgggactgtacatgggagaaaccgagactaaggtgatgggaaatgaccttgggtttcctcagcagggtcaaatctccttaagttcaggagaaacagatctgaagttattggaggagtccattgccaatctgaaccgcagcacaagcgtacctgaaaatcccaagagttctgccagtactgcagtgtccgccgctccaaccgaaaaggagttcccgaaaactcatagcgatgtctcaagtgagcagcaacacctaaaggggcagacaggaactaatgggggtaatgtgaagctgtatactacagatcagtctaccttcgatatcctccaagatcttgagttctcatccgggtccccgggtaaagaaactaacgagagcccttggcggagtgatcttttgatcgatgagaactgtctgctgtcgccgttggccggtgaggacgacagctttttattggaagggaatagcaacgaggactgtaaaccactaattctgcctgacactaaacccaagattaaggataatggggacttggtgctgagcagccctagcaatgtgaccctgccccaggttaagaccgaaaaggaggattttattgagctgtgcactcctggagtgatcaagcaggaaaagctcggcaccgtttattgtcaggcctcttttcctggcgctaacatcatcggtaataaaatgagcgcaatctctgtgcatggggtatcaacaagcgggggtcagatgtatcattatgacatgaacactgcctccctttcgcaacaacaggaccagaagccaatctttaacgttatccctcccattcccgtggggtctgagaattggaatcgctgtcaaggctctggagacgacaacctgacttcactgggcactctgaatttccccggacggaccgtcttttctaacggctacagtagtcccagtatgaggcctgacgtctccagtcccccaagctcttcatcaaccgcaaccacaggacctcctccgaagctttgcttagtctgtagtgatgaggcttcaggctgccactatggggtgttgacctgcgggagctgcaaagtgttttttaagcgcgcagtcgaaggccagcacaactatctctgcgctggccgtaacgattgtattattgataagatacggagaaaaaactgcccagcctgccggtaccgcaaatgtctgcaagccggaatgaaccttgaggccagaaagacaaaaaagaaaattaaagggattcaacaggctaccaccggggtatcccaggagaccagcgagaatccgggaaataagacaatagtgccggctactttgccacagcttacacctaccctcgttagcctcttagaggtcattgagcctgaggttctttacgccggttatgatagctcggtgcctgattccacctggaggattatgactacattaaatatgttgggtgggaggcaggttattgcagctgttaagtgggccaaggcaatccccggatttcgaaatctgcacctggatgaccagatgactctcctacagtactcatggatgttccttatggccttcgcactgggctggagatcctataggcaatcgtctgccaatctactgtgttttgctccagacctgatcattaacgagcagcggatgaccttaccttgtatgtatgatcagtgcaagcacatgctctatgttagcagtgaactgcacaggcttcaggtgtcttatgaggagtacctatgcatgaaaactcttctcctgctgtcctcggtccctaaggacgggctaaagtcacaggagctgtttgacgaaatcaggatgacctacataaaggaactgggcaaagccatcgtgaagagagaaggaaatagctcccagaactggcaaagattctatcagttgacaaagctcctggactccatgcatgaagtcgtagagaacctgttgaattactgtttccaaacatttctggacaagaccatgtctatcgaatttcctgaaatgctcgccgaaattattaccaaccagatccctaaatattctaacgggaacatcaaaaagctgctgtttcaccaaaagtag

SEQ ID NO: 27194 - protein, 24 aa, Artificial Sequence
  derived and/or modified sequence
VPGCAHHADSLYTYPVATQCHCGK

SEQ ID NO: 27195 - protein, 129 aa, Artificial Sequence
  derived and/or modified sequence
MKTLQFFFLFCCWKAICCNSCELTNITIAIEKEECRFCISINTTWCAGYCYTRDLVYKDPARPKIQKTCTFKELVYETVRVPGCAHHADSLYTYPVATQCHCGKCDSDSTDCTVRGLGPSYCSFGEMKE

SEQ ID NO: 27196 - DNA, 387 bp, Artificial Sequence
  derived and/or modified sequence
atgaagacactgcaatttttctttctcttttgctgttggaaagccatttgctgcaacagctgcgagttgacgaacatcactattgctattgagaaggaagagtgtcgattctgtatctcgatcaataccacatggtgcgctggctattgctacaccagggatctagtgtacaaggatccggcccgcccgaaaatccagaagacgtgcacctttaaagaattggtgtatgagaccgttcgtgtgcctggctgcgcccatcatgccgactcactgtacacttaccctgttgctactcagtgccattgtggtaaatgtgacagcgatagcacagattgcacagtgcgcggtctgggacccagctattgctcgtttggagagatgaaggaa

SEQ ID NO: 27197 - DNA, 387 bp, Artificial Sequence
  derived and/or modified sequence
atgaaaacactccagtttttctttctgttctgctgctggaaggccatctgttgtaactcgtgcgaactcaccaatatcacgattgctatcgagaaagaggagtgcaggttctgcatctcgatcaacactacatggtgcgctggatactgctatacccgcgaccttgtttacaaggatccagcacggcccaaaatccaaaaaacctgcacgttcaaggaactggtgtatgagacagtccgtgtacccggttgcgcccatcatgctgattcactttacacttatcctgtagcgacacagtgtcattgtgggaaatgtgactctgatagcacagactgtactgtccgtggccttggaccgtcttattgcagttttggcgagatgaaagag

SEQ ID NO: 27198 - DNA, 387 bp, Artificial Sequence
  derived and/or modified sequence
atgaaaactctgcagttctttttcctattctgctgctggaaggcaatctgctgcaactcctgcgaactgaccaatatcaccatcgccatcgaaaaggaggaatgtagattttgcatcagcatcaacactacttggtgcgccgggtactgctacactagagatttagtgtacaaggatcccgccaggccaaagatccaaaaaacgtgcactttcaaggagttggtatatgagactgttcgggttccaggctgcgcacaccacgcagattccctgtatacttaccccgtggcaactcagtgccattgcgggaaatgcgacagcgatagtacagattgcacagtgcgcggcctcggcccttcttactgctcttttggagagatgaaagaa

SEQ ID NO: 27199 - DNA, 387 bp, Artificial Sequence
  derived and/or modified sequence
atgaagacgctgcagttcttcttccttttctgttgctggaaggccatctgctgcaactcatgcgagctgaccaacattaccatcgcaatcgaaaaggaggagtgtcggttttgcatttctatcaataccacgtggtgcgctggctattgctatacgcgtgatctggtatacaaggatccggcccgtcctaagattcagaagacatgcaccttcaaggagctggtctatgagacagtgcgtgtccctggttgcgcgcaccatgcggatagtctctacacctaccccgtggctacgcaatgccactgtggcaagtgcgatagcgacagtaccgactgcaccgtccgcggccttggcccgtcgtactgttcctttggcgagatgaaagaa

SEQ ID NO: 27200 - DNA, 387 bp, Artificial Sequence
  derived and/or modified sequence
atgaagacgttgcagttctttttcttattctgctgttggaaggccatctgctgtaactcctgtgagttgaccaacatcacaatcgccatcgagaaggaggaatgccgattctgtattagcattaatactacctggtgtgcaggatattgttacactagagacctggtgtataaagatcctgctagacctaagattcagaagacttgcactttcaaagaattagtgtatgaaaccgtgagagtgcccgggtgcgcccaccacgccgatagtctgtatacataccccgtcgcgacacagtgtcattgtggcaaatgtgactcagattccacagactgtaccgtgagaggcctcggcccgtcttattgctccttcggagagatgaaagag

SEQ ID NO: 27201 - DNA, 387 bp, Artificial Sequence
  derived and/or modified sequence
atgaaaacgctccagtttttctttctgttttgttgttggaaagcaatttgctgtaacagctgtgagctgacgaatatcaccatcgccattgaaaaggaagaatgtcgcttctgtatctcaataaacactacctggtgtgcaggttactgctacaccagggaccttgtgtataaggacccggccagacccaagattcaaaagacctgcaccttcaaagaacttgtttacgaaacggtaagagtccctggctgtgctcatcacgcagattccctttacacctacccagtggcgacccaatgccattgtggcaagtgcgattcagacagtactgattgtactgtgcgtggactggggccttcgtactgcagctttggagagatgaaagag

SEQ ID NO: 27202 - DNA, 387 bp, Artificial Sequence
  derived and/or modified sequence
atgaagactcttcagttcttcttcttattctgctgttggaaggccatttgctgcaactcatgtgagctaactaacatcacaattgccatagagaaggaagaatgtaggttttgcatttccatcaacactacgtggtgcgcagggtactgctacacaagggaccttgtttataaagacccggctcgacctaagattcaaaaaacctgcacctttaaggagttggtttacgagacagtacgagttcctgggtgtgcacaccatgctgactcgctttatacatatcctgtcgccactcaatgtcactgcggtaaatgtgactcagactcaacagattgtactgttcgaggactaggtccttcatattgtagttttggcgaaatgaaggaa

SEQ ID NO: 27203 - DNA, 387 bp, Artificial Sequence
  derived and/or modified sequence
atgaaaactctgcagttcttcttcctcttttgctgctggaaggcgatctgttgtaattcgtgtgagctcaccaacatcaccatagccattgaaaaagaagaatgtcggttctgcatctcaatcaacaccacttggtgtgccggatactgttacactagagatctggtttacaaggatcccgcgcgcccgaagatccaaaagacgtgcactttcaaggaacttgtgtacgagacggtgcgcgtgccaggatgcgcacaccatgccgattcgctgtacacctacccggtggctactcagtgtcactgcgggaaatgtgacagcgactcgactgactgtaccgtgaggggattggggccgtcgtactgctctttcggagaaatgaaggag

SEQ ID NO: 27204 - DNA, 387 bp, Artificial Sequence
  derived and/or modified sequence
atgaaaaccttgcagttcttcttcctcttctgttgttggaaagcgatttgctgtaatagctgcgagctcaccaacatcaccatcgctatagaaaaagaggaatgccgcttttgcatcagcatcaacaccacctggtgcgcgggttactgctacactcgcgacctcgtctacaaggatcctgcccggccaaagatccaaaagacgtgcacgtttaaagaacttgtgtacgagacggtcagagtccctggatgcgcccaccatgctgactctctgtacacttacccggtggccactcagtgccactgcgggaagtgcgattcggattccacggactgtactgtgaggggcctgggaccatcgtattgctctttcggcgagatgaaagaa

SEQ ID NO: 27205 - DNA, 387 bp, Artificial Sequence
  derived and/or modified sequence
atgaaaactctgcaattcttctttttgttttgctgttggaaggccatctgttgcaattcatgcgaactcaccaatatcactattgctatcgaaaaggaggaatgcagattctgcatctccatcaacactacctggtgcgccggatattgctacacgagagatctcgtgtacaaagaccccgctagaccaaagatccaaaagacttgtacgttcaaagagctggtgtacgagactgtccgcgtgcctggctgcgctcaccatgcagacagcttgtacacctatccggtcgctacccagtgtcactgcggaaagtgcgattcggactcaaccgactgcaccgtgcgcggccttgggcctagctattgtagctttggagagatgaaggaa

SEQ ID NO: 27206 - DNA, 387 bp, Artificial Sequence
  derived and/or modified sequence
atgaagacgctgcagttcttcttcttgttctgttgttggaaagctatctgctgtaactcgtgcgaacttaccaatatcaccattgcaatcgagaaagaagagtgcagattttgtatatcaataaacactacatggtgtgcgggttattgttacactcgagatctggtttacaaagatccggcacggcctaagatccagaagacgtgcaccttcaaggaactggtgtatgaaacagtgagggtgcccggatgcgcccaccatgccgattcgttgtatacataccctgttgcaactcagtgtcactgcgggaagtgcgactctgactctactgattgcacagttcgtggcctcggacccagttactgttctttcggcgagatgaaagag

SEQ ID NO: 27207 - DNA, 387 bp, Artificial Sequence
  derived and/or modified sequence
atgaagaccctacagtttttcttcttattttgctgttggaaggctatctgttgcaatagctgtgagctcaccaatatcaccatagcgatcgagaaggaggaatgccggttctgtatttctattaacaccacctggtgcgctggttactgctatactagggacctggtttataaagatccagcccgccccaagatacaaaagacatgcactttcaaggagcttgtgtacgaaaccgtacgtgtccctggatgcgctcatcacgccgacagtctgtacacctatcccgtggccacccagtgccactgcggaaagtgtgatagtgattcaaccgactgcacggtgagaggacttggacccagttattgcagctttggtgagatgaaggaa

SEQ ID NO: 27208 - DNA, 387 bp, Artificial Sequence
  derived and/or modified sequence
atgaagacccttcagtttttttttctcttctgttgctggaaggccatctgctgtaatagctgcgagctgactaatatcaccatcgccatcgaaaaagaagagtgcaggttctgcatttccataaacactacatggtgtgccggctattgctacactcgcgatctggtgtataaggatccggccagacccaaaattcagaagacttgtacgttcaaagagctcgtgtacgaaaccgtgcgagtgcctggctgcgctcatcatgctgattctttgtatacctaccctgtagcgacccaatgtcactgtggcaaatgtgacagtgatagcaccgactgtaccgtgcgaggactgggtccgtcatactgttcattcggcgaaatgaaggag

SEQ ID NO: 27209 - DNA, 387 bp, Artificial Sequence
  derived and/or modified sequence
atgaagaccctgcaattcttcttcctcttctgctgttggaaagcaatctgctgtaattcatgcgaactgacaaacataacaattgcaatcgaaaaagaagagtgtcggttttgcatcagcatcaacacaacttggtgcgcaggctactgttacacacgggatctggtgtataaggaccctgcccggcccaagatccagaagacttgtacctttaaagaacttgtctacgagacagtgcgagtcccggggtgcgcacaccacgcggattccctttacacctatccggtggcgacccagtgtcactgtgggaagtgcgattccgatagcacagactgcacggttagaggcctcggtccaagctattgcagtttcggtgagatgaaggag

SEQ ID NO: 27210 - DNA, 387 bp, Artificial Sequence
  derived and/or modified sequence
atgaaaacgcttcagttcttttttctcttctgctgctggaaagccatctgctgcaactcctgcgagctgaccaatatcaccatcgccatcgagaaggaagaatgtagattctgcatctcgatcaacactacctggtgcgccggttactgttacacgcgcgacctggtgtacaaagacccggcaagaccgaagatccaaaagacctgcaccttcaaggagttggtctacgaaactgtgcgggtcccaggatgtgcccaccatgccgactcattgtacacctaccccgttgccacccagtgtcattgcggaaagtgcgactcggactccaccgattgtacggtgagaggactcgggccctcttactgctccttcggagagatgaaagaa

SEQ ID NO: 27211 - DNA, 387 bp, Artificial Sequence
  derived and/or modified sequence
atgaagactcttcagttttttttcctgttctgctgttggaaggccatctgttgcaactcttgcgaacttacaaatatcacgattgctattgagaaggaggagtgccgcttttgtatatcaatcaacacaacttggtgcgctggatattgctacacgcgggatctggtctacaaggaccctgcccgcccaaagatccagaagacttgtactttcaaggagctagtgtacgagacagtgcgtgtccccgggtgtgcccaccacgcagattctctgtatacgtatccagtcgcaacccagtgtcactgcggtaaatgcgatagcgacagtacggactgcacagtgcgcggccttggtccatcttattgctctttcggcgagatgaaggaa

SEQ ID NO: 27212 - DNA, 387 bp, Artificial Sequence
  derived and/or modified sequence
atgaagacactgcagttcttttttttattctgctgttggaaggcaatctgctgcaactcttgcgagttgacgaatatcaccatcgcaatcgagaaggaggagtgccgcttttgtatcagtattaacacaacctggtgcgccggatactgctataccagggatctcgtgtacaaggatccagcccgccccaaaattcagaagacctgtacgttcaaggagctggtgtacgaaaccgttagggtgcctggatgcgctcaccatgcggacagcttatacacttaccctgtggccacccaatgtcactgtggcaagtgtgatagtgactctacagattgcacggtcaggggtctggggccgagctactgcagtttcggagagatgaaagag

SEQ ID NO: 27213 - DNA, 387 bp, Artificial Sequence
  derived and/or modified sequence
atgaaaaccctgcaattctttttccttttctgttgctggaaggccatttgttgtaactcctgcgagctgaccaacatcaccatcgccattgagaaggaagaatgccgattttgcatttcgatcaacaccacttggtgtgcaggatactgttacactagagatctggtgtacaaggatcctgcacggcccaagattcaaaagacttgtacctttaaggaattggtctacgaaaccgtgcgggtgcctggctgtgcacaccacgccgattccctctacacctaccctgtcgcaactcagtgtcactgcggaaaatgtgactccgatagcaccgactgtaccgtgcgtggacttggaccctcctactgttcattcggggaaatgaaggag

SEQ ID NO: 27214 - DNA, 387 bp, Artificial Sequence
  derived and/or modified sequence
atgaagacactgcagtttttcttcctgttctgttgctggaaagctatttgttgcaattcttgtgaacttaccaacataactattgccatagagaaggaggagtgccgcttttgtatctcaattaatacaacctggtgtgccggctactgttatactagagatctagtttataaggaccccgcccgaccaaaaattcagaaaacttgcacctttaaggagctagtctatgaaacagtaagggtgcccggatgtgcccatcacgctgactctctctatacataccctgtggccacccaatgtcattgtggtaaatgtgattcggacagcaccgattgcactgtgagaggcctcgggcccagttactgttccttcggggaaatgaaggag

SEQ ID NO: 27215 - DNA, 387 bp, Artificial Sequence
  derived and/or modified sequence
atgaaaaccctgcagttctttttcttattctgctgttggaaagccatctgctgcaacagttgcgagcttaccaatattactatcgctattgagaaggaggagtgtcgattttgcattagcattaacactacatggtgtgcaggctattgctacacaagggatcttgtctataaagatccagcacgccctaagatccaaaagacctgtacattcaaggagctggtttatgaaaccgtgagggtgcctggctgtgctcaccacgcagattcgctttacacctaccccgtcgccacccagtgtcattgtggaaagtgcgacagtgattccacggattgcacagtacggggtcttggcccatcctattgcagcttcggagaaatgaaagaa

SEQ ID NO: 27216 - DNA, 387 bp, Artificial Sequence
  derived and/or modified sequence
atgaaaactcttcagttcttcttcctcttttgctgttggaaggcgatctgttgtaatagttgtgagcttaccaatatcactattgctattgaaaaagaagagtgtaggttttgcatctcgatcaacactacctggtgcgcaggttactgttacactcgtgacctggtgtacaaggatccagcacgaccgaaaattcagaaaacctgcacgttcaaggaactcgtgtacgaaactgtgcgcgtccctggttgcgcacatcacgccgatagcctgtacacctacccggtggcaacgcaatgtcactgtggaaagtgcgactcagattccactgactgtactgtgcgcggacttgggccatcgtactgtagctttggagaaatgaaggaa

SEQ ID NO: 27217 - DNA, 387 bp, Artificial Sequence
  derived and/or modified sequence
atgaaaacgctgcagttctttttcctgttctgttgctggaaggcaatctgttgcaatagctgcgaactgaccaatatcaccatcgctattgagaaggaagagtgtagattctgtatctcgatcaacactacttggtgtgccggatattgctacacccgagatctggtgtacaaagacccggcccgcccgaagatccagaaaacctgtaccttcaaggaactcgtttacgaaactgtgcgggtgcccggatgcgcacatcacgcggactcgctttacacctaccccgtggcgactcaatgccactgcggtaaatgcgacagcgactctaccgattgcacggtgcgcggcttgggaccatcatactgctcattcggagagatgaaggaa

SEQ ID NO: 27218 - DNA, 387 bp, Artificial Sequence
  derived and/or modified sequence
atgaagaccctacaatttttcttccttttctgctgttggaaagcgatctgctgcaattcctgcgaactgacaaatatcacaatcgcaatcgagaaggaagagtgtagattctgtatcagtataaacaccacatggtgcgccgggtactgctacacgagagacctggtttataaagatccagccagaccaaagatccaaaagacttgtacctttaaagagctggtgtacgagaccgtccgagtgcctggctgtgcccaccacgccgactctctctacacctatcccgtggcgactcagtgccactgtgggaagtgcgactctgacagcacagactgcactgttagaggtctgggaccctcttactgttcatttggagaaatgaaagag

SEQ ID NO: 27219 - DNA, 387 bp, Artificial Sequence
  derived and/or modified sequence
atgaaaactctgcagttcttttttcttttctgttgctggaaggcaatctgctgtaattcgtgcgagctgactaacatcaccatcgctattgagaaggaagaatgccgtttctgtatttcgatcaacactacctggtgtgcggggtactgttacacccgcgaccttgtctacaaggatccagcaagacccaaaatccaaaagacctgtacttttaaggaactggtgtatgaaactgtccgggtgcctggttgtgcacaccatgcggactcgctttacacttaccccgtggcaactcaatgccattgtgggaaatgcgatagcgattcgactgattgcacggtgcgtggactgggaccctcgtactgttcctttggcgagatgaaagaa

SEQ ID NO: 27220 - DNA, 387 bp, Artificial Sequence
  derived and/or modified sequence
atgaaaacccttcagtttttctttcttttctgttgttggaaggcgatttgctgtaatagctgcgaacttactaacatcactattgccatcgaaaaagaagagtgccgtttctgcatttcgattaacaccacctggtgtgcaggttactgttacaccagagatctggtgtacaaagaccccgcaagacctaagatacaaaagacttgtacttttaaggagctggtctacgaaacggtgcgggtcccaggttgcgcacatcatgccgactcgctgtacacttatccagtggccactcaatgtcattgtggaaagtgtgactcggattcgaccgactgcactgtgaggggactgggcccctcatactgttcattcggagaaatgaaagag

SEQ ID NO: 27221 - DNA, 387 bp, Artificial Sequence
  derived and/or modified sequence
atgaagacacttcagtttttcttcctattctgttgctggaaggctatttgttgtaactcttgtgaactgactaacataactattgccatcgaaaaagaagaatgcaggttctgtatctctatcaacactacatggtgtgctgggtactgttatacacgggatcttgtgtataaagatcctgccagaccgaaaatccagaaaacttgtacatttaaggaactcgtgtatgaaactgtgcgggtgcccggatgtgctcaccacgcggattctttatatacatatcccgtagcgacacagtgtcactgtgggaaatgtgattcagattcaactgattgcactgtcagggggctagggccttcttactgctctttcggagaaatgaaagaa

SEQ ID NO: 27222 - DNA, 387 bp, Artificial Sequence
  derived and/or modified sequence
atgaagacattgcagttcttcttcctgttctgctgctggaaagctatctgctgcaatagttgtgaattgactaatattactatcgccatcgagaaagaagaatgtagattctgcatatccatcaatactacttggtgcgcgggatattgttacactcgggatctcgtgtataaagatcctgccagacccaaaattcagaagacctgtacatttaaggaattagtgtacgagactgttcgcgtgcccggctgtgcacatcacgccgattcactgtacacatatcctgtagctacccagtgtcattgtggtaagtgcgactctgactcaactgattgtacagtgcgaggattgggcccttcttattgttccttcggtgaaatgaaggag

SEQ ID NO: 27223 - DNA, 387 bp, Artificial Sequence
  derived and/or modified sequence
atgaaaacgttgcagttcttctttctattttgctgttggaaagcaatctgctgcaactcctgcgagctgacaaacattacaatagcaatcgagaaggaggaatgtagattttgtatctccataaacaccacctggtgtgccggctattgctacacacgcgatcttgtgtacaaggatccagctaggcctaagatccagaagacctgcacatttaaagagctcgtatacgagactgtgcgcgtgcccggctgcgcacaccatgccgacagcctttatacctatcccgtcgccacacaatgtcactgcggaaagtgtgacagcgacagcaccgactgtactgttcgtggtctgggcccaagttattgctcttttggcgagatgaaagaa

SEQ ID NO: 27224 - DNA, 387 bp, Artificial Sequence
  derived and/or modified sequence
atgaaaaccctccagttctttttcctgttctgctgctggaaggctatctgctgtaattcttgcgagttgaccaacattacaatagctatagagaaagaggagtgcaggttctgtatcagcataaacacaacctggtgtgcggggtactgttatacacgggatttggtttacaaagacccagcacggcccaagattcagaagacatgtacgtttaaagaactggtgtacgagacagttagagttcctgggtgcgcccaccatgccgatagcttgtatacttacccagtggccactcagtgccactgtggcaagtgtgactcagattccaccgactgcacggtccgtggacttggaccgtcgtactgctccttcggcgaaatgaaggag

SEQ ID NO: 27225 - DNA, 387 bp, Artificial Sequence
  derived and/or modified sequence
atgaagactcttcagttcttcttcttgttctgttgttggaaagcaatttgttgtaattcttgtgaactcacgaacattactatcgcaattgagaaggaggaatgccggttctgcatctcgataaatacgacgtggtgcgccggttactgctatacgagggaccttgtgtacaaagatcccgcgaggcccaaaattcagaagacctgcacttttaaagaattggtgtacgagacggtgagagttcccggctgcgcccaccacgctgatagcctctacacatacccagtagcgacccagtgtcattgcggaaaatgcgattcagattcgacagactgcacagtcagaggtttggggccaagctattgttcgtttggcgagatgaaagag

SEQ ID NO: 27226 - DNA, 387 bp, Artificial Sequence
  derived and/or modified sequence
atgaaaactcttcaattcttcttccttttttgttgctggaaggctatatgttgcaattcgtgtgaactcaccaatatcaccatcgcaattgaaaaggaggagtgcagattttgtatttcaataaacaccacctggtgtgcgggatactgctatacccgcgatctcgtgtacaaggatccagcccgtcccaaaatccaaaagacgtgcacttttaaggagcttgtgtatgaaaccgtcagagtgccgggttgtgctcaccatgcagactccctctacacctaccccgtggcaacccagtgtcactgcggtaagtgtgattcagacagcactgactgtacggtgcgcggactggggccatcctattgctccttcggagagatgaaggaa

SEQ ID NO: 27227 - DNA, 387 bp, Artificial Sequence
  derived and/or modified sequence
atgaaaacgttgcaattcttttttctcttctgttgttggaaggccatctgttgcaatagctgcgagctgaccaatatcactattgccatcgaaaaggaagaatgccgcttctgcataagcatcaacacgacctggtgcgcgggctactgttatacccgcgacctggtctacaaggacccggcccgaccaaagatccagaaaacctgtactttcaaagaactggtctacgaaactgtccgggtgccgggttgcgcccaccacgcagacagcctctacacttatcccgttgccactcaatgccattgcggcaaatgtgactcggattccaccgattgcaccgtgaggggcttgggaccgtcgtactgctcattcggagaaatgaaggaa

SEQ ID NO: 27228 - DNA, 387 bp, Artificial Sequence
  derived and/or modified sequence
atgaaaacgctgcagttcttcttcttgttttgttgttggaaagccatctgttgcaattcttgtgagctgaccaacattacgatcgcaatcgaaaaggaggagtgcagattttgcatcagtatcaatacaacctggtgcgcaggatactgctacacacgtgatctggtatacaaagatcccgcccgtcccaagattcagaaaacttgcacctttaaggagctggtttatgagaccgtgcgcgtgccaggttgtgcgcatcatgcagacagcctgtacacctatcccgtggctactcagtgccactgcggaaagtgcgacagtgattcaactgactgcactgtccgggggttggggccctcatattgctcctttggagaaatgaaggag

SEQ ID NO: 27229 - DNA, 387 bp, Artificial Sequence
  derived and/or modified sequence
atgaaaaccctgcaattctttttccttttttgctgttggaaagcaatctgttgtaactcctgcgaactcactaatatcactattgcgatcgaaaaggaggaatgtcgcttttgcatttcaattaacacgacctggtgcgccggctactgttacacccgagatcttgtgtacaaggacccagcacgtccaaagatacagaaaacttgcacgtttaaggagctcgtgtacgaaacggttcgggtccctggatgtgctcatcacgccgacagtctctacacgtatcccgtcgcaacgcagtgtcattgtggaaagtgtgattccgattctaccgattgtaccgttagaggactggggccgagctactgcagcttcggtgaaatgaaggaa

SEQ ID NO: 27230 - DNA, 387 bp, Artificial Sequence
  derived and/or modified sequence
atgaagaccctgcagttctttttcctcttttgttgctggaaagcaatctgttgcaactcatgtgaactgacaaatatcaccatcgcaattgaaaaagaggaatgccgcttctgtatctctattaacaccacttggtgtgcgggatattgctatacccgcgatcttgtgtacaaggacccggcacgccccaaaatccagaaaacgtgtacgttcaaagaattggtttatgagacggtgcgcgtgcctggctgtgcacaccacgcagactcactctacacctaccctgtagctacacaatgccattgtggcaaatgcgattcagactctacagactgtaccgtgagaggcctcggtcccagctactgcagctttggagagatgaaggaa

SEQ ID NO: 27231 - DNA, 387 bp, Artificial Sequence
  derived and/or modified sequence
atgaagacccttcagtttttttttctcttctgctgttggaaggccatctgctgtaatagctgcgagctcaccaatattaccatcgccatagaaaaggaggagtgccgcttttgcatcagcatcaacaccacctggtgcgccggatactgctatacgcgggatctggtgtataaggatccagccaggcccaagatacaaaagacctgcacgttcaaagaactggtgtatgagaccgtcagagtacctggctgtgcccaccacgccgactctctttacacataccctgtagcgacgcaatgtcactgcggaaaatgcgactctgacagcactgattgtaccgtgagaggcctcggaccctcatactgctcattcggcgaaatgaaggaa

SEQ ID NO: 27232 - DNA, 387 bp, Artificial Sequence
  derived and/or modified sequence
atgaaaacgttacaatttttttttttattttgttgttggaaagcgatatgttgtaattcgtgtgaattaacgaatataacgatagcgatagaaaaagaagaatgtcgtttttgtatatcgataaatacgacgtggtgtgcgggttattgttatacgcgtgatttagtttataaagatccggcgcgtccgaaaatacaaaaaacgtgtacgtttaaagaattagtttatgaaacggtacgagtaccgggttgtgcgcatcatgcggattcgttatatacgtatccggtagcgacgcaatgtcattgtggtaaatgtgattcggattcgacggattgtacggtacgtggtttaggtccgtcgtattgttcgtttggtgaaatgaaagaa

SEQ ID NO: 27233 - DNA, 387 bp, Artificial Sequence
  derived and/or modified sequence
atgaaaacattgcagttttttttcctcttttgttgctggaaagccatatgctgcaattcctgcgaactgaccaacatcaccattgccatcgaaaaagaggagtgccgcttttgcatctctatcaataccacctggtgcgctggatactgttatacccgcgatttggtctacaaggacccagcgaggcccaagatccaaaagacctgtaccttcaaggagttggtgtatgaaaccgttcgcgtgcctggatgtgcgcatcatgcggactctctgtacacgtatcctgtcgccacgcagtgccactgcggtaagtgcgattctgattcaacggattgcacggtacgcgggctggggccaagctactgctctttcggcgagatgaaggag

SEQ ID NO: 27234 - DNA, 387 bp, Artificial Sequence
  derived and/or modified sequence
atgaaaaccctccaattcttttttctgttttgttgttggaaggcaatttgttgcaacagctgtgaactcactaacattactatagctatcgagaaggaagagtgccggttttgcatctcaataaacaccacctggtgcgcaggatactgttacacccgtgatctggtgtacaaggatccagcgcgacctaagattcagaaaacctgtacctttaaggagctggtgtatgagactgtgcgcgtgccaggatgcgctcaccatgccgattcgctctacacttaccctgtcgcaacccaatgccattgcggcaagtgtgactccgattcgaccgattgcactgtgcgcggtctgggaccatcatactgttcgtttggcgagatgaaggag

SEQ ID NO: 27235 - DNA, 387 bp, Artificial Sequence
  derived and/or modified sequence
atgaagaccctacagttctttttcctcttctgttgttggaaggcgatttgctgtaattcttgtgaactgactaatattacaatcgctatcgaaaaggaagagtgcagattttgtatctccatcaacactacctggtgtgccggctactgctacaccagagatcttgtgtataaagaccccgcaagacctaagatccaaaagacatgcacttttaaagagctggtatacgaaaccgtgcgggtaccaggctgcgcacatcacgccgattctttatacacataccctgtggctactcaatgtcattgtggaaagtgtgactcagactccaccgattgcactgtcagaggcttgggaccatcatattgtagcttcggcgagatgaaggag

SEQ ID NO: 27236 - DNA, 387 bp, Artificial Sequence
  derived and/or modified sequence
atgaagacacttcagttcttctttctcttttgctgctggaaggctatctgttgtaattcatgcgagctcacaaatatcactattgctattgaaaaggaggaatgtcgattttgcattagcataaacacaacctggtgcgcaggctactgctacactagggatttggtgtacaaggaccccgcgaggcccaaaatacagaagacatgcacctttaaggaattggtgtatgagacagtacgcgtgcccgggtgtgctcatcatgcagactccctgtacacatacccagtcgccacccagtgtcattgtggcaaatgtgactccgatagcaccgactgcactgtgcgtggtctgggtccttcctattgtagctttggagagatgaaggaa

SEQ ID NO: 27237 - DNA, 387 bp, Artificial Sequence
  derived and/or modified sequence
atgaaaactcttcaatttttttttcttttttgttgttggaaagctatttgttgtaatagttgtgaacttacaaatataacaattgctattgagaaggaagagtgtcgattttgtatttcaataaatacaacttggtgtgctgggtattgttatactagagatcttgtttataaagatccagcaagaccaaaaattcaaaagacttgtacttttaaagaattagtttatgaaactgttcgagtaccaggatgtgctcatcatgcagattctctttatacttatccagttgcaacacaatgtcattgtggaaagtgtgactcagattctacagattgtacagttcgtggattgggaccatcatattgtagtttcggagaaatgaaagaa

SEQ ID NO: 27238 - DNA, 387 bp, Artificial Sequence
  derived and/or modified sequence
atgaaaactctccagttctttttccttttctgttgttggaaggcaatttgttgtaactcatgcgaactgactaacattacgatcgcaattgaaaaggaagagtgtaggttttgcatttcaattaacaccacctggtgcgcaggatactgttacacccgggacctcgtctataaggatccggccagacctaagattcaaaagacttgtacctttaaggagcttgtgtacgaaaccgtgcgtgtccctggttgtgcacatcacgctgactcactttacacttaccctgtcgcgactcagtgtcattgtggaaagtgtgacagcgattccaccgactgtactgtcaggggactcggcccatcctactgctcgtttggagaaatgaaggaa

SEQ ID NO: 27239 - DNA, 387 bp, Artificial Sequence
  derived and/or modified sequence
atgaagactctccagtttttcttcctgttttgctgttggaaagcgatctgttgcaacagttgcgagctgactaatattaccatcgccatagaaaaggaggagtgcaggttctgtatcagtatcaacactacgtggtgtgctgggtattgttataccagagatctcgtgtacaaggaccccgcgcgcccaaagatacagaagacctgcacctttaaggagttggtgtacgagaccgtaagagtgcccggctgcgcccatcacgctgatagcctttatacgtaccctgtcgccacccagtgtcactgcggcaaatgcgactccgattccacagactgcaccgtacgaggtctagggccgtcttactgttctttcggcgagatgaaagaa

SEQ ID NO: 27240 - DNA, 387 bp, Artificial Sequence
  derived and/or modified sequence
atgaagaccctccagttcttcttcctgttttgttgctggaaagcaatttgctgcaattcctgtgaactgacaaacattaccattgctatcgagaaagaagagtgccgattttgtatcagcatcaatacaacctggtgcgccggctactgctatacccgcgaccttgtgtacaaggatcctgctcgccccaaaatccagaaaacgtgcacgttcaaagaactggtctatgaaacggtccgggtgcctggctgcgcacatcatgctgattctctttatacctatcctgtggcaacccagtgccactgtggaaaatgtgattctgactcaaccgactgtactgtgcgtgggctcggcccaagctactgcagcttcggcgagatgaaggag

SEQ ID NO: 27241 - DNA, 387 bp, Artificial Sequence
  derived and/or modified sequence
atgaaaaccctccagtttttttttctcttttgctgctggaaggccatttgttgtaacagctgtgagctcaccaatatcacaattgccatcgagaaagaggaatgcaggttttgtatcagcattaataccacatggtgtgccggctactgttatactagggatctcgtgtataaggaccccgcacggcccaaaatccagaagacttgtaccttcaaagaactggtatacgaaaccgtgcgggttcccggatgcgcacatcatgccgacagcctgtacacctaccctgtggccactcagtgtcactgcggcaaatgcgattcagactctacagactgcactgttcggggactaggacccagttactgtagtttcggcgaaatgaaggaa

SEQ ID NO: 27242 - DNA, 387 bp, Artificial Sequence
  derived and/or modified sequence
atgaagaccctgcagtttttcttcctcttttgttgttggaaagccatctgctgcaactcatgcgagctaacaaatattacaattgccattgaaaaggaagaatgtagattttgtatcagcatcaacaccacatggtgtgccggatattgttatactcgagacctcgtctacaaagaccctgcacgtcctaagatccagaagacatgtacatttaaagagctggtctatgaaaccgtgcgtgtccctgggtgtgcccaccatgccgacagtctgtacacatatccggtagctacccagtgccactgtggcaaatgcgatagcgactcgacagattgcaccgtgagaggcctggggccatcatactgctctttcggagagatgaaggag

SEQ ID NO: 27243 - DNA, 387 bp, Artificial Sequence
  derived and/or modified sequence
atgaaaacgctgcagttctttttcctgttctgttgctggaaggccatctgctgcaattcatgcgagctgaccaacataaccattgctatcgagaaagaggaatgcaggttttgcatctcgatcaacaccacctggtgcgcaggctactgttacacccgggacctggtgtacaaggacccggcgcggccgaagattcaaaagacctgcacctttaaggagctcgtctacgagactgtgagagtgcctggatgcgcccatcatgccgactcattgtatacctacccggtggcgacccagtgccactgcggaaaatgcgactcagatagcaccgactgcactgtgagaggactcggaccgagctactgctcgttcggagagatgaaggaa

SEQ ID NO: 27244 - DNA, 387 bp, Artificial Sequence
  derived and/or modified sequence
atgaaaaccctgcaattcttcttcctcttttgctgctggaaagcgatttgttgcaactcctgcgagttgactaatatcaccatcgcaatcgaaaaggaagaatgcagattttgcatctccatcaacactacttggtgcgccgggtactgttacacccgggacctggtctacaaggatcccgcccgccctaagatccagaaaacctgtactttcaaggagcttgtgtacgagacggtgagggtcccgggatgcgctcatcacgcggacagcctctacacgtatccagtggccacccagtgccactgcggtaagtgcgattcggacagcaccgactgtactgtgcgcggcctgggaccgtcatactgttcgttcggagagatgaaggaa

SEQ ID NO: 27245 - DNA, 387 bp, Artificial Sequence
  derived and/or modified sequence
atgaaaaccctccagtttttcttcctcttctgctgctggaaggcaatctgttgtaactcgtgcgaactcactaatatcacgattgctatcgaaaaagaggagtgccgcttctgtatctctatcaatactacctggtgtgccggatactgttacacccgtgatctggtgtacaaggatcccgctcggcctaagatccagaaaacctgcaccttcaaagaactcgtgtacgagactgtgcgggtcccggggtgcgcacaccatgccgactccctctacacctacccggtggccacccaatgccactgcggaaaatgcgactccgattccaccgactgtaccgtcagaggactgggcccctcgtactgctcgttcggcgagatgaaggaa

SEQ ID NO: 27246 - DNA, 387 bp, Artificial Sequence
  derived and/or modified sequence
atgaaaaccttgcaattcttctttcttttttgttgctggaaggccatctgttgcaactcttgcgaactcaccaacattacgattgccattgaaaaggaggaatgtaggttctgtatcagcataaacacaacctggtgtgccggctactgttatacccgagacctcgtttacaaagaccccgcgcgccctaagatccagaagacatgtaccttcaaagaactggtgtacgagacggtcagagtgcctggctgcgcccatcacgcagatagcctgtatacctatcccgtcgccactcagtgccattgcggcaaatgcgactccgactctacggactgtacagtccggggcctggggcccagctactgttcgttcggggagatgaaggaa

SEQ ID NO: 27247 - DNA, 387 bp, Artificial Sequence
  derived and/or modified sequence
atgaaaacgctgcagtttttttttctcttctgttgctggaaggccatctgttgtaacagctgtgagctaactaacatcaccattgcaattgaaaaagaagagtgtagattctgcattagtatcaatacaacatggtgcgccggttactgctatacacgcgatctggtatataaggacccggcccgtccaaagattcagaagacatgcaccttcaaggagctagtgtatgagaccgtgcgggtgccaggatgcgcacaccatgctgattctctgtacacatacccagtcgcaacccaatgccattgtggaaaatgcgatagcgattctaccgactgtactgtgagggggttgggcccctcctattgttcttttggtgagatgaaggaa

SEQ ID NO: 27248 - DNA, 387 bp, Artificial Sequence
  derived and/or modified sequence
atgaaaactttgcaattcttcttcctgttctgctgctggaaggcgatctgctgcaatagctgcgagctgactaacatcactattgctatcgaaaaggaggaatgccggttctgtatcagcatcaacactacttggtgcgcgggctactgctacacccgcgacctggtctataaggatccggctcggccaaagatccaaaagacttgcacgttcaaagaacttgtgtacgaaaccgtgcgcgtgcccgggtgtgcacatcacgcggactccctctacacctaccctgtggccacgcaatgccactgtggcaagtgcgacagcgactcaaccgactgcaccgtgcgggggcttggaccatcctactgctcgttcggagagatgaaagaa

SEQ ID NO: 27249 - DNA, 387 bp, Artificial Sequence
  derived and/or modified sequence
atgaaaactctgcagtttttcttcctgttttgctgttggaaagccatttgctgtaacagctgtgagctgacaaatattacgatcgctatcgaaaaagaggaatgtcgtttctgtatctcgatcaacacgacctggtgtgccggatactgttacacgagggacctggtctacaaagacccagccagaccaaagatccagaagacttgtaccttcaaagagctggtctacgaaaccgttagggtccctgggtgtgcacaccacgccgactctctatacacctatcccgttgccacccagtgccactgcggaaaatgtgactccgatagcactgattgtacggtgcgcggcctagggccctcgtactgttcctttggggaaatgaaagag

SEQ ID NO: 27250 - DNA, 387 bp, Artificial Sequence
  derived and/or modified sequence
atgaaaacgctccagttctttttcctgttttgttgctggaaggccatttgttgtaacagctgcgagcttactaatatcaccatagccatagagaaggaggaatgccggttctgtatctcgatcaatactacctggtgcgctggctactgctacacgcgggatctagtgtataaggatcctgcacgcccgaaaatacagaaaacgtgcaccttcaaagagcttgtgtatgaaaccgttcgggtgcctggatgtgcccaccacgcagattccctctatacgtaccccgtggcaacccagtgtcactgtggaaaatgtgatagtgacagcaccgactgtacagtcagaggactgggtccatcgtattgtagttttggcgaaatgaaggag

SEQ ID NO: 27251 - DNA, 387 bp, Artificial Sequence
  derived and/or modified sequence
atgaaaacacttcagtttttttttctgttttgttgttggaaagcaatatgttgcaatagttgtgaactgactaacataactatagctatagaaaaagaagaatgcagattctgtatttctattaacactacatggtgtgcgggatattgttacactcgcgaccttgtgtacaaagatccagcaagacctaaaattcagaaaacttgcacttttaaagaactcgtctatgaaacagttagggtccccgggtgtgcacatcatgcggactcactatatacttatccagtcgctactcagtgccattgcgggaaatgcgattcagattcaactgattgcacagtaagaggactcgggccaagttattgttcttttggagagatgaaagag

SEQ ID NO: 27252 - DNA, 387 bp, Artificial Sequence
  derived and/or modified sequence
atgaaaactttgcagttcttctttcttttctgctgctggaaagccatctgctgtaactcgtgcgaactgaccaatatcaccatcgccattgaaaaggaagaatgcagattctgtatctcaattaacaccacctggtgcgcgggttactgttacacgcgtgacctggtctacaaggaccctgcacgacccaagatccaaaagacgtgcactttcaaggagctcgtgtacgagactgtgcgcgtcccagggtgcgctcaccacgcagattctctttatacctatccggtggccacccagtgccattgtggaaagtgtgactcggactcgactgattgtactgtgaggggcctgggaccaagctactgctccttcggggagatgaaagag

SEQ ID NO: 27253 - DNA, 387 bp, Artificial Sequence
  derived and/or modified sequence
atgaaaactctccagttctttttcctgttttgctgctggaaggcgatctgctgcaactcttgtgaattgactaatatcaccatagcaatcgaaaaggaagaatgtcggttttgtatttccattaacaccacctggtgcgcaggatattgctacacgcgtgacctggtgtacaaagatcccgcaaggccgaagattcaaaagacctgtacctttaaggagctcgtgtacgagacggtcagagtgccaggatgcgcccatcatgctgactccctgtacacctacccagtggctacgcaatgtcactgtggaaagtgtgactcagattctactgattgcactgtccgcggcctcgggccttcgtactgttcgtttggtgagatgaaagaa

SEQ ID NO: 27254 - DNA, 387 bp, Artificial Sequence
  derived and/or modified sequence
atgaaaacgctgcaattcttcttccttttctgctgctggaaggctatttgctgcaactcatgcgagctgactaatatcaccattgcaatcgaaaaggaagagtgtcggttctgcatctcgatcaatacgacttggtgtgcaggatactgttacacccgcgacttggtttacaaggatccggctagaccaaaaatccaaaagacttgcaccttcaaggaacttgtgtacgaaactgtgcgggtgcctgggtgtgcccatcatgccgattctctgtatacctacccggtggcgactcagtgccattgcggaaagtgcgactcggatagcaccgactgtaccgtgcgcgggttgggaccgagctactgctcgttcggcgaaatgaaagag

SEQ ID NO: 27255 - DNA, 387 bp, Artificial Sequence
  derived and/or modified sequence
atgaaaacgctgcaattcttctttctcttctgttgttggaaggcaatttgctgtaactcatgtgaacttaccaatatcactattgccattgaaaaggaagaatgcagattttgcattagcatcaacactacctggtgcgcagggtactgctacacccgggacctggtgtataaggaccctgctagacctaagatccaaaaaacgtgcaccttcaaggagctggtgtacgagactgtgagagtgccgggatgcgcacatcacgccgattccctctacacctacccagtcgcaactcagtgtcactgtggaaagtgtgactcagactccacggactgtactgtcagaggactgggcccttcgtactgtagctttggtgagatgaaagag

SEQ ID NO: 27256 - DNA, 387 bp, Artificial Sequence
  derived and/or modified sequence
atgaaaaccctgcaattcttcttcctcttctgctgttggaaggcgatctgctgcaactcctgtgagctcactaatatcaccatcgcgatcgaaaaggaagagtgccgcttctgcatcagcattaacactacctggtgcgccggatactgctacactcgggacctcgtgtacaaggacccggcccggcctaagatccagaaaacctgtacctttaaggaactggtctatgaaactgtgcgcgtccctggatgcgctcatcacgctgactcgctgtacacctacccagtggccacccagtgccattgcggtaaatgcgatagcgactccactgactgcaccgtgcgtgggctgggcccgtcgtactgctcgttcggggagatgaaggag

SEQ ID NO: 27257 - DNA, 387 bp, Artificial Sequence
  derived and/or modified sequence
atgaaaactctccagttcttttttctgttttgttgctggaaggctatctgctgcaacagctgcgagctgactaacatcactatcgcaatcgaaaaagaagaatgtcgcttctgcatctccatcaatactacctggtgcgcgggatactgctacacgagagatctcgtgtacaaggacccagcacggccaaagatccagaaaacttgcacgttcaaggagctggtgtacgaaaccgtccgggtgccgggatgcgctcaccacgctgattcgctgtacacttacccggtggccacgcaatgccattgtggcaagtgtgacagcgacagcactgattgcactgtccgtggcctggggccgtcctactgcagcttcggagaaatgaaagag

SEQ ID NO: 27258 - DNA, 387 bp, Artificial Sequence
  derived and/or modified sequence
atgaaaactttgcagtttttcttcttgttctgttgctggaaggccatctgctgtaacagctgtgagcttactaacattaccatcgcgatcgaaaaggaggaatgccggttctgcatctccatcaatacgacgtggtgcgcaggatactgctacacccgggacctcgtctacaaggatccggctcgcccaaagattcagaaaacttgtactttcaaagagctggtgtacgaaaccgtaagggttccgggttgcgcccaccacgccgactctctttacacctatcctgtggcgacccaatgtcattgcggcaagtgcgacagcgattcgaccgactgcactgtgcgcgggctgggcccttcgtactgttcttttggagaaatgaaggaa

SEQ ID NO: 27259 - DNA, 387 bp, Artificial Sequence
  derived and/or modified sequence
atgaaaacgctgcagttcttttttcttttttgttgttggaaagcaatatgttgtaacagctgcgaacttactaacattacgatagcgatcgaaaaggaagagtgccggttctgtatttccatcaacaccacttggtgcgctggctactgttacactcgcgatctggtctacaaggacccagcacggcccaaaattcagaaaacttgcacgtttaaagaacttgtgtatgagactgtgagagtccctggttgcgcacatcatgcagactccctttacacctacccagtggccacccaatgtcattgtggaaaatgcgatagcgattccaccgactgtacggtgaggggactgggtccttcctactgcagctttggagagatgaaggaa

SEQ ID NO: 27260 - DNA, 387 bp, Artificial Sequence
  derived and/or modified sequence
atgaaaacccttcagtttttcttcctgttctgctgttggaaggctatctgctgtaactcatgcgaactgaccaacattacgatcgccatcgaaaaggaggagtgccgcttttgtatttcgatcaatacgacatggtgcgccggttattgctatactcgggacctggtgtacaaggaccccgcaagaccgaaaattcagaaaacctgtacatttaaagagctggtgtatgagacagttagagtgcctggctgcgcccaccatgccgacagcctttacacatacccagtcgccacgcagtgccactgcgggaaatgtgatagcgactcaaccgactgtacagtgagggggcttggacctagttattgtagcttcggtgaaatgaaggaa

SEQ ID NO: 27261 - DNA, 387 bp, Artificial Sequence
  derived and/or modified sequence
atgaagacacttcaattcttttttctcttctgttgctggaaagctatttgttgcaactcctgtgagctgaccaacatcaccatcgccattgagaaggaggagtgccgtttctgcatctcaatcaatacaacatggtgtgctggatattgctacaccagggacttggtgtacaaggatcccgctaggccaaaaatccagaaaacttgcacttttaaggaactggtgtacgagaccgtgcgtgtgcctggttgtgcacatcacgcagatagtctgtacacctatccagtggctactcaatgtcactgcggcaaatgcgatagcgatagcacagattgcaccgtgaggggtctgggaccttcttactgctccttcggagaaatgaaggaa

SEQ ID NO: 27262 - DNA, 387 bp, Artificial Sequence
  derived and/or modified sequence
atgaaaaccctgcaatttttctttcttttttgctgctggaaggctatatgctgtaatagttgcgagctgacgaacatcactatcgcaatcgagaaagaggaatgcagattctgcatttcaatcaatactacatggtgcgccgggtattgctacacgcgagatctggtgtataaggatccagccagaccaaaaattcagaagacctgcacctttaaagagcttgtttatgaaacagtcagggtccctgggtgtgcacaccatgctgatagcttgtatacgtatcccgttgctacacaatgccactgcggtaagtgcgactcagacagcacagactgcactgtgcgaggccttggcccttcatattgcagttttggggagatgaaagaa

SEQ ID NO: 27263 - DNA, 387 bp, Artificial Sequence
  derived and/or modified sequence
atgaaaactctgcagtttttcttcctgttttgctgctggaaagccatttgctgtaactcctgtgagttgactaatatcaccatcgcgatagaaaaggaagaatgtaggttttgtatttcaattaacaccacttggtgtgcagggtactgttacactcgggacttggtctacaaggatcctgcacgaccaaagattcaaaagacttgtacctttaaggaactcgtctacgaaaccgtgcgggttccaggctgcgcgcatcatgcagatagcctgtacacttacccggtggccacccaatgtcattgtggtaagtgtgactctgattcgactgattgcaccgtgcgaggactcggaccgtcctactgtagctttggtgaaatgaaggaa

SEQ ID NO: 27264 - DNA, 387 bp, Artificial Sequence
  derived and/or modified sequence
atgaaaacgttacaattcttttttcttttttgttgttggaaagcgatctgttgtaattcttgcgaactaacaaatattacaatcgcaattgagaaagaggagtgtcgattttgcatttcaatcaacacgacgtggtgcgccggctattgctatacgcgtgatttagtttataaagaccctgcaagacctaaaattcaaaaaacctgtactttcaaagaacttgtatacgagacagtgcgcgtgcctggctgtgcccaccatgctgattccctgtatacttatcctgtcgcgacgcaatgtcattgtggaaagtgtgattccgacagcactgattgtacagtgagaggacttggcccatcctactgctcatttggcgagatgaaagag

SEQ ID NO: 27265 - DNA, 387 bp, Artificial Sequence
  derived and/or modified sequence
atgaagaccttacagttcttcttcctgttctgttgctggaaggccatctgttgcaactcttgcgagttgacaaatataacaatcgcaatcgagaaagaggagtgcagattctgtatttccattaacaccacctggtgcgccggctactgctacaccagagacttggtgtacaaggatccagcgaggcccaagattcagaagacctgtacttttaaggagctcgtgtatgaaactgttagagtgcccggatgcgcccatcacgctgactcactgtacacgtacccagttgccactcaatgtcattgtggcaagtgtgactccgattcaacagattgtacggtgcggggtctcggaccatcttattgttccttcggagagatgaaggag

SEQ ID NO: 27266 - DNA, 387 bp, Artificial Sequence
  derived and/or modified sequence
atgaaaacgctgcaattttttttcctcttctgttgttggaaagccatctgctgtaatagctgcgagctgacaaatatcactatcgcgatcgaaaaggaggagtgcaggttttgcatcagcatcaatacgacttggtgtgcaggatattgttacaccagagacctggtttacaaagaccccgcccgcccaaagattcagaagacatgcaccttcaaggagttggtatacgagacagtgcgagtcccaggctgtgcacatcacgcagatagcctctatacataccccgttgcgacccagtgccactgtggcaaatgcgacagcgattctacagactgtacagtgagaggcctggggccctcgtactgcagttttggtgagatgaaagaa

SEQ ID NO: 27267 - DNA, 387 bp, Artificial Sequence
  derived and/or modified sequence
atgaaaaccctccagtttttctttttgttttgttgttggaaagcaatttgttgtaacagctgcgaactgactaacattacgatagcaatcgagaaggaagaatgtagattctgcattagcataaacaccacttggtgtgctgggtactgttacactcgggatctcgtctataaggatccggcacgtccaaagatccaaaagacctgtactttcaaggagcttgtgtacgagactgtgcgcgtccctggttgcgcgcaccacgccgattcgctgtacacctacccagttgccacccagtgtcactgcggaaaatgcgactcagatagcacggactgcactgtgcggggactcggaccttcgtattgctcttttggcgagatgaaagaa

SEQ ID NO: 27268 - DNA, 387 bp, Artificial Sequence
  derived and/or modified sequence
atgaaaaccttgcagttcttttttctgttctgttgctggaaggccatctgttgcaacagttgcgagctgaccaatattacaattgccatcgagaaggaggagtgtcggttctgcattagcattaatacaacatggtgtgcaggctactgttacacacgggatctggtctataaagaccccgcccggcccaaaatccagaaaacttgtacttttaaagagctggtgtacgagacagttagagtgccagggtgcgcgcaccatgcggactcattgtatacttatccagttgctacacaatgtcactgtgggaaatgcgacagcgactcaaccgactgtactgttagaggcttgggaccaagctactgcagctttggggaaatgaaagag

SEQ ID NO: 27269 - DNA, 387 bp, Artificial Sequence
  derived and/or modified sequence
atgaaaacactccagtttttcttcctgttctgctgctggaaggccatctgctgtaactcctgcgagcttacaaacattacaatcgccattgaaaaggaagagtgtcgattctgcattagcataaacaccacttggtgcgctggttactgttatactagggatctcgtgtacaaggatcctgcacggccaaaaatccagaagacctgtacttttaaagagctcgtgtacgagaccgttagggtgcctggctgcgcccatcacgccgattccctttacacttaccctgtggccacccagtgccactgtggaaaatgcgatagtgactccaccgactgtactgtgcgcgggctcggtccctcctactgcagctttggagagatgaaggag

SEQ ID NO: 27270 - DNA, 387 bp, Artificial Sequence
  derived and/or modified sequence
atgaaaacactacagttttttttcctgttctgctgttggaaggctatttgttgcaattcctgcgagctgactaatataacaatcgcaatcgaaaaggaagagtgcagattttgcatatccatcaacactacctggtgcgccgggtactgttatactagggacctggtctataaggatccagctcgacccaagatacagaaaacctgtactttcaaagaactggtctatgagaccgttagagttcctggctgcgctcaccatgccgactccctgtacacctatcccgttgccactcagtgccactgcggcaaatgcgatagcgacagcaccgactgcaccgtgcggggactaggcccatcttattgttctttcggggaaatgaaagaa

SEQ ID NO: 27271 - DNA, 387 bp, Artificial Sequence
  derived and/or modified sequence
atgaaaaccctgcagttctttttccttttttgctgctggaaggcgatttgttgtaacagctgtgagcttactaacattaccatcgcaattgagaaggaagagtgccgattttgtatttcgattaacactacctggtgtgcaggctattgttacactcgtgatctggtctacaaagatcctgccagaccaaagatccaaaagacttgcactttcaaagaactggtctacgaaaccgtcagagtgcctggttgtgcccaccacgcggatagcctgtacacgtaccctgtcgcaacgcaatgtcattgtggaaagtgtgacagcgatagcactgactgcaccgtgagaggactggggccttcttactgctcatttggtgagatgaaggaa

SEQ ID NO: 27272 - DNA, 387 bp, Artificial Sequence
  derived and/or modified sequence
atgaaaactctccagttcttttttctcttttgctgttggaaggctatttgttgtaactcgtgcgaacttaccaacattactatagccatcgaaaaggaagagtgcagattctgtatttccataaacactacgtggtgtgctgggtactgttacacccgtgacctcgtctacaaggatccagccagaccaaagatccagaaaacctgcacttttaaggagcttgtgtatgaaaccgtgagggtgccaggatgtgcccatcatgcagattcactctacacttaccctgtggccacgcaatgccactgtgggaaatgcgacagcgattcgaccgattgtactgtcagaggactgggaccaagctactgctcattcggcgaaatgaaggaa

SEQ ID NO: 27273 - DNA, 387 bp, Artificial Sequence
  derived and/or modified sequence
atgaagaccctgcaatttttctttctgttttgctgctggaaggctatctgctgcaattcctgcgaattgaccaacatcacgatcgcgattgaaaaggaggagtgtcgattctgtatctccattaacaccacctggtgcgcggggtactgctatacccgggacctggtctacaaggatccggccagaccaaagatccaaaagacttgtactttcaaagagctcgtgtacgaaaccgtcagagtgccgggatgtgcgcaccatgcggatagcctttacacctacccggttgcgacccagtgccattgcggcaagtgtgactcagattcaactgattgcaccgtcaggggactcggcccatcgtactgctccttcggagagatgaaggag

SEQ ID NO: 27274 - DNA, 387 bp, Artificial Sequence
  derived and/or modified sequence
atgaagacgcttcaattcttttttcttttttgttgctggaaggcaatttgctgtaactcttgtgaacttacgaatattactattgcaatagagaaagaagaatgcaggttttgtatctcaatcaatacgacttggtgtgcgggatattgctacacacgcgacctggtatataaagaccctgcacgaccgaaaattcaaaaaacgtgcacattcaaggagctcgtttatgaaacggtgcgggttccaggctgcgcacatcacgcggatagtttgtacacgtatcctgttgctactcaatgtcattgtggaaagtgtgactcagacagtaccgactgcactgtcagaggacttgggccatcttattgttcatttggcgaaatgaaggag

SEQ ID NO: 27275 - DNA, 387 bp, Artificial Sequence
  derived and/or modified sequence
atgaaaactctccaattcttcttcttgttctgctgttggaaggcaatctgctgtaattcgtgcgaactcaccaatatcaccattgcgattgaaaaggaggagtgccgcttttgcatctctatcaacaccacctggtgcgcaggttactgctacactcgggacctggtgtataaggatcccgctcggcctaaaatccagaaaacttgtactttcaaagagctggtgtacgaaaccgtgagagtgccaggctgcgcacaccatgcagattcgctgtatacctacccggtggcgacgcaatgtcattgcggtaagtgcgactccgattcaaccgactgcactgtccggggccttggtccttcctactgctcatttggggaaatgaaggaa

SEQ ID NO: 27276 - DNA, 387 bp, Artificial Sequence
  derived and/or modified sequence
atgaaaaccctccaatttttcttccttttttgctgctggaaggcgatttgttgtaattcttgtgaattaacaaacattacaatcgcaatcgaaaaggaagaatgcaggttttgcatcagcataaataccacctggtgcgccggatattgttacacaagagacctcgtctataaagatcccgcacgacctaaaattcagaaaacctgtacctttaaggagctcgtctatgaaacagtgcgggtgcctggatgcgctcatcatgccgatagtctttacacttaccctgttgccacccagtgccactgcgggaaatgtgatagcgacagtaccgactgtacggtgagggggcttgggccatcctactgttctttcggcgaaatgaaagag

SEQ ID NO: 27277 - DNA, 387 bp, Artificial Sequence
  derived and/or modified sequence
atgaaaaccctgcaattcttctttctgttctgttgctggaaagcaatctgctgcaactcatgcgaactcactaatatcactatcgctatcgaaaaggaggaatgccgcttctgtatctccatcaacactacttggtgtgctggatactgttacactcgcgatctggtgtacaaagacccagcaagaccgaagatccagaaaacttgtactttcaaggagctcgtgtacgaaactgttagggtcccaggatgcgcccatcacgccgactcgctgtatacttacccggtggccactcagtgtcattgtggaaaatgcgattcggacagcaccgattgcaccgtgcggggtttgggaccgagctactgctccttcggagaaatgaaggaa

SEQ ID NO: 27278 - DNA, 387 bp, Artificial Sequence
  derived and/or modified sequence
atgaaaactctccagttcttcttcctcttttgctgctggaaagcaatctgttgtaactcctgtgaactaaccaacatcaccatagctatcgagaaagaagagtgccgattttgcatcagtatcaacaccacttggtgtgccggctactgttataccagggatctggtgtacaaggaccccgcgcggcctaaaatacagaagacatgcacattcaaagaattggtctatgagacagttcgcgtgcctgggtgcgcccaccatgctgactccctgtacacgtatccagtcgctacgcagtgccattgcgggaaatgcgatagcgactcaactgattgtacagtgcgcgggcttggtcccagctactgcagctttggtgagatgaaagaa

SEQ ID NO: 27279 - DNA, 387 bp, Artificial Sequence
  derived and/or modified sequence
atgaaaactcttcaattcttttttctcttttgttgttggaaggccatatgttgtaactcgtgtgaactgactaatatcaccattgctattgagaaagaagaatgccgcttttgtatctcaataaacaccacttggtgcgcagggtactgctacactagggatcttgtgtacaaagaccctgcaaggcccaaaatacaaaagacctgtacctttaaagagctggtgtacgaaaccgtgagagtgcctggctgcgcccaccacgccgattccctttacacttaccctgtggcaacccagtgtcattgtggtaagtgcgactcagatagcactgattgcactgtgcggggtctgggcccatcgtactgttcgtttggagaaatgaaggaa

SEQ ID NO: 27280 - DNA, 387 bp, Artificial Sequence
  derived and/or modified sequence
atgaagacattgcagttcttttttctgttctgttgttggaaagccatatgctgtaatagttgcgagctcaccaatataacaattgcgatcgagaaggaagaatgtagattctgtataagcatcaatacgacctggtgcgcaggctactgttatacccgcgacttggtttataaggacccggccagacccaagatccaaaagacctgcactttcaaggaactggtatatgagaccgtgagggtaccggggtgcgcccaccatgctgatagcttgtatacataccccgtggctactcagtgccattgcgggaagtgtgactctgatagcactgactgcaccgttaggggacttggcccatcatactgttcattcggggaaatgaaggag

SEQ ID NO: 27281 - DNA, 387 bp, Artificial Sequence
  derived and/or modified sequence
atgaaaactctgcagtttttctttctgttctgctgttggaaggctatctgctgcaatagctgcgaattgacgaacataaccatcgcgatcgaaaaagaagaatgtcggttctgcatttcaatcaacactacctggtgcgccggctactgctacactagggatctggtttacaaggacccggcacgacctaagatccaaaagacttgcaccttcaaggagctcgtatacgaaaccgtgcgggtgcccggatgtgctcatcacgccgatagcctctacacctatccagtcgccactcaatgccactgcgggaagtgcgactctgactcgaccgactgtactgtgagaggactcggcccgagctattgttccttcggagaaatgaaggaa

SEQ ID NO: 27282 - DNA, 390 bp, Artificial Sequence
  derived and/or modified sequence
atgaagaccctgcagttcttcttcctgttctgctgctggaaggccatctgctgcaacagctgcgagctgaccaacatcaccatcgccatcgagaaggaggagtgcagattctgcatcagcatcaacaccacctggtgcgccggctactgctacaccagagacctggtgtacaaggaccccgccagacccaagatccagaagacctgcaccttcaaggagctggtgtacgagaccgtgagagtgcccggctgcgcccaccacgccgacagcctgtacacctaccccgtggccacccagtgccactgcggcaagtgcgacagcgacagcaccgactgcaccgtgagaggcctgggccccagctactgcagcttcggcgagatgaaggagtag

SEQ ID NO: 27283 - DNA, 533 bp, Artificial Sequence
  derived and/or modified sequence
gggaaataagagagaaaagaagagtaagaagaaatataagagccaccatgaaaacacttcaattcttcttcctcttttgttgctggaaggctatctgctgcaattcgtgcgaactgacaaacatcaccattgcgattgaaaaggaagagtgtcgattctgtatttccatcaacactacatggtgtgccgggtactgttatacgcgggatttggtctacaaagacccggccagaccaaagatccagaaaacgtgcacctttaaggagctggtgtacgagacagtccgcgtacccggttgtgcgcaccacgcggacagcctctatacgtaccctgtggcaacccagtgccattgtggaaagtgcgactcggattcgacggattgcactgtgaggggcttggggccctcatattgctcatttggagagatgaaagagtgataagctgccttctgcggggcttgccttctggccatgcccttcttctctcccttgcacctgtacctcttggtctttgaataaagcctgagtaggaag

SEQ ID NO: 27284 - DNA, 390 bp, Artificial Sequence
  derived and/or modified sequence
atgaagacactccaatttttctttcttttttgttgctggaaggccatttgctgtaatagttgcgagctgacaaatattaccattgcaattgaaaaagaggaatgtcggttttgtatatctattaacactacatggtgtgcagggtactgctacacacgcgatctcgtttacaaagacccggcccggcctaagattcagaagacctgtactttcaaggaactcgtttacgagacggttagagtacccggctgtgcccatcatgccgacagcctctacacctatccggttgctacccaatgtcactgtggaaagtgcgatagtgacagcaccgattgcactgtgagagggctgggtccatcctactgctcttttggagagatgaaagagtag

SEQ ID NO: 27285 - DNA, 390 bp, Artificial Sequence
  derived and/or modified sequence
atgaagacactccagttcttcttcctgttttgctgttggaaggcaatttgctgcaattcatgcgaacttacaaacatcaccatcgccatagagaaggaggaatgtagattctgtatttcaattaatacaacctggtgtgccggttactgctacaccagggacctggtatataaggatccagctcgacctaaaattcagaaaacatgcacttttaaagaactagtatatgagactgtccgggtcccaggatgtgctcaccatgcagactcactgtatacctacccggttgcaacacaatgtcactgcgggaagtgtgatagtgatagcactgactgcacagtaagagggctcggtccgagctattgcagtttcggggagatgaaggaatag

SEQ ID NO: 27286 - DNA, 390 bp, Artificial Sequence
  derived and/or modified sequence
atgaaaactttacagtttttcttccttttctgctgctggaaagctatttgttgcaattcatgcgagctgactaatattacaattgccatcgagaaggaagaatgcaggttttgcatttcgattaataccacgtggtgtgccggctactgctatacaagggatcttgtgtataaggaccccgcacggcctaagatccaaaagacttgtaccttcaaggaactcgtctacgaaaccgtgcgggtcccaggatgcgcccaccatgctgactcattgtatacttatcccgtggcgacccagtgccattgtggcaaatgtgactccgattcaactgactgtactgtgcgcggccttggcccctcctactgctcatttggagagatgaaagagtag

SEQ ID NO: 27287 - DNA, 390 bp, Artificial Sequence
  derived and/or modified sequence
atgaagaccctgcagttcttcttcctgttctgctgctggaaggccatctgctgcaacagctgtgagctgaccaacatcaccatcgccatcgagaaggaggagtgccgcttctgcatcagcatcaacaccacctggtgtgccggctactgctacacccgggacctggtgtacaaggaccctgcccggcccaagatccagaagacctgcaccttcaaggagctggtgtatgagaccgtgcgggtgcccggctgtgcccaccacgccgacagcctgtacacctaccctgtggccacccagtgccactgtgggaaatgtgacagcgacagcacagactgcaccgtgcggggcctgggccccagctactgcagctttggagagatgaaggagtag

SEQ ID NO: 27288 - DNA, 1698 bp, Artificial Sequence
  derived and/or modified sequence
acagctcttgccaggcaaggcagccgaccacaggtgagtcttggcatctaccgttttcaagtgaccaggatgaagacactccagtttttcttccttttctgttgctggaaagcaatctgctgcaatagctgtgagctgaccaacatcaccattgcaatagagaaagaagaatgtcgtttctgcataagcatcaacaccacttggtgtgctggctactgctacaccagggatctggtgtataaggacccagccaggcccaaaatccagaaaacatgtaccttcaaggaactggtatacgaaacagtgagagtgcccggctgtgctcaccatgcagattccttgtatacatacccagtggccacccagtgtcactgtggcaagtgtgacagcgacagcactgattgtactgtgcgaggcctggggcccagctactgctcctttggtgaaatgaaagaataaagatcagtggacatttcaggccacatacccttgtcctgaaggaccaagatattcaaaaagtctgtgtgtgtgcaatgtgcccaggggacaaaccactggatcaggggattcagactctactgatccctggtctactggcagagggaactctgggaattgagagtgctgggggccaggactccatcatgattcagctctatattcctaggtctgatttcataaggtttattcagtcttaactcacagacttgtgcctggtttcttctttaaaaatcttagaaatcttctcaggcaatgcctctctcttagggggaaacataagcctagaaggaggaagcagtaatgggagtgagtgaaagaactaactgcagcagtcttctggtagactcttgggccctctagagcaaggtcagcatcttcagcattgtagcgtcaatgcctagcactctgcctggaacttagaaacacaacaatgacttctttagatcagaaaggtcaagggtagaaaatactggaagacgatgtttgaggtaagctgatgaggctgcccgcagccacaccagtcccatgaaagttagtggcatcagttccacctcgccttttctccagcacatggagtattgagacatgatgtatctttctgaattgtttggtacagatggggagtaacagagctcaagatttccaagctattactaccaagcctgttagttaagggcaaaggcaagaaattgtaatttggggctgtggaaattagcctgcctctattcattacttaaacaaattgatcacatgctactaggctcctgcaaaactcctttttgagataaagggaaaaaaccaaactatctcaccctaccctccctaggatccacttctttggaatgacaaaggatttgaaagtaggtttgaaagcagtttcagcaatttaataaatataattaatttgtctacaaatatatttgtataaataaatagctcctttagaaagaattagccatgggggacgaggggaaactgctgttttctaggatcctgtctacatcaatcttctattttatccatccatgttctcccaaatctgtgctttctttcaacaggttatatattaaaactatttcatgagttgatttcttttaaacgtgttaactgtcttagttatgcactcagtttcacactcatattgtttaactaatttatttaaatcttatttttttaataaagatgctagccaccaga

SEQ ID NO: 27289 - DNA, 1890 bp, Artificial Sequence
  derived and/or modified sequence
acagctcttgccaggcaaggcagccgaccacagaccaggatgaagacactccagtttttcttccttttctgttgctggaaagcaatctgctgcaatagctgtgagctgaccaacatcaccattgcaatagagaaagaagaatgtcgtttctgcataagcatcaacaccacttggtgtgctggctactgctacaccagggatctggtgtataaggacccagccaggcccaaaatccagaaaacatgtaccttcaaggaactggtatacgaaacagtgagagtgcccggctgtgctcaccatgcagattccttgtatacatacccagtggccacccagtgtcactgtggcaagtgtgacagcgacagcactgattgtactgtgcgaggcctggggcccagctactgctcctttggtgaaatgaaagaataaagatcagtggacatttcaggccacatacccttgtcctgaaggaccaagatattcaaaaagtctgtgtgtgtgcaatgtgcccaggggacaaaccactggatcaggggattcagactctactgatccctggtctactggcagagggaactctgggaattgagagtgctgggggccaggactccatcatgattcagctctatattcctaggtctgatttcataaggtttattcagtcttaactcacagacttgtgcctggtttcttctttaaaaatcttagaaatcttctcaggcaatgcctctctcttagggggaaacataagcctagaaggaggaagcagtaatgggagtgagtgaaagaactaactgcagcagtcttctggtagactcttgggccctctagagcaaggtcagcatcttcagcattgtagcgtcaatgcctagcactctgcctggaacttagaaacacaacaatgacttctttagatcagaaaggtcaagggtagaaaatactggaagacgatgtttgaggtaagctgatgaggctgcccgcagccacaccagtcccatgaaagttagtggcatcagttccacctcgccttttctccagcacatggagtattgagacatgatgtatctttctgaattgtttggtacagatggggagtaacagagctcaagatttccaagctattactaccaagcctgttagttaagggcaaaggcaagaaattgtaatttggggctgtggaaattagcctgcctctattcattacttaaacaaattgatcacatgctactaggctcctgcaaaactcctttttgagataaagggaaaaaaccaaactatctcaccctaccctccctaggatccacttctttggaatgacaaaggatttgaaagtaggtttgaaagcagtttcagcaatttaataaatataattaatttgtctacaaatatatttgtataaataaatagctcctttagaaagaattagccatgggggacgaggggaaactgctgttttctaggatcctgtctacatcaatcttctattttatccatccatgttctcccaaatctgtgctttctttcaacaggttatatattaaaactatttcatgagttgatttcttttaaacgtgttaactgtcttagttatgcactcagtttcacactcatattgtttaactaatttatttaaatcttatttttttaataaagatgctagccaccagagtcacaggcttggattgttttatgtacaaacagatgacttagatattctgtattttataatattagtggaatgaaatcttaaaatataattcccagtgtttctataaatattacctttccttatctttggagatattaaaaataattttgttggatttctgaagtgttttgtcacttaaatttcctgtcattttttgaagacattttctgatgtaatttggg

SEQ ID NO: 27290 - DNA, 1368 bp, Artificial Sequence
  derived and/or modified sequence
tgggcttcattgtttgcttcccagaccaggatgaagacactccagtttttcttccttttctgttgctggaaagcaatctgctgcaatagctgtgagctgaccaacatcaccattgcaatagagaaagaagaatgtcgtttctgcataagcatcaacaccacttggtgtgctggctactgctacaccagggatctggtgtataaggacccagccaggcccaaaatccagaaaacatgtaccttcaaggaactggtatacgaaacagtgagagtgcccggctgtgctcaccatgcagattccttgtatacatacccagtggccacccagtgtcactgtggcaagtgtgacagcgacagcactgattgtactgtgcgaggcctggggcccagctactgctcctttggtgaaatgaaagaataaagatcagtggacatttcaggccacatacccttgtcctgaaggaccaagatattcaaaaagtctgtgtgtgtgcaatgtgcccaggggacaaaccactggatcaggggattcagactctactgatccctggtctactggcagagggaactctgggaattgagagtgctgggggccaggactccatcatgattcagctctatattcctaggtctgatttcataaggtttattcagtcttaactcacagacttgtgcctggtttcttctttaaaaatcttagaaatcttctcaggcaatgcctctctcttagggggaaacataagcctagaaggaggaagcagtaatgggagtgagtgaaagaactaactgcagcagtcttctggtagactcttgggccctctagagcaaggtcagcatcttcagcattgtagcgtcaatgcctagcactctgcctggaacttagaaacacaacaatgacttctttagatcagaaaggtcaagggtagaaaatactggaagacgatgtttgaggtaagctgatgaggctgcccgcagccacaccagtcccatgaaagttagtggcatcagttccacctcgccttttctccagcacatggagtattgagacatgatgtatctttctgaattgtttggtacagatggggagtaacagagctcaagatttccaagctattactaccaagcctgttagttaagggcaaaggcaagaaattgtaatttggggctgtggaaattagcctgcctctattcattacttaaacaaattgatcacatgctactaggctcctgcaaaactcctttttgagataaagggaaaaaaccaaactatctcaccctaccctccctaggatccacttctttggaatgacaaaggatttgaaagtaggtttgaaagcagtttcagcaatttaataaatataattaattt

SEQ ID NO: 27291 - DNA, 390 bp, Artificial Sequence
  derived and/or modified sequence
atgaagaccctgcagttcttcttcctgttctgctgctggaaggccatttgctgtaactcgtgcgagctgacgaacatcacgatagctattgaaaaggaagagtgtcggttctgcatcagtatcaatacgacctggtgcgccggctattgttacacaagggatcttgtgtataaggacccagctcgccctaaaattcagaaaacctgtacctttaaggagttggtgtacgagacggtgcgcgttcctggctgtgcacaccatgcggacagcctgtatacataccccgtcgcaacccagtgccattgcgggaagtgcgattcagatagcacagattgtactgtgaggggactgggaccctcatactgttcctttggtgaaatgaaagaatag

SEQ ID NO: 27292 - DNA, 390 bp, Artificial Sequence
  derived and/or modified sequence
atgaagaccctgcagttcttcttcctgttctgctgctggaaggccatctgctgtaacagctgcgagttgaccaatatcactatcgcaattgagaaagaggaatgtaggttttgtatctcaatcaacactacttggtgcgccggatattgttatacaagggatctggtgtataaggatcccgcaaggccaaagattcagaaaacctgtaccttcaaagagctggtgtacgaaaccgtacgcgttcctggttgcgcccaccacgccgactccctgtatacatatcccgtggcgactcagtgccattgtggaaagtgcgactcagactctacggattgcaccgtgcggggactcgggccaagctactgcagcttcggcgagatgaaagaatag

SEQ ID NO: 27293 - DNA, 390 bp, Artificial Sequence
  derived and/or modified sequence
atgaagaccctgcagttcttcttcctgttctgctgctggaaggccatatgctgcaattcttgcgagctgactaacattacaattgccatcgaaaaagaagagtgccgcttctgcatctcgataaacactacatggtgcgctgggtattgttacacccgggatctggtgtataaggaccctgcccggcctaagatccagaaaacctgcactttcaaggagctggtgtatgagacagtcagagtaccagggtgtgctcaccatgcggattccctatatacctacccagttgcgacccaatgccactgcgggaaatgtgacagcgacagcactgattgtaccgtgcgtgggctgggaccgagctattgcagtttcggagagatgaaggaatag

SEQ ID NO: 27294 - DNA, 390 bp, Artificial Sequence
  derived and/or modified sequence
atgaaaaccttgcagtttttctttctgttctgttgctggaaggcaatctgttgtaactcttgtgagctcaccaacattactatcgccatcgagaaggaggagtgtcgattttgtatcagcatcaataccacatggtgcgcgggttactgctatacccgggaccttgtctataaagatcccgctcgacccaagattcagaaaacatgtactttcaaggagttggtatatgaaacagtgagggtgcccggttgtgcacaccatgccgacagcttatatacctatccggtagccacacagtgtcattgtggaaagtgtgactccgattctactgattgcactgttagggggctgggtccaagttactgctctttcggcgaaatgaaagagtag

SEQ ID NO: 27295 - DNA, 390 bp, Artificial Sequence
  derived and/or modified sequence
atgaaaacacttcaattctttttcctgttctgttgctggaaagccatatgctgcaacagctgcgagctgaccaacatcactattgcaattgagaaagaggaatgcaggttctgtatatccattaatactacctggtgcgccggatactgttacacacgtgacctggtgtacaaagatcccgcaagacccaagattcagaaaacatgtacgttcaaggagctggtctatgaaacagtcagagtccctgggtgtgcccaccacgccgactctctctacacctacccagtggccactcaatgtcattgcggcaagtgcgatagtgatagcacagattgcacagtacggggtttggggccttcttactgcagctttggtgaaatgaaggagtag

SEQ ID NO: 27296 - DNA, 390 bp, Artificial Sequence
  derived and/or modified sequence
atgaagacattgcaattcttctttctcttctgctgttggaaggcgatctgctgcaatagctgtgaactgacaaatattactattgcaatcgagaaagaagaatgtcggttctgcatatccatcaacaccacctggtgtgcgggatactgctatacccgtgacctggtgtacaaggatccagctcggccaaagatccagaaaacttgcacattcaaggaactggtgtatgagaccgtgcgggtccccggttgtgctcatcacgccgatagtctttatacctaccctgttgccacacaatgccactgtggaaaatgcgacagcgatagtaccgattgcactgttagaggcctgggaccaagttattgtagcttcggcgaaatgaaagagtag

SEQ ID NO: 27297 - DNA, 390 bp, Artificial Sequence
  derived and/or modified sequence
atgaagactttgcagttcttctttctattttgttgttggaaagcaatttgctgtaatagctgtgaacttacgaatatcacgatcgcaattgaaaaggaagaatgtagattctgtatcagtatcaatacaacctggtgcgctggctattgttatactcgcgatctggtttataaggatccagcccggcccaaaatccagaaaacctgtaccttcaaagagcttgtatatgaaaccgtccgagtgcctggctgtgctcaccatgcagatagtctctatacctacccagtggcgacacagtgccattgcggaaaatgtgacagcgacagcactgattgtaccgtccgggggctaggaccgagttattgcagtttcggcgagatgaaagagtag

SEQ ID NO: 27298 - DNA, 390 bp, Artificial Sequence
  derived and/or modified sequence
atgaagacactgcagttttttttcttattttgttgttggaaagccatatgttgcaacagctgcgaattaactaacattacaattgcaattgaaaaagaggaatgtcgtttttgtatttcgatcaataccacttggtgcgccggatattgttatacacgcgacctggtctacaaggaccctgcccggccaaagatccaaaagacctgtacatttaaggaactggtgtatgaaacggtcagggtgccgggatgtgcacatcatgccgatagcctgtacacttatccagtagcaactcagtgtcattgcggcaaatgcgattcagactccacagactgcaccgtgcgaggcctgggcccctcttactgctcattcggagagatgaaggagtag

SEQ ID NO: 27299 - DNA, 390 bp, Artificial Sequence
  derived and/or modified sequence
atgaagacactacagttcttttttctgttttgctgctggaaagccatctgctgcaattcttgcgagctcacaaacataaccattgcaattgaaaaagaagagtgcaggttttgcatttcgattaatactacctggtgcgccggatattgctatactagagatctcgtctacaaggatcctgcccgtccgaaaatccagaagacttgcacatttaaagagttggtatatgaaaccgtgcgcgtacctggatgtgcccaccacgccgacagtctctatacctacccggtagcaactcaatgtcattgcgggaaatgtgactccgacagcaccgattgtaccgtgagagggttaggcccctcctattgctcgttcggcgagatgaaggagtag

SEQ ID NO: 27300 - DNA, 390 bp, Artificial Sequence
  derived and/or modified sequence
atgaaaactcttcagttcttctttctcttctgttgttggaaggccatctgctgtaactcatgcgaactgaccaatattacaatagcgatcgaaaaagaggagtgtaggttttgcatctctatcaacactacctggtgtgctggctactgttacactcgagatcttgtttacaaagatcccgcgcgacccaaaatccaaaagacctgcacttttaaagagcttgtatatgaaaccgtgcgcgtacccggatgcgctcaccatgcggactccctctacacctaccctgtagctacacaatgtcattgtggcaagtgtgattccgacagtacagactgtacagtcagaggtttgggtcccagctattgtagttttggcgagatgaaggaatag

SEQ ID NO: 27301 - DNA, 390 bp, Artificial Sequence
  derived and/or modified sequence
atgaaaacactgcagtttttttttctgttttgctgttggaaggccatctgctgcaattcatgcgagttgaccaatattactattgccattgagaaagaagagtgtcgtttctgtatcagtattaataccacttggtgtgcaggctactgctacactagggacttagtctataaagaccctgctcgacctaaaatccagaaaacctgcacttttaaagagctggtttatgagacagtgcgagttccaggatgcgctcaccatgctgattcactgtacacctaccctgtcgctacacaatgccactgtggtaaatgtgactcagatagtacagattgcacagtaagaggcctgggaccttcatactgctcattcggtgaaatgaaagaatag

SEQ ID NO: 27302 - DNA, 390 bp, Artificial Sequence
  derived and/or modified sequence
atgaagacactgcaattctttttccttttctgctgctggaaagccatttgttgtaacagctgtgagctgacgaacatcaccatcgccattgaaaaagaggaatgccgattttgtatctcaatcaataccacctggtgtgccggctactgttataccagagacctcgtctataaagatccagcccgtccgaagatccagaaaacttgtacctttaaagaactggtatacgagaccgtacgagtcccgggttgcgcacatcacgcagattctctctacacctatcctgttgctacccaatgtcactgtggcaaatgtgattcagactcaactgattgtaccgttcgaggtctgggacccagttactgttcatttggtgagatgaaggagtag

SEQ ID NO: 27303 - RNA, 533 nt, Artificial Sequence
  derived and/or modified sequence
gggaaauaagagagaaaagaagaguaagaagaaauauaagagccaccaugaaaacacuucaauucuucuuccucuuuuguugcuggaaggcuaucugcugcaauucgugcgaacugacaaacaucaccauugcgauugaaaaggaagagugucgauucuguauuuccaucaacacuacauggugugccggguacuguuauacgcgggauuuggucuacaaagacccggccagaccaaagauccagaaaacgugcaccuuuaaggagcugguguacgagacaguccgcguacccgguugugcgcaccacgcggacagccucuauacguacccuguggcaacccagugccauuguggaaagugcgacucggauucgacggauugcacugugaggggcuuggggcccucauauugcucauuuggagagaugaaagagugauaagcugccuucugcggggcuugccuucuggccaugcccuucuucucucccuugcaccuguaccucuuggucuuugaauaaagccugaguaggaag

SEQ ID NO: 27304 - RNA, 390 nt, Artificial Sequence
  derived and/or modified sequence
augaagacuuugcaguucuucuuucuauuuuguuguuggaaagcaauuugcuguaauagcugugaacuuacgaauaucacgaucgcaauugaaaaggaagaauguagauucuguaucaguaucaauacaaccuggugcgcuggcuauuguuauacucgcgaucugguuuauaaggauccagcccggcccaaaauccagaaaaccuguaccuucaaagagcuuguauaugaaaccguccgagugccuggcugugcucaccaugcagauagucucuauaccuacccaguggcgacacagugccauugcggaaaaugugacagcgacagcacugauuguaccguccgggggcuaggaccgaguuauugcaguuucggcgagaugaaagaguag

SEQ ID NO: 27305 - RNA, 390 nt, Artificial Sequence
  derived and/or modified sequence
augaagacacugcaguuuuuuuucuuauuuuguuguuggaaagccauauguugcaacagcugcgaauuaacuaacauuacaauugcaauugaaaaagaggaaugucguuuuuguauuucgaucaauaccacuuggugcgccggauauuguuauacacgcgaccuggucuacaaggacccugcccggccaaagauccaaaagaccuguacauuuaaggaacugguguaugaaacggucagggugccgggaugugcacaucaugccgauagccuguacacuuauccaguagcaacucagugucauugcggcaaaugcgauucagacuccacagacugcaccgugcgaggccugggccccucuuacugcucauucggagagaugaaggaguag

SEQ ID NO: 27306 - RNA, 390 nt, Artificial Sequence
  derived and/or modified sequence
augaagacacuacaguucuuuuuucuguuuugcugcuggaaagccaucugcugcaauucuugcgagcucacaaacauaaccauugcaauugaaaaagaagagugcagguuuugcauuucgauuaauacuaccuggugcgccggauauugcuauacuagagaucucgucuacaaggauccugcccguccgaaaauccagaagacuugcacauuuaaagaguugguauaugaaaccgugcgcguaccuggaugugcccaccacgccgacagucucuauaccuacccgguagcaacucaaugucauugcgggaaaugugacuccgacagcaccgauuguaccgugagaggguuaggccccuccuauugcucguucggcgagaugaaggaguag

SEQ ID NO: 27307 - RNA, 390 nt, Artificial Sequence
  derived and/or modified sequence
augaaaacucuucaguucuucuuucucuucuguuguuggaaggccaucugcuguaacucaugcgaacugaccaauauuacaauagcgaucgaaaaagaggaguguagguuuugcaucucuaucaacacuaccuggugugcuggcuacuguuacacucgagaucuuguuuacaaagaucccgcgcgacccaaaauccaaaagaccugcacuuuuaaagagcuuguauaugaaaccgugcgcguacccggaugcgcucaccaugcggacucccucuacaccuacccuguagcuacacaaugucauuguggcaagugugauuccgacaguacagacuguacagucagagguuugggucccagcuauuguaguuuuggcgagaugaaggaauag

SEQ ID NO: 27308 - RNA, 390 nt, Artificial Sequence
  derived and/or modified sequence
augaaaacacugcaguuuuuuuuucuguuuugcuguuggaaggccaucugcugcaauucaugcgaguugaccaauauuacuauugccauugagaaagaagagugucguuucuguaucaguauuaauaccacuuggugugcaggcuacugcuacacuagggacuuagucuauaaagacccugcucgaccuaaaauccagaaaaccugcacuuuuaaagagcugguuuaugagacagugcgaguuccaggaugcgcucaccaugcugauucacuguacaccuacccugucgcuacacaaugccacugugguaaaugugacucagauaguacagauugcacaguaagaggccugggaccuucauacugcucauucggugaaaugaaagaauag

SEQ ID NO: 27309 - RNA, 390 nt, Artificial Sequence
  derived and/or modified sequence
augaagacacugcaauucuuuuuccuuuucugcugcuggaaagccauuuguuguaacagcugugagcugacgaacaucaccaucgccauugaaaaagaggaaugccgauuuuguaucucaaucaauaccaccuggugugccggcuacuguuauaccagagaccucgucuauaaagauccagcccguccgaagauccagaaaacuuguaccuuuaaagaacugguauacgagaccguacgagucccggguugcgcacaucacgcagauucucucuacaccuauccuguugcuacccaaugucacuguggcaaaugugauucagacucaacugauuguaccguucgaggucugggacccaguuacuguucauuuggugagaugaaggaguag

SEQ ID NO: 27310 - protein, 375 aa, Artificial Sequence
  derived and/or modified sequence
MSLMVISMACVGFFLLQGAWTHEGGQDKPLLSAWPSAVVPRGGHVTLLCRSRLGFTIFSLYKEDGVPVPELYNKIFWKSILMGPVTPAHAGTYRCRGSHPRSPIEWSAPSNPLVIVVTGLFGKPSLSAQPGPTVRTGENVALSCSSRSSFDMYHLSREGRAHEPRLPAVPSVDGTFQADFPLGPATHGGTYTCFSSLHDSPYEWSDPSDPLLVSVTGNSSSSSSSPTEPSSKTGIRRHLHILIGTSVAIILFIILFFFLLHCCCSNKKNAAVMDQGPAGDRTVNREDSDDQDPQEVTYAQLDHCVFTQTKITSPSQRPKAPPTDTTMYMELPNAKPRSLSPAHKHHSQALRGSSRETTALSQNRVASSHVPAAGI

SEQ ID NO: 27311 - DNA, 1632 bp, Artificial Sequence
  derived and/or modified sequence
atgtcgctcatggtcatcagcatggcgtgtgttgggttcttcttgctgcagggggcctggacacatgagggtggacaggacaagcccttgctgtctgcctggcccagcgctgtggtgcctcgaggaggacatgtgactcttctgtgtcgctctcgtcttgggtttaccatcttcagtctgtacaaagaagatggggtgcctgtccctgagctctacaacaaaatattctggaagagcatcctcatgggccctgtgacccctgcacacgcagggacctacagatgtcggggttcacacccgcgctcccccattgagtggtcggcacccagcaaccccctggtgatcgtggtcacaggtctatttgggaaaccttcactctcagcccagccgggccccacggttcgcacaggagagaacgtggccttgtcctgcagctccaggagctcatttgacatgtaccatctatccagggaggggagggcccatgaacctaggctccctgcagtgcccagcgtcgatggaacattccaggctgactttcctctgggccctgccacccacggagggacctacacatgcttcagctctctccatgactcaccctatgagtggtcagacccgagtgacccactgcttgtttctgtcacaggaaactcttcaagtagttcatcttcacccactgaaccaagctccaaaactggtatccgcagacacctgcacattctgattgggacctcagtggctatcatcctcttcatcatcctcttcttctttctccttcattgctgctgctccaacaaaaagaatgctgctgtaatggaccaagggcctgccggggacagaacagtgaacagggaggactctgatgatcaagaccctcaggaggtgacatatgcacagttggatcactgcgttttcacacagacaaaaatcacttccccttctcagaggcccaaggcacctccaacagataccaccatgtacatggaacttccaaatgctaagccaagatcattgtctcctgcccataagcaccacagtcaggccttgaggggatcttctagggagacaacagccctgtctcaaaaccgggttgctagctcccatgtaccagcagctggaatctgaaggcatcagtcttcatcttaggggatcgctcttcctcacaccacaaatctgaacatgcctctctcttgcttacaaatgtctaaggtccccactgcctgctggagagaagacacacacctttgcttagcccacaattctctatttcacttgacccctgcccacctctccaactgaactggcttacttcctagtctacttgaggctgcaatcacactgaggaactcacaattccagacatacaagaggctccctcttaacatggcactgagacacgtgctgttccaccctccctcatgctgtttcacctttcctcagactattttccagccttctgtcagtcagcagtgaaacttataaaattttttgtgatttcaatgtagctgtctccttttcaaataaacatgtctgccctcattgctttaggtaatgtgacactattcgctgaaagaaaccgctgttatcattaccatgtccacataaccccatctgttatccactgggttc

SEQ ID NO: 27312 - protein, 80 aa, Artificial Sequence
  derived and/or modified sequence
MKYPLMPLVNDLTFSFLVFWFCLPVGLLLLLIIWLRFLLSQDSEENDSSVCLDWEPWSKGPAEFCWKGTLHGQEKERPCW

SEQ ID NO: 27313 - protein, 192 aa, Artificial Sequence
  derived and/or modified sequence
MPLVNDLTFSFLVFWFCLPVGLLLLLIIWLRFLLSQDSEENDSSVCLDWEPWSKGPAEFCWKGTLHGQEKERPCCLVFLESAGQWQWQKWMGETCQGGKRTLATVVPPWNPQLISSSDRHVKASRGPSPSPASQMTSSPAGSRSSLGGHGSSEQAHGEKLANLIQRGLKAGLGRRVWVHIKEARVFPYPGDP

SEQ ID NO: 27314 - DNA, 243 bp, Artificial Sequence
  derived and/or modified sequence
atgaagtaccccctgatgcccctggtgaacgacctgaccttcagcttcctggtgttctggttctgcctgcccgtgggcctgctgctgctgctgatcatctggctgagattcctgctgagccaggacagcgaggagaacgacagcagcgtgtgcctggactgggagccctggagcaagggccccgccgagttctgctggaagggcaccctgcacggccaggagaaggagagaccctgctggtag

SEQ ID NO: 27315 - DNA, 579 bp, Artificial Sequence
  derived and/or modified sequence
atgcccctggtgaacgacctgaccttcagcttcctggtgttctggttctgcctgcccgtgggcctgctgctgctgctgatcatctggctgagattcctgctgagccaggacagcgaggagaacgacagcagcgtgtgcctggactgggagccctggagcaagggccccgccgagttctgctggaagggcaccctgcacggccaggagaaggagagaccctgctgcctggtgttcctggagagcgccggccagtggcagtggcagaagtggatgggcgagacctgccagggcggcaagagaaccctggccaccgtggtgcccccctggaacccccagctgatcagcagcagcgacagacacgtgaaggccagcagaggccccagccccagccccgccagccagatgaccagcagccccgccggcagcagaagcagcctgggcggccacggcagcagcgagcaggcccacggcgagaagctggccaacctgatccagagaggcctgaaggccggcctgggcagaagagtgtgggtgcacatcaaggaggccagagtgttcccctaccccggcgacccctag

SEQ ID NO: 27316 - DNA, 243 bp, Artificial Sequence
  derived and/or modified sequence
atgaaatatcctttaatgcccctggttaacgatcttacattcagtttcctcgtcttttggttctgcttacccgtgggcctcctcctgctcctgatcatctggttacggtttcttctgagccaggactcagaggaaaatgatagctccgtctgtctggactgggagccttggagcaagggacctgcagaattctgttggaagggaactctgcatggccaggaaaaagagcggccctgttggtag

SEQ ID NO: 27317 - DNA, 579 bp, Artificial Sequence
  derived and/or modified sequence
atgcctttggtgaacgacttaactttttcctttctggtgttctggttctgcctgcctgtcggccttctgctgcttctgataatttggttgagatttctgctgagccaggatagcgaagagaatgactcttcagtgtgcctcgattgggagccatggtcaaagggccccgctgaattttgctggaaaggtactctgcacggtcaggagaaagagcggccatgctgtcttgtgttcctggaatcagctgggcagtggcaatggcagaagtggatgggagagacttgccagggcggcaagcggaccctggccaccgtggtgcctccatggaacccacaactgattagttctagcgatcggcatgtgaaagccagtcgcgggccatccccatctcctgccagccagatgacaagttcaccggctgggtcgcggtcttcgttgggtggccacggttcttccgaacaggcccatggggagaagttggccaacttaatccagcgggggcttaaggcgggcctggggagaagggtttgggtgcacatcaaggaagcgagggtttttccataccctggagatccttag

SEQ ID NO: 27318 - DNA, 772 bp, Artificial Sequence
  derived and/or modified sequence
atggggcagccctgccagcccagcccaggctggcccagcttagccacacatgcgccatgaagtaccctttgatgccgctggtgaacgacctcacattttctttcctggttttctggttctgcctccctgtgggtttgctgttgttattgatcatctggctacgcttcttacttagccaagattcagaggaaaatgactccagtgtgtgcttggattgggagccctggagcaaaggcccagctgagttttgctggaaggggacactccacggccaagagaaggagaggccctgctggtgagcctgctgtgccaggtgaggcccttccaggggccagggggagcctcaaggcccacccaaagccttgggcagctgctatgtgggcaagaggctgcctccaccatattagagtttggttttcctggagtcagcagggcagtggcaatggcagaagtggatgggagagacttgccagggaggcaagaggactttggcaactgtggtgcctccctggaacccccaactcatctcctcttcagaccgacatgtgaaagcctccagaggtcccagcccttctccagcatcacagatgacctccagccctgcagggagccgctcaagtctgggagggcatgggagcagtgagcaggcccatggggagaaattggccaatttaattcagaggggtcttaaagcagggctgggccggagggtgtgggtccatattaaagaagcaagggtcttcccatacccgggggacccctgacaaaccta

SEQ ID NO: 27319 - DNA, 656 bp, Artificial Sequence
  derived and/or modified sequence
atggggcagccctgccagcccagcccaggctggcccagcttagccacacatgcgccatgaagtaccctttgatgccgctggtgaacgacctcacattttctttcctggttttctggttctgcctccctgtgggtttgctgttgttattgatcatctggctacgcttcttacttagccaagattcagaggaaaatgactccagtgtgtgcttggattgggagccctggagcaaaggcccagctgagttttgctggaaggggacactccacggccaagagaaggagaggccctgctgtttggttttcctggagtcagcagggcagtggcaatggcagaagtggatgggagagacttgccagggaggcaagaggactttggcaactgtggtgcctccctggaacccccaactcatctcctcttcagaccgacatgtgaaagcctccagaggtcccagcccttctccagcatcacagatgacctccagccctgcagggagccgctcaagtctgggagggcatgggagcagtgagcaggcccatggggagaaattggccaatttaattcagaggggtcttaaagcagggctgggccggagggtgtgggtccatattaaagaagcaagggtcttcccatacccgggggacccctgacaaacc

SEQ ID NO: 27320 - DNA, 243 bp, Artificial Sequence
  derived and/or modified sequence
atgaagtaccccctgatgcccctggtgaatgacctgaccttctccttcctggtgttctggttctgcctgcctgtgggcctgctgctgctgctgatcatctggctgcgcttcctgctgagccaggacagtgaagaaaatgacagctctgtgtgcctggactgggagccctggagcaaaggacctgctgagttctgctggaagggcaccctgcacggccaggagaaggagcggccctgctggtag

SEQ ID NO: 27321 - DNA, 579 bp, Artificial Sequence
  derived and/or modified sequence
atgcccctggtgaatgacctgaccttctccttcctggtgttctggttctgcctgcctgtgggcctgctgctgctgctgatcatctggctgcgcttcctgctgagccaggacagcgaggagaatgacagctctgtgtgcctggactgggagccctggagcaagggccctgctgagttctgctggaagggcaccctgcacggccaggagaaggagcggccctgctgcctggtgttcctggagagcgctggccagtggcagtggcagaagtggatgggagagacctgccagggcggcaagaggaccctggccaccgtggtgcccccctggaacccccagctgatcagcagcagtgacagacatgtgaaggccagccggggccccagccccagccctgccagccagatgaccagcagccctgctggcagccgcagcagcctgggcggccacggcagcagcgagcaggcccacggggagaagctggccaacctgatccagaggggcctgaaggccggcctgggccggcgggtgtgggtgcacatcaaggaggcccgggtcttcccctacccaggggacccctag

SEQ ID NO: 27322 - DNA, 243 bp, Artificial Sequence
  derived and/or modified sequence
atgaagtaccccctgatgcccctggtgaacgacctgaccttcagcttccttgttttttggttctgcctgcccgttggcctgctgcttcttctcattatttggttgcgcttcctgctttcacaggacagcgaagagaatgatagcagtgtgtgcctggattgggagccttggagcaaaggaccagcagaattctgttggaaggggacactccacgggcaggagaaagaacgcccttgctggtag

SEQ ID NO: 27323 - DNA, 579 bp, Artificial Sequence
  derived and/or modified sequence
atgcccctggtgaacgacctgaccttcagcttcctggtgttctggttttgcttgccagtgggattgctgctcttactgattatttggctgcgattcctcttgagccaggattccgaggaaaatgattcttctgtgtgtcttgactgggagccctggagtaaggggcccgctgagttttgctggaagggaacgctccatgggcaggaaaaagagcgcccttgctgtctcgtctttttggagtccgcaggacagtggcagtggcagaagtggatgggggaaacatgccaaggtggcaaaaggaccctcgcaaccgtggtccctccttggaatcctcagctgatctcatcctctgaccgccacgtgaaggcttcccgagggccgtcgccttctcctgcctctcagatgaccagcagcccagccgggagtagatcctccctaggcgggcacggttcatccgaacaagcccacggggagaagctggccaacctcattcaaaggggactgaaggctggccttggtcgcagggtgtgggtccatataaaggaggcccgagtcttcccttaccccggcgatccgtag

SEQ ID NO: 27324 - DNA, 243 bp, Artificial Sequence
  derived and/or modified sequence
atgaagtatcccttaatgccacttgtcaacgatctgactttcagcttcctggtgttctggttctgccttccggtggggctgcttctgctgctcatcatctggctcagattcctcctctcccaggatagtgaagaaaatgacagctcagtgtgcttagactgggagccctggtccaaaggcccagctgaattctgttggaaaggtacactgcacggtcaggagaaagagcgcccatgttggtag

SEQ ID NO: 27325 - DNA, 579 bp, Artificial Sequence
  derived and/or modified sequence
atgcctctcgtaaacgatctcaccttctcttttctcgtcttttggttttgcttgcctgttggactcctgctgctgctgatcatttggcttcgcttcctgctctctcaggattccgaagagaacgattcaagtgtgtgcttagattgggagccctggtcaaagggacccgctgagttttgctggaaggggaccctgcacggacaggagaaggaaaggccctgttgcctggttttcttagagtcagctggacagtggcaatggcagaagtggatgggagagacttgccagggcggaaaacgaaccctcgctacagtagtcccaccctggaacccccaactgatctcttcgagtgacagacatgtcaaagcctctcgcggtccaagtcccagccctgcctcacagatgacaagcagccctgcaggttctaggtcctctttgggtggacacggaagcagcgagcaggcccacggagagaagctcgccaacctcattcagagaggtttaaaggctggtctgggacgccgagtatgggtacacatcaaagaggccagggtcttcccataccctggggatccctag

SEQ ID NO: 27326 - protein, 3628 aa, Artificial Sequence
  derived and/or modified sequence
MVLESVVADLLNRFLGDYVENLNKSQLKLGIWGGNVALDNLQIKENALSELDVPFKVKAGQIDKLTLKIPWKNLYGEAVVATLEGLYLLVVPGASIKYDAVKEEKSLQDVKQKELSRIEEALQKAAEKGTHSGEFIYGLENFVYKDIKPGRKRKKHKKHFKKPFKGLDRSKDKPKEAKKDTFVEKLATQVIKNVQVKITDIHIKYEDDVTDPKRPLSFGVTLGELSLLTANEHWTPCILNEADKIIYKLIRLDSLSAYWNVNCSMSYQRSREQILDQLKNEILTSGNIPPNYQYIFQPISASAKLYMNPYAESELKTPKLDCNIEIQNIAIELTKPQYLSMIDLLESVDYMVRNAPYRKYKPYLPLHTNGRRWWKYAIDSVLEVHIRRYTQMWSWSNIKKHRQLLKSYKIAYKNKLTQSKVSEEIQKEIQDLEKTLDVFNIILARQQAQVEVIRSGQKLRKKSADTGEKRGGWFSGLWGKKESKKKDEESLIPETIDDLMTPEEKDKLFTAIGYSESTHNLTLPKQYVAHIMTLKLVSTSVTIRENKNIPEILKIQIIGLGTQVSQRPGAQALKVEAKLEHWYITGLRQQDIVPSLVASIGDTTSSLLKIKFETNPEDSPADQTLIVQSQPVEVIYDAKTVNAVVEFFQSNKGLDLEQITSATLMKLEEIKERTATGLTHIIETRKVLDLRINLKPSYLVVPQTGFHHEKSDLLILDFGTFQLNSKDQGLQKTTNSSLEEIMDKAYDKFDVEIKNVQLLFARAEETWKKCRFQHPSTMHILQPMDIHVELAKAMVEKDIRMARFKVSGGLPLMHVRISDQKMKDVLYLMNSIPLPQKSSAQSPERQVSSIPIISGGTKGLLGTSLLLDTVESESDDEYFDAEDGEPQTCKSMKGSELKKAAEVPNEELINLLLKFEIKEVILEFTKQQKEEDTILVFNVTQLGTEATMRTFDLTVVSYLKKISLDYHEIEGSKRKPLHLISSSDKPGLDLLKVEYIKADKNGPSFQTAFGKTEQTVKVAFSSLNLLLQTQALVASINYLTTIIPSDDQSISVAKEVQISTEKQQKNSTLPKAIVSSRDSDIIDFRLFAKLNAFCVIVCNEKNNIAEIKIQGLDSSLSLQSRKQSLFARLENIIVTDVDPKTVHKKAVSIMGNEVFRFNLDLYPDATEGDLYTDMSKVDGVLSLNVGCIQIVYLHKFLMSLLNFLNNFQTAKESLSAATAQAAERAATSVKDLAQRSFRVSINIDLKAPVIVIPQSSISTNAVVVDLGLIRVHNQFSLVSDEDYLNPPVIDRMDVQLTKLTLYRTVIQPGIYHPDIQLLHPINLEFLVNRNLAASWYHKVPVVEIKGHLDSMNVSLNQEDLNLLFRILTENLCEGTEDLDKVKPRVQETGEIKEPLEISISQDVHDSKNTLTTGVEEIRSVDIINMLLNFEIKEVVVTLMKKSEKKGRPLHELNVLQLGMEAKVKTYDMTAKAYLKKISMQCFDFTDSKGEPLHIINSSNVTDEPLLKMLLTKADSDGPEFKTIHDSTKQRLKVSFASLDLVLHLEALLSFMDFLSSAAPFSEPSSSEKESELKPLVGESRSIAVKAVSSNISQKDVFDLKITAELNAFNVFVCDQKCNIADIKIHGMDASISVKPKQTDVFARLKDIIVMNVDLQSIHKKAVSILGDEVFRFQLTLYPDATEGEAYADMSKVDGKLSFKVGCIQIVYVHKFFMSLLNFLNNFQTAKEALSTATVQAAERAASSMKDLAQKSFRLLMDINLKAPVIIIPQSSVSPNAVIADLGLIRVENKFSLVPMEHYSLPPVIDKMNIELTQLKLSRTILQASLPQNDIEILKPVNMLLSIQRNLAAAWYVQIPGMEIKGKLKPMQVALSEDDLTVLMKILLENLGEASSQPSPTQSVQETVRVRKVDVSSVPDHLKEQEDWTDSKLSMNQIVSLQFDFHFESLSIILYNNDINQESGVAFHNDSFQLGELRLHLMASSGKMFKDGSMNVSVKLKTCTLDDLREGIERATSRMIDRKNDQDNNSSMIDISYKQDKNGSQIDAVLDKLYVCASVEFLMTVADFFIKAVPQSPENVAKETQILPRQTATGKVKIEKDDSVRPNMTLKAMITDPEVVFVASLTKADAPALTASFQCNLSLSTSKLEQMMEASVRDLKVLACPFLREKRGKNITTVLQPCSLFMEKCTWASGKQNINIMVKEFIIKISPIILNTVLTIMAALSPKTKEDGSKDTSKEMENLWGIKSINDYNTWFLGVDTATEITESFKGIEHSLIEENCGVVVESIQVTLECGLGHRTVPLLLAESKFSGNIKNWTSLMAAVADVTLQVHYYNEIHAVWEPLIERVEGKRQWNLRLDVKKNPVQDKSLLPGDDFIPEPQMAIHISSGNTMNITISKSCLNVFNNLAKGFSEGTASTFDYSLKDRAPFTVKNAVGVPIKVKPNCNLRVMGFPEKSDIFDVDAGQNLELEYASMVPSSQGNLSILSRQESSFFTLTIVPHGYTEVANIPVARPGRRLYNVRNPNASHSDSVLVQIDATEGNKVITLRSPLQIKNHFSIAFIIYKFVKNVKLLERIGIARPEEEFHVPLDSYRCQLFIQPAGILEHQYKESTTYISWKEELHRSREVRCMLQCPSVEVSFLPLIVNTVALPDELSYICTHGEDWDVAYIIHLYPSLTLRNLLPYSLRYLLEGTAETHELAEGSTADVLHSRISGEIMELVLVKYQGKNWNGHFRIRDTLPEFFPVCFSSDSTEVTTVDLSVHVRRIGSRMVLSVFSPYWLINKTTRVLQYRSEDIHVKHPADFRDIILFSFKKKNIFTKNKVQLKISTSAWSSSFSLDTVGSYGCVKCPANNMEYLVGVSIKMSSFNLSRIVTLTPFCTIANKSSLELEVGEIASDGSMPTNKWNYIASSECLPFWPESLSGKLCVRVVGCEGSSKPFFYNRQDNGTLLSLEDLNGGILVDVNTAEHSTVITFSDYHEGSAPALIMNHTPWDILTYKQSGSPEEMVLLPRQARLFAWADPTGTRKLTWTYAANVGEHDLLKDGCGQFPYDANIQIHWVSFLDGRQRVLLFTDDVALVSKALQAEEMEQADYEITLSLHSLGLSLVNNESKQEVSYIGITSSGVVWEVKPKQKWKPFSQKQIILLEQSYQKHQISRDHGWIKLDNNFEVNFDKDPMEMRLPIRSPIKRDFLSGIQIEFKQSSHQRSLRARLYWLQVDNQLPGAMFPVVFHPVAPPKSIALDSEPKPFIDVSVITRFNEYSKVLQFKYFMVLIQEMALKIDQGFLGAIIALFTPTTDPEAERRRTKLIQQDIDALNAELMETSMTDMSILSFFEHFHISPVKLHLSLSLGSGGEESDKEKQEMFAVHSVNLLLKSIGATLTDVDDLIFKLAYYEIRYQFYKRDQLIWSVVRHYSEQFLKQMYVLVLGLDVLGNPFGLIRGLSEGVEALFYEPFQGAVQGPEEFAEGLVIGVRSLFGHTVGGAAGVVSRITGSVGKGLAAITMDKEYQQKRREELSRQPRDFGDSLARGGKGFLRGVVGGVTGIITKPVEGAKKEGAAGFFKGIGKGLVGAVARPTGGIVDMASSTFQGIQRAAESTEEVSSLRPPRLIHEDGIIRPYDRQESEGSDLLEQELEIQE

SEQ ID NO: 27327 - protein, 550 aa, Artificial Sequence
  derived and/or modified sequence
MLRSTSTVTLLSGGAARTPGAPSRRANVCRLRLTVPPESPVPEQCEKKIERKEQLLDLSNGEPTRKLPQGVVYGVVRRSDQNQQKEMVVYGWSTSQLKEEMNYIKDVRATLEKVRKRMYGDYDEMRQKIRQLTQELSVSHAQQEYLENHIQTQSSALDRFNAMNSALASDSIGLQKTLVDVTLENSNIKDQIRNLQQTYEASMDKLREKQRQLEVAQVENQLLKMKVESSQEANAEVMREMTKKLYSQYEEKLQEEQRKHSAEKEALLEETNSFLKAIEEANKKMQAAEISLEEKDQRIGELDRLIERMEKERHQLQLQLLEHETEMSGELTDSDKERYQQLEEASASLRERIRHLDDMVHCQQKKVKQMVEEIESLKKKLQQKQLLILQLLEKISFLEGENNELQSRLDYLTETQAKTEVETREIGVGCDLLPRLPFRQNDSSSHCQKSGSPISSEERRRRDKQHLDDITAARLLPLHHMPTQLLSIEESLALQKQQKQNYEEMQAKLAAQKLAERLNIKMRSYNPEGESSGRYREVRDEDDDWSSDEF

SEQ ID NO: 27328 - DNA, 1653 bp, Artificial Sequence
  derived and/or modified sequence
atgctgagatcaacctccacagtgaccctgctgagcggcggcgccgcccgaaccccaggtgccccatcaaggagagctaatgtttgtagactgcgactgactgtgcctcctgagtcacccgttccagagcagtgtgagaaaaaaattgagcgtaaagagcaattattagacctgagcaacggcgaacccacaaggaaactgccgcaaggggtggtgtatggcgtggtgaggcgcagcgaccagaatcagcagaaagagatggtggtttatggctggtctacctctcagttaaaagaggaaatgaactacataaaagacgtgagggcaaccttagagaaagtgcgcaaaaggatgtacggcgactacgatgaaatgaggcaaaaaatccgccagctaacccaggaactaagtgttagccacgcccagcaggagtatctggaaaaccacatccagacgcaatctagtgcactggaccgctttaacgctatgaactctgccctggcgtcagacagcattggtctccaaaagactctcgtagatgtcactctggagaattccaacattaaggatcagatccggaacttgcagcaaacctacgaggcttccatggataaattacgggaaaaacagagacaactggaagtggcccaggtggaaaatcagcttcttaagatgaaggtcgagtcttcgcaagaggccaacgccgaagtgatgagggaaatgaccaagaagctgtattcacagtatgaggagaagcttcaggaggagcagcggaagcactcagccgagaaagaggcactgctggaggagacaaactccttcttaaaggccatcgaggaggccaacaaaaagatgcaggctgcagagatttcgctcgaagaaaaagatcaaagaataggagagttagatcgcctcatagagaggatggaaaaggagagacaccaactgcagttgcagctgctggaacatgaaactgagatgtctggcgaactgacagattccgacaaggagaggtaccagcagttggaagaggcgtccgcttcactcagagagagaatcaggcacctcgatgatatggtccattgtcagcagaagaaagtgaaacagatggtcgaagaaatcgaatcgctgaagaaaaaacttcagcaaaagcagctgctgattctccaactgttggagaaaatctcattcctcgaaggggaaaataacgaactgcagtcacgattggattacctgacagaaacccaggccaaaactgaagttgagacacgtgagatcggggtggggtgcgacctcttgccgcggctgcccttccgacagaatgattcatcaagccactgtcagaagagtggcagtccaatttcctctgaggagcgccgcaggcgtgacaaacaacatctcgacgacatcaccgctgcaaggcttctgcctctgcatcacatgcccacccagttgctgtccattgaggagagcttggctttacagaaacagcaaaagcagaactatgaggaaatgcaggccaagctggccgctcagaaactcgctgaaaggctgaacatcaaaatgcggagctataatcccgaaggcgaaagctcaggcaggtaccgggaggtgagggacgaggatgacgactggtcctctgacgagttctag

SEQ ID NO: 27329 - DNA, 1846 bp, Artificial Sequence
  derived and/or modified sequence
gcggtgcagctgaggctgcaagtagccggcgccgtcccgcgtcgcccccgcgcagggcgggccccgcacgcttattctgcccgggaggaacgccggcgtccagcccgctaccgaccgccgctgcgggatgctgcgctccacgtccacggtcaccctgctctcgggcggcgccgccaggacgcccggggcgcccagcaggagggcaaatgtttgcagactacggctgaccgtacctcctgagagtccagttcctgagcaatgtgaaaagaagattgagagaaaagagcagcttcttgacctgagcaatggagaacctaccaggaaacttcctcagggtgttgtttatggtgtggtgcgaagatcagatcaaaatcagcagaaagaaatggtggtgtatgggtggtccaccagtcagctgaaagaagagatgaactacatcaaagatgtgagagccactttggaaaaggtgagaaagcgaatgtatggagactatgatgagatgagacagaagattcgacagctcacccaggaactatcagtttcccatgctcagcaggagtatctggagaatcacatccaaacccagtcgtctgccctggatcgttttaatgccatgaactcagccttggcatcagattccattggcctgcaaaaaaccctcgtggatgtgactttggaaaacagcaacattaaggatcaaatcagaaatctgcagcagacgtatgaagcatccatggacaagctgagggaaaagcagaggcagttggaggtagcgcaagttgaaaaccagctgctaaaaatgaaggtggaatcgtcccaagaagccaatgctgaggtgatgcgagagatgaccaagaagctgtacagccagtatgaggagaagctgcaggaagaacagaggaagcacagtgctgagaaggaggctcttttggaagaaaccaatagttttctgaaagcgattgaagaagccaataaaaagatgcaagcagcagagatcagcctagaggagaaagaccagaggatcggggagctggacaggctgattgagcgcatggaaaaggaacgtcatcaactgcaacttcaactcctagaacatgaaacagaaatgtctggggagttaactgattctgacaaggaaaggtatcagcagttggaggaggcatcagccagcctccgtgagcggatcagacacctagatgacatggtgcattgccagcagaagaaagtcaagcagatggtcgaggagattgaatcattaaagaaaaagttgcaacagaaacagctcttaatactgcagcttttagaaaagatatctttcttagaaggagagaataatgaactacaaagcaggttggactatttaacagaaacccaggccaagactgaagtggaaaccagagagataggagtgggctgtgatcttctacccaggttaccttttcgacaaaatgattcatctagtcattgccagaagagtgggtctcctatttcctcagaagagcggcggcgcagggataagcagcatcttgatgacatcacagcagctcggcttctaccacttcaccatatgcccacgcagctgctctccatagaagaatccttggcacttcagaaacagcagaaacagaattatgaggagatgcaagcaaagctcgcagcgcaaaaattagctgaaagactgaatattaaaatgcggagttataatccagaaggggagtcttcagggagataccgagaagtaagggatgaagatgacgattggtcctctgatgaattctgaagataatctcctaaatcactgacgttgagatgtcatcatcttacatcagactttctaactagtatc

SEQ ID NO: 27330 - DNA, 1653 bp, Artificial Sequence
  derived and/or modified sequence
atgctgcggagcaccagcacagtgaccctgctgagcggcggggccgcccggacccctggggcccccagccggcgggccaacgtgtgccgcctgcggctgactgtgcccccagagagccctgtgcctgagcagtgtgagaagaagattgaaaggaaggagcagctgctggacctgagcaatggagagcccaccaggaagctgccccagggcgtggtgtatggagtggtgagaagaagtgaccagaaccagcagaaggagatggtggtgtatggctggagcaccagccagctgaaggaggagatgaactacatcaaggatgtgcgggccaccctggagaaggtgaggaagaggatgtatggagactatgatgagatgaggcagaagatccggcagctgacccaggagctgtctgtgagccacgcccagcaggagtacctggagaaccacatccagacccagagcagcgccctggaccgcttcaatgccatgaacagcgccctggccagtgacagcatcggcctgcagaagaccctggtggatgtgaccctggagaacagcaacatcaaggaccagatccggaacctgcagcagacctatgaggcctccatggacaagctgcgggagaagcagaggcagctggaggtggcccaggtggagaaccagctgctgaagatgaaggtggagagcagccaggaggccaatgctgaggtgatgagggagatgaccaagaagctgtacagccagtatgaggagaagctgcaggaggagcagaggaagcacagcgctgagaaggaggccctgctggaggagaccaacagcttcctgaaggccatcgaggaggccaacaagaagatgcaggccgctgagatcagcctggaggagaaggaccagagaattggagagctggacaggctcatcgagaggatggagaaggagcggcaccagctgcagctgcagctgctggagcatgaaacagagatgtctggagagctgacagacagcgacaaggagcgctaccagcagctggaggaggccagcgccagcctgcgggagcgcatccgccacctggatgacatggtgcactgccagcagaagaaggtgaagcagatggtggaggagattgagagcctgaagaagaagctgcagcagaagcagctgctgatcctgcagctgctggagaagatctccttcctggagggagaaaataatgagctgcagagccggctggactacctgacagagacccaggccaagacagaggtggagacccgggagattggagtgggctgtgacctgctgccccggctgcccttccggcagaatgacagcagcagccactgccagaagagcggcagccccatcagcagcgaggagaggagaagaagagacaagcagcacctggatgacatcacagctgcccggctgctgcccctgcaccacatgcccacccagctgctgagcattgaggagagcctggccctgcagaagcagcagaagcagaactatgaggagatgcaggccaagctggccgcccagaagctggccgagcggctgaacatcaagatgaggagctacaaccctgagggggagagcagcggccgctaccgggaggtgagagatgaagatgatgactggagcagtgatgagttctag

SEQ ID NO: 27331 - DNA, 1653 bp, Artificial Sequence
  derived and/or modified sequence
atgctgcggagcaccagcaccgtgaccctgctgagcggcggcgccgcccggacaccaggagcaccaagccggcgcgccaatgtctgccggctgaggctgacagtcccacccgagagtcctgtgccagaacaatgtgaaaaaaaaatcgagcggaaggagcaattgttagatctatctaatggcgagccaacacgaaagctaccacagggcgtggtctatggcgtagtgcgacggtcggaccagaatcaacagaaggagatggtcgtttacgggtggagtacaagccagctgaaggaggagatgaattacatcaaggacgtcagggcgaccctagaaaaagttcgaaaaagaatgtacggcgattatgacgagatgagacagaaaataagacagctcacccaggagttaagtgtcagccatgcacagcaggagtacttagagaatcacatccaaacacaaagctcagcactggatcgatttaacgcaatgaactcggccctcgcctcagattcaattgggctccagaagacactggtggatgtaaccctcgaaaactccaacattaaggatcagataaggaatctccagcagacgtatgaagcatcgatggacaaactgcgcgaaaagcagcgccaactcgaggtggcacaagtggaaaatcagctcctgaaaatgaaagtggagagctcccaagaagctaatgcagaggtgatgcgcgaaatgaccaagaagttgtactcccagtacgaggagaagcttcaggaagagcagcgcaagcatagtgccgagaaggaggcccttcttgaggagactaattcattcctgaaagccattgaagaagccaacaagaagatgcaggccgctgagatatccttggaggagaaagaccaaaggattggagaattagaccgcctgatagagagaatggagaaagaaagacaccagctccagctgcagttgttagagcacgagactgaaatgtctggtgagctcacagacagtgacaaggaacgttatcaacagttggaggaggcgtcggccagtctgcgggaaaggattcgacacctggacgatatggttcattgccaacagaaaaaggtgaagcagatggtcgaagagattgaatccctgaagaagaagctccagcagaaacagctgctgattctgcagctcctggagaaaatttcgtttctggagggcgagaataatgaactgcagtctcgcctcgattacttgacggaaacgcaggcgaaaacggaggtggaaacccgggagattggcgtggggtgcgacctgttgcctagactcccattccgccagaacgattcgtcctcccattgtcaaaagtctgggtcccccatctcgtctgaagaacgccggagaagggacaaacagcatctggatgatatcactgccgctaggctcttgcctctgcaccatatgccaacccagttgctgtccattgaggagagtctcgcgctccagaagcagcagaaacagaattacgaggaaatgcaggcaaaacttgctgcacaaaaattggccgagcggctgaatattaagatgcgtagttacaaccctgagggggaatcatcaggtagatatagagaggtgagggacgaagatgacgattggagctccgatgagttttag

SEQ ID NO: 27332 - DNA, 1653 bp, Artificial Sequence
  derived and/or modified sequence
atgcttcgcagcacctccactgtcacacttctatccggcggtgccgctcggacacctggagcaccgtcaagaagagctaacgtctgccgactgagactgaccgtacccccagagtccccggtgccagagcaatgtgagaagaaaattgaacggaaggagcagctcctcgacctttcaaacggagagccgactcggaaactgccccagggcgtagtatacggagtggtaagaagatccgatcaaaaccagcagaaagagatggtcgtatacggctggtcaacgagtcagctgaaggaagagatgaattatataaaggacgtgcgagccaccctggaaaaggtaaggaaacgcatgtacggtgactacgatgagatgagacagaagatcaggcaactgacccaggagcttagcgtctcacacgcccagcaggaataccttgagaaccatatacagacccagagctccgcccttgatcgcttcaatgcaatgaacagcgctctcgcatccgactcaattggcttgcagaagacactagtggacgtgactctagagaactctaacatcaaggatcagattaggaatcttcagcaaacttacgaagcctccatggataaactgcgcgaaaagcaacgacagctcgaggtggcccaggttgagaaccagctgctcaaaatgaaagttgagtcctcgcaggaagctaatgctgaggtgatgcgggaaatgaccaaaaagctgtactcacagtatgaggaaaaactgcaggaagagcagcgcaagcattctgccgaaaaagaggccctgctggaggagactaacagtttcctgaaggcaattgaagaggctaataagaaaatgcaggctgcagaaatttcactcgaagagaaggaccagcgcatcggggagttagacaggttgattgaaagaatggaaaaggagaggcatcagctgcagcttcagttacttgagcatgaaacagaaatgagtggcgagctgaccgactcagataaggaacgctatcagcagctcgaggaagcctccgcctcactccgagaacggattcggcaccttgacgacatggtacactgccagcaaaaaaaggtcaaacaaatggttgaagagattgaatccttaaaaaaaaaactgcaacagaagcagctgttgatattgcagctcctcgagaagatcagctttctagaaggggaaaataacgagctgcaatctcgacttgactatctgacagagacccaggctaagacagaagtcgagacacgggaaatcggggttggctgtgacctgttgccaagactgcccttccgccagaatgattccagctctcattgccagaagagtgggtcaccgatctcctccgaggaaagacgcagacgcgataaacaacaccttgacgatatcaccgccgcaaggctgttaccacttcatcacatgccaacacagctcttgtctatcgaagagagtctcgcgctacagaaacaacagaagcagaattacgaagagatgcaggccaagttagcagcccaaaaattggctgagaggcttaatattaagatgagaagttacaaccctgagggcgaatcgagcgggaggtaccgagaggtgcgcgatgaggacgatgactggtcttctgacgagttttag

SEQ ID NO: 27333 - DNA, 1653 bp, Artificial Sequence
  derived and/or modified sequence
atgctgagaagcaccagcaccgtgaccctgctgagcggcggcgccgccagaacccccggcgcccccagcagaagagccaacgtgtgcagactgagactgaccgtgccccccgagagccccgtgcccgagcagtgcgagaagaagatcgagagaaaggagcagctgctggacctgagcaacggcgagcccaccagaaagctgccccagggcgtggtgtacggcgtggtgagaagaagcgaccagaaccagcagaaggagatggtggtgtacggctggagcaccagccagctgaaggaggagatgaactacatcaaggacgtgagagccaccctggagaaggtgagaaagagaatgtacggcgactacgacgagatgagacagaagatcagacagctgacccaggagctgagcgtgagccacgcccagcaggagtacctggagaaccacatccagacccagagcagcgccctggacagattcaacgccatgaacagcgccctggccagcgacagcatcggcctgcagaagaccctggtggacgtgaccctggagaacagcaacatcaaggaccagatcagaaacctgcagcagacctacgaggccagcatggacaagctgagagagaagcagagacagctggaggtggcccaggtggagaaccagctgctgaagatgaaggtggagagcagccaggaggccaacgccgaggtgatgagagagatgaccaagaagctgtacagccagtacgaggagaagctgcaggaggagcagagaaagcacagcgccgagaaggaggccctgctggaggagaccaacagcttcctgaaggccatcgaggaggccaacaagaagatgcaggccgccgagatcagcctggaggagaaggaccagagaatcggcgagctggacagactgatcgagagaatggagaaggagagacaccagctgcagctgcagctgctggagcacgagaccgagatgagcggcgagctgaccgacagcgacaaggagagataccagcagctggaggaggccagcgccagcctgagagagagaatcagacacctggacgacatggtgcactgccagcagaagaaggtgaagcagatggtggaggagatcgagagcctgaagaagaagctgcagcagaagcagctgctgatcctgcagctgctggagaagatcagcttcctggagggcgagaacaacgagctgcagagcagactggactacctgaccgagacccaggccaagaccgaggtggagaccagagagatcggcgtgggctgcgacctgctgcccagactgcccttcagacagaacgacagcagcagccactgccagaagagcggcagccccatcagcagcgaggagagaagaagaagagacaagcagcacctggacgacatcaccgccgccagactgctgcccctgcaccacatgcccacccagctgctgagcatcgaggagagcctggccctgcagaagcagcagaagcagaactacgaggagatgcaggccaagctggccgcccagaagctggccgagagactgaacatcaagatgagaagctacaaccccgagggcgagagcagcggcagatacagagaggtgagagacgaggacgacgactggagcagcgacgagttctag

SEQ ID NO: 27334 - protein, 445 aa, Artificial Sequence
  derived and/or modified sequence
MLRSTSTVTLLSGGAARTPGAPSRRANVCRLRLTVPPESPVPEQCEKKIERKEQLLDLSNGEPTRKLPQGVVYGVVRRSDQNQQKEMVVYGWSTSQLKEEMNYIKDVRATLEKVRKRMYGDYDEMRQKIRQLTQELSVSHAQQEYLENHIQTQSSALDRFNAMNSALASDSIGLQKTLVDVTLENSNIKDQIRNLQQTYEASMDKLREKQRQLEVAQVENQLLKMKVESSQEANAEVMREMTKKLYSQYEEKLQEEQRKHSAEKEALLEETNSFLKAIEEANKKMQAAEISLEEKDQRIGELDRLIERMEKERHQLQLQLLEHETEMSGELTDSDKERYQQLEEASASLRERIRHLDDMVHCQQKKVKQMVEEIESLKKKLQQKQLLILQLLEKISFLEGENNELQSRLDYLTETQAKTEVETREIGVGCDLLPRRCKQSSQRKN

SEQ ID NO: 27335 - DNA, 1338 bp, Artificial Sequence
  derived and/or modified sequence
atgttacggagcacatccaccgtcaccctgctgagcggaggcgccgcaaggacccctggtgcccctagcagaagagccaacgtgtgtagactgagactcaccgtgcctcccgaaagcccagtgccggaacagtgtgaaaaaaagattgagagaaaggagcagctgttggatctgtcaaacggcgagcctacccgaaagttgccccagggcgtggtctatggagtggttcgccgttccgatcagaaccagcagaaagagatggttgtgtacggttggtcaaccagtcagctgaaggaagagatgaactacattaaggacgtgagagctacactggagaaagtgcgaaagcgcatgtacggggactatgacgaaatgagacaaaaaatcaggcaacttactcaggagctatcagtgtcccatgcccagcaggaatacctcgagaatcacattcagactcagagcagcgccttggatcgtttcaacgccatgaacagcgcccttgcctcggattctataggcctacaaaagacgctggtcgatgtgacgctggagaactctaacatcaaagatcagatccggaacctgcagcagacctacgaggcctccatggataagttgagggaaaagcagcgccagctggaagtggcccaagtggagaaccaactcttgaaaatgaaggtcgaaagcagccaggaagcgaatgctgaagtgatgcgggagatgacaaaaaaattgtattcccagtacgaggaaaaacttcaggaggagcagcgaaaacatagtgccgagaaagaggctctgttagaggagacaaactccttcctgaaagccatcgaagaggccaacaagaagatgcaagccgcagaaatttcactggaagaaaaagatcagcggatcggggagctggatcgattaatcgagcggatggaaaaagaaaggcaccagctccagctccagctgctggagcacgagactgaaatgagtggcgaactgactgactccgacaaggagcgttatcaacaactggaagaagctagcgctagcctccgggagcgcattcgccacctcgacgatatggttcactgccagcaaaagaaggtaaaacagatggtcgaggagatcgaatccctgaaaaagaaactgcagcaaaaacagctcctcattctgcagctcctcgagaagattagtttcttagagggggagaataacgagttgcagagcaggttagactacctgacagagacccaagcgaagacagaagttgagacacgcgagatcggagttggttgtgatctgctgcctagacgatgcaaacagagcagccagcgcaagaattag

SEQ ID NO: 27336 - DNA, 1516 bp, Artificial Sequence
  derived and/or modified sequence
ggatgctgcgctccacgtccacggtcaccctgctctcgggcggcgccgccaggacgcccggggcgcccagcaggagggcaaatgtttgcagactacggctgaccgtacctcctgagagtccagttcctgagcaatgtgaaaagaagattgagagaaaagagcagcttcttgacctgagcaatggagaacctaccaggaaacttcctcagggtgttgtttatggtgtggtgcgaagatcagatcaaaatcagcagaaagaaatggtggtgtatgggtggtccaccagtcagctgaaagaagagatgaactacatcaaagatgtgagagccactttggaaaaggtgagaaagcgaatgtatggagactatgatgagatgagacagaagattcgacagctcacccaggaactatcagtttcccatgctcagcaggagtatctggagaatcacatccaaacccagtcgtctgccctggatcgttttaatgccatgaactcagccttggcatcagattccattggcctgcaaaaaaccctcgtggatgtgactttggaaaacagcaacattaaggatcaaatcagaaatctgcagcagacgtatgaagcatccatggacaagctgagggaaaagcagaggcagttggaggtagcgcaagttgaaaaccagctgctaaaaatgaaggtggaatcgtcccaagaagccaatgctgaggtgatgcgagagatgaccaagaagctgtacagccagtatgaggagaagctgcaggaagaacagaggaagcacagtgctgagaaggaggctcttttggaagaaaccaatagttttctgaaagcgattgaagaagccaataaaaagatgcaagcagcagagatcagcctagaggagaaagaccagaggatcggggagctggacaggctgattgagcgcatggaaaaggaacgtcatcaactgcaacttcaactcctagaacatgaaacagaaatgtctggggagttaactgattctgacaaggaaaggtatcagcagttggaggaggcatcagccagcctccgtgagcggatcagacacctagatgacatggtgcattgccagcagaagaaagtcaagcagatggtcgaggagattgaatcattaaagaaaaagttgcaacagaaacagctcttaatactgcagcttttagaaaagatatctttcttagaaggagagaataatgaactacaaagcaggttggactatttaacagaaacccaggccaagactgaagtggaaaccagagagataggagtgggctgtgatcttctacccaggagatgcaagcaaagctcgcagcgcaaaaattagctgaaagactgaatattaaaatgcggagttataatccagaaggggagtcttcagggagataccgagaagtaagggatgaagatgacgattggtcctctgatgaattctgaagataatctcctaaatcactgacgttgagatgtcatcatcttacatcagactttctaactagtatc

SEQ ID NO: 27337 - DNA, 1338 bp, Artificial Sequence
  derived and/or modified sequence
atgctgcggagcaccagcacagtgaccctgctgagcggcggggccgcccggacccctggggcccccagccggcgggccaacgtgtgccgcctgcggctgactgtgcccccagagagccctgtgcctgagcagtgtgagaagaagattgaaaggaaggagcagctgctggacctgagcaatggagagcccaccaggaagctgccccagggcgtggtgtatggagtggtgagaagaagtgaccagaaccagcagaaggagatggtggtgtatggctggagcaccagccagctgaaggaggagatgaactacatcaaggatgtgcgggccaccctggagaaggtgaggaagaggatgtatggagactatgatgagatgaggcagaagatccggcagctgacccaggagctgtctgtgagccacgcccagcaggagtacctggagaaccacatccagacccagagcagcgccctggaccgcttcaatgccatgaacagcgccctggccagtgacagcatcggcctgcagaagaccctggtggatgtgaccctggagaacagcaacatcaaggaccagatccggaacctgcagcagacctatgaggcctccatggacaagctgcgggagaagcagaggcagctggaggtggcccaggtggagaaccagctgctgaagatgaaggtggagagcagccaggaggccaatgctgaggtgatgagggagatgaccaagaagctgtacagccagtatgaggagaagctgcaggaggagcagaggaagcacagcgctgagaaggaggccctgctggaggagaccaacagcttcctgaaggccatcgaggaggccaacaagaagatgcaggccgctgagatcagcctggaggagaaggaccagagaattggagagctggacaggctcatcgagaggatggagaaggagcggcaccagctgcagctgcagctgctggagcatgaaacagagatgtctggagagctgacagacagcgacaaggagcgctaccagcagctggaggaggccagcgccagcctgcgggagcgcatccgccacctggatgacatggtgcactgccagcagaagaaggtgaagcagatggtggaggagattgagagcctgaagaagaagctgcagcagaagcagctgctgatcctgcagctgctggagaagatctccttcctggagggagaaaataatgagctgcagagccggctggactacctgacagagacccaggccaagacagaggtggagacccgggagattggagtgggctgtgacctgctgccccggcgctgcaagcagagcagccagaggaagaactag

SEQ ID NO: 27338 - DNA, 1338 bp, Artificial Sequence
  derived and/or modified sequence
atgctgcggagcaccagcaccgtgaccctgctgagcggcggcgccgcacggacccctggtgcgccgtcccgtagagccaatgtttgccgcctgcggctgacggtgccacctgaatctcccgttcctgagcagtgcgagaagaaaattgaaagaaaggagcagctgcttgatcttagtaacggggaaccaactagaaagctgccacagggcgtggtttatggagttgtgcgtagatcagaccagaaccaacagaaagaaatggtggtatacggatggagcacctctcagcttaaagaagaaatgaactacataaaggacgtacgtgcaaccctggaaaaggtacgtaagcggatgtacggcgactatgatgaaatgaggcagaaaattcgacaacttactcaggagctgtcggtgagccatgcccagcaggagtatctggagaatcatatacaaacccaatcctcggcgttagatcggtttaacgctatgaattccgccttggcttctgatagtatcgggctgcagaagacactggtggacgttactctcgaaaattcaaatattaaagatcagatccggaaccttcagcagacctacgaggcaagcatggataaactgcgcgaaaaacaacggcaattagaagtcgctcaggtggaaaaccagctgctaaagatgaaggtagaaagctcacaggaagcaaatgctgaggttatgcgggaaatgaccaagaagctgtactcacaatacgaggagaagttgcaggaggagcagcggaagcactccgcagagaaagaggcattactggaggagaccaactccttccttaaagccattgaggaggctaacaagaagatgcaggccgccgagatttccctggaggaaaaggaccaacgcatcggtgaactggaccggctcattgaaaggatggaaaaggagagacaccaactgcagctgcaactgctagagcatgagactgagatgagtggagagctgacagattccgataaagagcgctaccagcaactggaagaggcatcagcatccttacgtgagcggattcggcacctagatgatatggtgcactgccagcagaagaaggtcaagcaaatggtggaagaaattgaatcactcaaaaaaaagttgcagcagaagcagctgcttatcctgcagctgctggaaaagataagtttcctcgaaggtgagaataacgagctccagtctcggctggactaccttacagagacacaggcaaaaactgaagtggagacacgtgagatcggggtgggctgtgacctgctcccccgacgttgtaaacagtcctctcagcggaaaaactag

SEQ ID NO: 27339 - DNA, 1338 bp, Artificial Sequence
  derived and/or modified sequence
atgctgcgcagcactagcactgttactctgctaagcgggggagccgcacgcacacccggagccccatctcgccgagcaaatgtttgtcggttgcgcctgacagttcccccagaaagcccagttcctgaacagtgtgaaaaaaaaattgaacgaaaagagcagcttctcgatctgtcaaatggtgagcctacccgcaagctgccacagggggtcgtgtacggggttgttaggcgatcagatcagaatcaacagaaggagatggtcgtttacggatggtctacctctcagctgaaggaagagatgaattacatcaaggacgtgcgagccactctagagaaggtgagaaaacgtatgtacggggattacgacgaaatgcggcagaaaatcaggcaacttacccaggaactgagcgtgagtcacgcccagcaggagtaccttgaaaaccatatccagactcagtctagcgcgctcgacagatttaatgccatgaacagcgcactagccagtgacagcatcgggttgcaaaagacactggtcgatgtgactttagaaaactcaaacataaaggaccaaatccggaacctacagcaaacctatgaggcgagcatggataagctccgggaaaaacagcgccagctggaggtcgcacaggtagagaaccagctgctgaagatgaaagttgagtcaagccaggaggcaaatgctgaagtaatgcgcgagatgacgaaaaagctgtactcccaatacgaagagaagctgcaggaggagcagagaaagcactcagcagagaaagaagcattgctcgaggagacaaattcctttttgaaagctatcgaagaggccaacaagaaaatgcaggccgcagaaatcagcctcgaagagaaagatcagcgcattggtgaactggacagattaattgaacgcatggagaaagagaggcaccagctgcagttgcagctgcttgagcacgagacagagatgagcggggagctgaccgactcagacaaggaaagatatcaacaactcgaggaggcttcagcctctctgagggaacgaattcggcacctggacgatatggtccattgtcagcagaaaaaggtgaaacagatggtcgaagaaatagagtctctgaagaagaagctccagcaaaagcagctgttgatcttgcagctattggaaaagatatcgttccttgagggggagaacaacgaactacagagccggttagattatctgacagagacccaggcaaaaacagaggtggaaacccgcgagataggcgtgggttgcgacctgctcccacgccgatgtaagcagtcttcccaaagaaaaaattag

SEQ ID NO: 27340 - DNA, 1338 bp, Artificial Sequence
  derived and/or modified sequence
atgctgagaagcaccagcaccgtgaccctgctgagcggcggcgccgccagaacccccggcgcccccagcagaagagccaacgtgtgcagactgagactgaccgtgccccccgagagccccgtgcccgagcagtgcgagaagaagatcgagagaaaggagcagctgctggacctgagcaacggcgagcccaccagaaagctgccccagggcgtggtgtacggcgtggtgagaagaagcgaccagaaccagcagaaggagatggtggtgtacggctggagcaccagccagctgaaggaggagatgaactacatcaaggacgtgagagccaccctggagaaggtgagaaagagaatgtacggcgactacgacgagatgagacagaagatcagacagctgacccaggagctgagcgtgagccacgcccagcaggagtacctggagaaccacatccagacccagagcagcgccctggacagattcaacgccatgaacagcgccctggccagcgacagcatcggcctgcagaagaccctggtggacgtgaccctggagaacagcaacatcaaggaccagatcagaaacctgcagcagacctacgaggccagcatggacaagctgagagagaagcagagacagctggaggtggcccaggtggagaaccagctgctgaagatgaaggtggagagcagccaggaggccaacgccgaggtgatgagagagatgaccaagaagctgtacagccagtacgaggagaagctgcaggaggagcagagaaagcacagcgccgagaaggaggccctgctggaggagaccaacagcttcctgaaggccatcgaggaggccaacaagaagatgcaggccgccgagatcagcctggaggagaaggaccagagaatcggcgagctggacagactgatcgagagaatggagaaggagagacaccagctgcagctgcagctgctggagcacgagaccgagatgagcggcgagctgaccgacagcgacaaggagagataccagcagctggaggaggccagcgccagcctgagagagagaatcagacacctggacgacatggtgcactgccagcagaagaaggtgaagcagatggtggaggagatcgagagcctgaagaagaagctgcagcagaagcagctgctgatcctgcagctgctggagaagatcagcttcctggagggcgagaacaacgagctgcagagcagactggactacctgaccgagacccaggccaagaccgaggtggagaccagagagatcggcgtgggctgcgacctgctgcccagaagatgcaagcagagcagccagagaaagaactag

SEQ ID NO: 27341 - protein, 466 aa, Artificial Sequence
  derived and/or modified sequence
MLRSTSTVTLLSGGAARTPGAPSRRANVCRLRLTVPPESPVPEQCEKKIERKEQLLDLSNGEPTRKLPQGVVYGVVRRSDQNQQKEMVVYGWSTSQLKEEMNYIKDVRATLEKVRKRMYGDYDEMRQKIRQLTQELSVSHAQQEYLENHIQTQSSALDRFNAMNSALASDSIGLQKTLVDVTLENSNIKDQIRNLQQTYEASMDKLREKQRQLEVAQVENQLLKMKVESSQEANAEVMREMTKKLYSQYEEKLQEEQRKHSAEKEALLEETNSFLKAIEEANKKMQAAEISLEEKDQRIGELDRLIERMEKERHQLQLQLLEHETEMSGELTDSDKERYQQLEEASASLRERIRHLDDMVHCQQKKVKQMVEEIESLKKKLQQKQLLILQLLEKISFLEGENNELQSRLDYLTETQAKTEVETREIGVGCDLLPSQTGRTREIVMPSRNYTPYTRVLELTMKKTLT

SEQ ID NO: 27342 - protein, 397 aa, Artificial Sequence
  derived and/or modified sequence
MLRSTSTVTLLSGGAARTPGAPSRRANVCRLRLTVPPESPVPEQCEKKIERKEQLLDLSNGEPTRKLPQGVVYGVVRRSDQNQQKEMVVYGWSTSQLKEEMNYIKDKTLVDVTLENSNIKDQIRNLQQTYEASMDKLREKQRQLEVAQVENQLLKMKVESSQEANAEVMREMTKKLYSQYEEKLQEEQRKHSAEKEALLEETNSFLKAIEEANKKMQAAEISLEEKDQRIGELDRLIERMEKERHQLQLQLLEHETEMSGELTDSDKERYQQLEEASASLRERIRHLDDMVHCQQKKVKQMVEEIESLKKKLQQKQLLILQLLEKISFLEGENNELQSRLDYLTETQAKTEVETREIGVGCDLLPSQTGRTREIVMPSRNYTPYTRVLELTMKKTLT

SEQ ID NO: 27343 - protein, 435 aa, Artificial Sequence
  derived and/or modified sequence
MLRSTSTVTLLSGGAARTPGAPSRRANVCRLRLTVPPESPVPEQCEKKIERKEQLLDLSNGEPTRKLPQGVVYGVVRRSDQNQQKEMVVYGWSTSQLKEEMNYIKDVSHAQQEYLENHIQTQSSALDRFNAMNSALASDSIGLQKTLVDVTLENSNIKDQIRNLQQTYEASMDKLREKQRQLEVAQVENQLLKMKVESSQEANAEVMREMTKKLYSQYEEKLQEEQRKHSAEKEALLEETNSFLKAIEEANKKMQAAEISLEEKDQRIGELDRLIERMEKERHQLQLQLLEHETEMSGELTDSDKERYQQLEEASASLRERIRHLDDMVHCQQKKVKQMVEEIESLKKKLQQKQLLILQLLEKISFLEGENNELQSRLDYLTETQAKTEVETREIGVGCDLLPSQTGRTREIVMPSRNYTPYTRVLELTMKKTLT

SEQ ID NO: 27344 - DNA, 3487 bp, Artificial Sequence
  derived and/or modified sequence
ggatgctgcgctccacgtccacggtcaccctgctctcgggcggcgccgccaggacgcccggggcgcccagcaggagggcaaatgtttgcagactacggctgaccgtacctcctgagagtccagttcctgagcaatgtgaaaagaagattgagagaaaagagcagcttcttgacctgagcaatggagaacctaccaggaaacttcctcagggtgttgtttatggtgtggtgcgaagatcagatcaaaatcagcagaaagaaatggtggtgtatgggtggtccaccagtcagctgaaagaagagatgaactacatcaaagatgtttcccatgctcagcaggagtatctggagaatcacatccaaacccagtcgtctgccctggatcgttttaatgccatgaactcagccttggcatcagattccattggcctgcaaaaaaccctcgtggatgtgactttggaaaacagcaacattaaggatcaaatcagaaatctgcagcagacgtatgaagcatccatggacaagctgagggaaaagcagaggcagttggaggtagcgcaagttgaaaaccagctgctaaaaatgaaggtggaatcgtcccaagaagccaatgctgaggtgatgcgagagatgaccaagaagctgtacagccagtatgaggagaagctgcaggaagaacagaggaagcacagtgctgagaaggaggctcttttggaagaaaccaatagttttctgaaagcgattgaagaagccaataaaaagatgcaagcagcagagatcagcctagaggagaaagaccagaggatcggggagctggacaggctgattgagcgcatggaaaaggaacgtcatcaactgcaacttcaactcctagaacatgaaacagaaatgtctggggagttaactgattctgacaaggaaaggtatcagcagttggaggaggcatcagccagcctccgtgagcggatcagacacctagatgacatggtgcattgccagcagaagaaagtcaagcagatggtcgaggagattgaatcattaaagaaaaagttgcaacagaaacagctcttaatactgcagcttttagaaaagatatctttcttagaaggagagaataatgaactacaaagcaggttggactatttaacagaaacccaggccaagactgaagtggaaaccagagagataggagtgggctgtgatcttctacccagccaaacaggcaggactcgtgaaattgtgatgccttctaggaactacaccccatacacaagagtcctggagttaaccatgaagaaaactctgacttaggcactcagaggcatacactttttacagatggacaaaagctctggaaccctgtggcttcaaatcctttgggaagggtgactgttgtttcccctacacacagtgtaagccggaatgggaatcgctgaggctctgatccacttctaagacaggaaggaaagtgaaggcagagtgagcaggcaaagtagaaaattcgaaaaggtcctcaacgagtttgtacagctgctcccactccctcatcacctcttgtgggcctttggaaatgtatgttggaggagacattttggattgttgcaatgacttgggagtgccatagcacctagcaggcagaagccagaaacaccaaatgtcttaacaatgcttgaggcggtgctacaaatgaagtccttctccaaatgcattgagccccaagaaaaatcgctgattctgaggaaccttccaactttaacaatttcaggacgtccctaagctgagctaggaggcaccacgcacaggccggaggcaccacgcacaggccagagtctcccaaatcctgtcccgcactctctcccaccttattaatggccagctcatctttcaagtttcgacttgaaccacttctcagagatatcttcccaggtgcccatcccaacgttactattatatcataatttgattctccctccccccatccccccgccaactctgtaaaccccaagtataacacaggacgttgctatttgttgactgacacatagtgcttggtgaggtcacgctggcgctgaatactttttgtataaaccgacgaacagctgatgaccgcatgaatgctcacacaaggggaaagggcgccaagccaaggagccggcgtcatccgacgtaacttccgccctttaacgctcctgcggacgcccccttctcccagtccgtgtttgtttccggaatttcaataaagctcgattcggctcgaagaagaccccgttcttccgggaaaatggcgactcccgctcgtgccccggagtcaccgccgtccgcggatccggcgctagtagcggggcctgccgaggaagccgagtgcccgccgccgcgccagcctcagcccgcgcagaatgtgctcgctgccccgcggcttcgagccccaagctcccgaggacttggcgcagcggagtttggtggagctgcgggaaatgttgaagcgccaggagagacttttgcgcaacgaaaaattcatttgcaaattgcccgacaaaggtaaaaagatctttgactcttttgccaaactgaaagctgccattgcagaatgtgaagaagttagaagaaaaagtgaactgtttaaccctgttagtttagactgtaagctaaggcaaaaagcaattgcagaagttgatgtgggtacagataaggcccagaattctgacccgatacttgatacttcatcactagttcctggatgttcctctgtagataacatcaagtcatctcaaacctcacaaaaccagggacttggacgtcctactcttgaaggtgatgaagagacttcagaggttgagtacacagtgaataagggcccagcttccagcaatagagacagggtaccaccttcatctgaagctagtgagcatcacccgcggcatcgtgtttcaagtcaagcggaagatacttccagcagctttgacaacctgtttattgacaggttacagaggatcaccattgcggaccaaggtgaacaacagtcagaagaaaacgcaagtactaagaacttgacaggcctttccagtgggactgagaagaaacctcattacatggaagtgctagaaatgcgagccaaaaacccagtgccccagctgcgtaaatttaaaaccaatgtgttaccttttcgacaaaatgattcatctagtcattgccagaagagtgggtctcctatttcctcagaagagcggcggcgcagggataagcagcatcttgatgacatcacagcagctcggcttctaccacttcaccatatgcccacgcagctgctctccatagaagaatccttggcacttcagaaacagcagaaacagaattatgaggaaagaccgttttacagccctcagtaccgcagttccatgaacttgctcagcttggcagccgcagctaaggacacccgtggtagtaaaagcgggaagatgggctccctggctcttcttaccaaactctga

SEQ ID NO: 27345 - DNA, 1401 bp, Artificial Sequence
  derived and/or modified sequence
atgctaaggtctactagtaccgtgacattgctcagcggaggagctgccaggaccccaggtgcaccgtccaggagggccaatgtctgccggctccgtctaaccgtcccccccgaatcccccgtgcccgagcaatgcgagaaaaagatagagcggaaggagcagttgttagatctgagtaacggcgaacctacgaggaaactgcctcagggagtcgtgtatggcgtggtgaggcgatcagaccaaaaccagcaaaaagagatggtcgtttacggctggagcacaagtcaactcaaggaagaaatgaattacataaaagatgttagagctaccctggaaaaagttcggaagcgaatgtacggagactacgatgagatgcgacagaaaattcgccagctgactcaggaactttccgttagtcatgcacaacaagaatatctagaaaaccatattcagacacagtcgagcgctctggaccgctttaacgctatgaattccgcactcgcctccgactctattgggctccagaagactcttgtggatgtgacattggagaattccaacattaaagaccaaatccggaacctacaacagacctatgaggcctccatggacaagcttagggagaaacagcgacagctggaggtggcccaggtggagaatcaactattgaagatgaaggtggagtcgagtcaggaggccaatgctgaagtgatgagggaaatgaccaagaagctctacagccagtatgaggagaaactgcaagaagagcagaggaagcactccgctgagaaggaagctctgctcgaggaaaccaactcatttcttaaggcaattgaggaagctaacaagaagatgcaggctgccgagatttcgcttgaagaaaaagaccagaggatcggggagttggaccggctgatcgagcgcatggagaaggaaagacaccagctacagctgcaattgctagagcatgagacagaaatgagtggagaactgactgattctgacaaagagcggtatcagcagctggaggaagcatccgctagtttgcgcgagagaataagacacctggatgatatggttcattgccagcagaagaaagtgaaacagatggtcgaggagattgagtcgttaaaaaaaaagctccagcagaaacagttactgatactgcagctgctcgaaaaaatctccttcttagaaggagagaataatgagttgcaatccagactcgactatctgacagagacccaggccaaaacggaggtggaaacccgcgagatcggggtggggtgtgatctgctaccctcgcagacaggtaggacccgggaaatcgtaatgccttcaaggaattatactccctatactcgcgttttggagctgacaatgaagaagacactgacctag

SEQ ID NO: 27346 - DNA, 1194 bp, Artificial Sequence
  derived and/or modified sequence
atgctgcgctccacatcgacggttacgctgttgtccgggggagccgcaagaacccccggcgcccccagtcgacgagctaatgtgtgtcgcctcaggttgaccgttccccccgagtcgcctgttcctgagcagtgcgagaaaaagatcgagcgtaaggagcagctgctggacctgtccaatggggagcctacccgtaaattgcctcagggcgtggtgtatggtgtggtcaggagatctgaccagaatcaacagaaggaaatggtggtgtatggctggtctacatcacaacttaaagaggaaatgaattatatcaaggacaagacactagtcgacgtgacattagagaatagtaacataaaagatcagatccgtaacctccagcagacgtacgaggcatccatggacaaacttcgagagaaacagagacagctggaggtcgctcaagtagaaaaccagttgctgaaaatgaaggtggaatcatcccaggaggctaacgccgaagtgatgagggagatgaccaagaagctatactcgcaatacgaagaaaaacttcaagaggaacagcgtaaacatagtgctgagaaggaagccctgctggaagagaccaactcctttctcaaagctattgaagaggccaataagaagatgcaggcagcggaaatctctctggaggagaaagaccagcggatcggtgagctcgacaggctgatcgagcgcatggaaaaagagagacaccagctgcagctgcaactgctggagcacgaaactgagatgagcggcgaattgaccgactctgacaaggagaggtaccaacaactagaagaggcatctgccagtttacgtgaacgtattaggcaccttgacgacatggtgcactgccagcaaaaaaaggtgaagcaaatggttgaagagatcgagtcccttaaaaagaagctgcagcagaagcagcttctgatcctgcagctccttgaaaagatcagctttctcgaaggagaaaacaatgagctgcagtcacgactcgattatctgaccgagacccaagctaagaccgaagttgagacgcgggaaatcggggttgggtgcgatctcttaccttcacagaccggccgaacccgggagatagtaatgcccagtagaaactacactccttacaccagagtgcttgagctgacaatgaagaagacactaacatag

SEQ ID NO: 27347 - DNA, 1308 bp, Artificial Sequence
  derived and/or modified sequence
atgctgcggagcacctctacagtcactctcctgtctggaggggctgccaggaccccaggtgcacctagccgccgcgccaacgtgtgcagactgagactgacagtgcctcccgaaagtccagtccctgagcagtgcgaaaagaagattgagagaaaggagcagcttcttgaccttagcaatggagagcctacccggaagttgccgcagggcgtggtgtatggcgtcgtcagacggagcgaccaaaatcaacagaaggaaatggttgtttacggctggagtacttcccagctgaaagaagagatgaactacataaaagacgtgtcgcacgcgcagcaggagtatctcgaaaatcacatccagacgcaatcctccgccctagatcgcttcaacgcaatgaattctgccttggcctcggacagtatcgggcttcagaagacactcgtggacgtgacactggagaactctaacatcaaggaccagattcggaaccttcaacagacctacgaggcaagcatggataagctccgagagaagcagcgccagctcgaggtggcccaagtcgagaaccagctgctaaagatgaaggtggaatccagccaggaagccaatgccgaggtgatgcgagagatgacaaagaagttgtatagtcagtacgaggagaaactgcaggaggaacaacggaagcactccgcggagaaggaagctctcctggaagagaccaatagcttcctcaaggccatagaggaagccaacaagaaaatgcaggccgcagagatcagcctggaggagaaggatcagcgcatcggcgagttggacaggctcatcgaaaggatggaaaaagaacggcatcagcttcagctccagttgctggagcacgaaacggagatgagcggggagttaacagacagcgacaaggaacggtaccagcaactggaggaggcaagtgcctcgcttagggaacgcattcggcatttggacgatatggtgcactgtcagcaaaagaaggtgaaacagatggtcgaagagatagagtccctgaagaaaaagctgcagcagaagcagttgctgattctgcagctgctcgaaaaaatcagttttctggaaggcgaaaacaacgaactgcagtctcgcctggactatctaactgagacacaggccaaaacagaagtggagactagggaaatcggtgtgggttgtgacctcctgcctagccaaaccggacgcacgcgggagattgttatgccttccaggaactacaccccctatacgcgcgtgctggagctgacaatgaagaaaacactcacctag

SEQ ID NO: 27348 - DNA, 1401 bp, Artificial Sequence
  derived and/or modified sequence
atgttaaggtctacctctaccgtgaccctgttgtccgggggggcagcacggactccaggagcgccaagtcggcgcgccaatgtatgtcggctgcggctgacagtacccccagagtctcctgtgcctgagcaatgcgaaaagaagatcgaacggaaggaacagctgctggacctctcgaacggtgaaccgacaaggaagctacctcagggggtcgtttacggtgtggtgcggaggtccgaccagaaccagcagaaagagatggtggtgtatgggtggtctaccagtcagttaaaggaagagatgaattatataaaggacgtgcgggccacactggagaaggtgcgaaagcgcatgtatggggattacgatgaaatgaggcagaaaattaggcagctaacccaggagctatcggtgagccatgcacagcaagagtacctcgagaatcatattcagacacagtcgtcggcactggacaggttcaacgcaatgaacagcgccctggcatcagactcaataggactgcagaaaacactggtggatgtaactctggagaattccaatattaaagatcagataaggaacctgcagcagacttatgaggcctccatggacaagcttagagaaaagcagcgccagctggaggtggcgcaggtcgaaaaccagctgctgaaaatgaaggtggaaagcagccaagaggctaatgcagaggtgatgcgcgaaatgacgaagaaactgtatagccagtatgaggagaagttgcaagaggagcagcgcaaacactcagcggagaaggaggctctcctagaggagaccaattcattccttaaggcgatcgaggaagcaaacaagaaaatgcaggcagccgagatcagtctggaagaaaaggatcagcgcataggggagcttgatcgtctcattgaacggatggagaaggaaaggcaccagcttcaacttcagttactagagcacgagactgagatgtccggggagctgacagactccgataaagagcggtaccagcagctcgaggaagcatctgcctctcttcgagaaaggattaggcacctagacgacatggtgcattgtcagcaaaaaaaggttaagcaaatggtggaagaaatcgagagtctgaagaagaagctgcagcagaagcagttgttgattctgcagttactcgagaagatctcattccttgagggggagaataacgaacttcagagtcgtttggattatttaaccgagacacaggccaagacggaggttgagactcgtgagatcggagtcgggtgtgatctgctgccttcccagaccggaagaaccagagaaattgtaatgcccagtcgcaactacacaccttacactcgtgtcttggaactcactatgaaaaagaccctcacttag

SEQ ID NO: 27349 - DNA, 1401 bp, Artificial Sequence
  derived and/or modified sequence
atgttgcggagcacatcgaccgtgaccctgctgagtggtggtgccgctagaacccctggagcaccctccagaagagccaatgtgtgtagattgaggcttacagtcccaccagagtcccctgtgcccgagcagtgtgagaaaaaaatcgagagaaaggaacagctactcgatctgtccaatggagaacctacgcgcaagctgccccagggcgttgtgtacggtgtcgtgcgaaggagtgaccaaaatcagcagaaggaaatggtggtatatggatggtctaccagtcagctgaaggaggagatgaattatatcaaggacgtcagagccacactggagaaagtgcgaaagcggatgtacggcgattatgatgaaatgcgccaaaagattcgtcagctcacccaggaactctccgtctcccatgcgcagcaggagtatcttgagaaccacattcaaacgcagtcttctgctctggatagattcaacgctatgaattccgccctggcttcggattctatcggccttcagaagaccctggtggatgttacacttgagaattctaatataaaggaccagataagaaacctccagcagacgtacgaggcctctatggacaagctgcgtgaaaaacagcgccagctagaggtggctcaagtggagaaccaactactaaaaatgaaggtcgagtcttcgcaggaggcaaacgcggaggtcatgagagaaatgaccaagaaactgtactcacagtatgaggagaagctgcaggaagaacagcgcaaacatagtgcagaaaaggaggctttacttgaggagacaaatagtttcctgaaggctattgaggaagccaacaagaagatgcaggcagctgagattagcttggaggagaaagaccagagaatcggcgaactggaccggctgattgagcgtatggagaaggagagacaccaactccagctgcagctccttgaacacgagaccgagatgtcaggagagcttactgactctgacaaggagcggtatcaacagctggaggaggccagtgcgtcgctgcgggaaagaattaggcaccttgacgacatggtccactgccagcagaagaaggttaagcagatggtggaagagatagagagcctgaaaaaaaaactgcagcagaagcagctacttatcctccagctcttggagaagatttcttttttggaaggagaaaataatgagcttcagagccgtttggactacttgactgaaactcaggccaaaaccgaggttgaaacaagagaaattggagttgggtgcgacttgcttccaagccaaacaggtaggacccgagagatcgtcatgccatctcgtaactacactccctatacgagagtattggagttgactatgaagaagacacttacctag

SEQ ID NO: 27350 - DNA, 2361 bp, Artificial Sequence
  derived and/or modified sequence
gtcccgcgtcgcccccgcgcagggcgggccccgcacgcttattctgcccgggaggaacgccggcgtccagcccgctaccgaccgccgctgcgggatgctgcgctccacgtccacggtcaccctgctctcgggcggcgccgccaggacgcccggggcgcccagcaggagggcaaatgtttgcagactacggctgaccgtacctcctgagagtccagttcctgagcaatgtgaaaagaagattgagagaaaagagcagcttcttgacctgagcaatggagaacctaccaggaaacttcctcagggtgttgtttatggtgtggtgcgaagatcagatcaaaatcagcagaaagaaatggtggtgtatgggtggtccaccagtcagctgaaagaagagatgaactacatcaaagatgtgagagccactttggaaaaggtgagaaagcgaatgtatggagactatgatgagatgagacagaagattcgacagctcacccaggaactatcagtttcccatgctcagcaggagtatctggagaatcacatccaaacccagtcgtctgccctggatcgttttaatgccatgaactcagccttggcatcagattccattggcctgcaaaaaaccctcgtggatgtgactttggaaaacagcaacattaaggatcaaatcagaaatctgcagcagacgtatgaagcatccatggacaagctgagggaaaagcagaggcagttggaggtagcgcaagttgaaaaccagctgctaaaaatgaaggtggaatcgtcccaagaagccaatgctgaggtgatgcgagagatgaccaagaagctgtacagccagtatgaggagaagctgcaggaagaacagaggaagcacagtgctgagaaggaggctcttttggaagaaaccaatagttttctgaaagcgattgaagaagccaataaaaagatgcaagcagcagagatcagcctagaggagaaagaccagaggatcggggagctggacaggctgattgagcgcatggaaaaggaacgtcatcaactgcaacttcaactcctagaacatgaaacagaaatgtctggggagttaactgattctgacaaggaaaggtatcagcagttggaggaggcatcagccagcctccgtgagcggatcagacacctagatgacatggtgcattgccagcagaagaaagtcaagcagatggtcgaggagattgaatcattaaagaaaaagttgcaacagaaacagctcttaatactgcagcttttagaaaagatatctttcttagaaggagagaataatgaactacaaagcaggttggactatttaacagaaacccaggccaagactgaagtggaaaccagagagataggagtgggctgtgatcttctacccagccaaacaggcaggactcgtgaaattgtgatgccttctaggaactacaccccatacacaagagtcctggagttaaccatgaagaaaactctgacttaggcactcagaggcatacactttttacagatggacaaaagctctggaaccctgtggcttcaaatcctttgggaagggtgactgttgtttcccctacacacagtgtaagccggaatgggaatcgctgaggctctgatccacttctaagacaggaaggaaagtgaaggcagagtgagcaggtaagagagggatatacaaggtcacatttcagacacccactcggcataccctgccgtactgcatcatcatttgttttctttgtagacactgaaatcctatcaggaggattccttcacaatgtattttatttgctagactttggttgggagggaaaaggacattaatttgaagtttcatgttattcatgccaggattgtttgatagagcatgaaggttttgtttacccataaaagtattagaggcagcgtttctctgatacagagaggcctgtccacaagaagcatgggcacccagccaaacttgaacctggaagggagggttcccggcctgcaggtgctctttcctcttggtcccaagcatctgtgcagggtcgtgggagccacactgagagacttgtgtgggccagacaagcttcattctgatgcgctagtcccttggtttaatttgtgccttatgctttcattggaccagctgaaatcactgtatttattcaactagtgatttttttttctttctcactttaacttaaagagaattttatatgtcttggaaatttaataatttagtgttctcagtatcaattggtgtttttgttaaacgaatgaatcatctgttcatgcatgctctactttgatattataacctatgtcacatgtgtttaataaataccatatattttgttctactaa

SEQ ID NO: 27351 - DNA, 1313 bp, Artificial Sequence
  derived and/or modified sequence
gctgaggctgcaagtagccggcgccgtcccgcgtcgcccccgcgcagggcgggccccgcacgcttattctgcccgggaggaacgccggcgtccagcccgctaccgaccgccgctgcgggatgctgcgctccacgtccacggtcaccctgctctcgggcggcgccgccaggacgcccggggcgcccagcaggagggcaaatgtttgcagactacggctgaccgtacctcctgagagtccagttcctgagcaatgtgaaaagaagattgagagaaaagagcagcttcttgacctgagcaatggagaacctaccaggaaacttcctcagggtgttgtttatggtgtggtgcgaagatcagatcaaaatcagcagaaagaaatggtggtgtatgggtggtccaccagtcagctgaaagaagagatgaactacatcaaagataaaaccctcgtggatgtgactttggaaaacagcaacattaaggatcaaatcagaaatctgcagcagacgtatgaagcatccatggacaagctgagggaaaagcagaggcagttggaggtagcgcaagttgaaaaccagctgctaaaaatgaaggtggaatcgtcccaagaagccaatgctgaggtgatgcgagagatgaccaagaagctgtacagccagtatgaggagaagctgcaggaagaacagaggaagcacagtgctgagaaggaggctcttttggaagaaaccaatagttttctgaaagcgattgaagaagccaataaaaagatgcaagcagcagagatcagcctagaggagaaagaccagaggatcggggagctggacaggctgattgagcgcatggaaaaggaacgtcatcaactgcaacttcaactcctagaacatgaaacagaaatgtctggggagttaactgattctgacaaggaaaggtatcagcagttggaggaggcatcagccagcctccgtgagcggatcagacacctagatgacatggtgcattgccagcagaagaaagtcaagcagatggtcgaggagattgaatcattaaagaaaaagttgcaacagaaacagctcttaatactgcagcttttagaaaagatatctttcttagaaggagagaataatgaactacaaagcaggttggactatttaacagaaacccaggccaagactgaagtggaaaccagagagataggagtgggctgtgatcttctacccagccaaacaggcaggactcgtgaaattgtgatgccttctaggaactacaccccatacacaagagtcctggagttaaccatgaagaaaactctgacttag

SEQ ID NO: 27352 - DNA, 1427 bp, Artificial Sequence
  derived and/or modified sequence
gctgaggctgcaagtagccggcgccgtcccgcgtcgcccccgcgcagggcgggccccgcacgcttattctgcccgggaggaacgccggcgtccagcccgctaccgaccgccgctgcgggatgctgcgctccacgtccacggtcaccctgctctcgggcggcgccgccaggacgcccggggcgcccagcaggagggcaaatgtttgcagactacggctgaccgtacctcctgagagtccagttcctgagcaatgtgaaaagaagattgagagaaaagagcagcttcttgacctgagcaatggagaacctaccaggaaacttcctcagggtgttgtttatggtgtggtgcgaagatcagatcaaaatcagcagaaagaaatggtggtgtatgggtggtccaccagtcagctgaaagaagagatgaactacatcaaagatgtttcccatgctcagcaggagtatctggagaatcacatccaaacccagtcgtctgccctggatcgttttaatgccatgaactcagccttggcatcagattccattggcctgcaaaaaaccctcgtggatgtgactttggaaaacagcaacattaaggatcaaatcagaaatctgcagcagacgtatgaagcatccatggacaagctgagggaaaagcagaggcagttggaggtagcgcaagttgaaaaccagctgctaaaaatgaaggtggaatcgtcccaagaagccaatgctgaggtgatgcgagagatgaccaagaagctgtacagccagtatgaggagaagctgcaggaagaacagaggaagcacagtgctgagaaggaggctcttttggaagaaaccaatagttttctgaaagcgattgaagaagccaataaaaagatgcaagcagcagagatcagcctagaggagaaagaccagaggatcggggagctggacaggctgattgagcgcatggaaaaggaacgtcatcaactgcaacttcaactcctagaacatgaaacagaaatgtctggggagttaactgattctgacaaggaaaggtatcagcagttggaggaggcatcagccagcctccgtgagcggatcagacacctagatgacatggtgcattgccagcagaagaaagtcaagcagatggtcgaggagattgaatcattaaagaaaaagttgcaacagaaacagctcttaatactgcagcttttagaaaagatatctttcttagaaggagagaataatgaactacaaagcaggttggactatttaacagaaacccaggccaagactgaagtggaaaccagagagataggagtgggctgtgatcttctacccagccaaacaggcaggactcgtgaaattgtgatgccttctaggaactacaccccatacacaagagtcctggagttaaccatgaagaaaactctgacttag

SEQ ID NO: 27353 - DNA, 2601 bp, Artificial Sequence
  derived and/or modified sequence
ggatgctgcgctccacgtccacggtcaccctgctctcgggcggcgccgccaggacgcccggggcgcccagcaggagggcaaatgtttgcagactacggctgaccgtacctcctgagagtccagttcctgagcaatgtgaaaagaagattgagagaaaagagcagcttcttgacctgagcaatggagaacctaccaggaaacttcctcagggtgttgtttatggtgtggtgcgaagatcagatcaaaatcagcagaaagaaatggtggtgtatgggtggtccaccagtcagctgaaagaagagatgaactacatcaaagatgtgagagccactttggaaaaggtgagaaagcgaatgtatggagactatgatgagatgagacagaagattcgacagctcacccaggaactatcagtttcccatgctcagcaggagtatctggagaatcacatccaaacccagtcgtctgccctggatcgttttaatgccatgaactcagccttggcatcagattccattggcctgcaaaaaaccctcgtggatgtgactttggaaaacagcaacattaaggatcaaatcagaaatctgcagcagacgtatgaagcatccatggacaagctgagggaaaagcagaggcagttggaggtagcgcaagttgaaaaccagctgctaaaaatgaaggtggaatcgtcccaagaagccaatgctgaggtgatgcgagagatgaccaagaagctgtacagccagtatgaggagaagctgcaggaagaacagaggaagcacagtgctgagaaggaggctcttttggaagaaaccaatagttttctgaaagcgattgaagaagccaataaaaagatgcaagcagcagagatcagcctagaggagaaagaccagaggatcggggagctggacaggctgattgagcgcatggaaaaggaacgtcatcaactgcaacttcaactcctagaacatgaaacagaaatgtctggggagttaactgattctgacaaggaaaggtatcagcagttggaggaggcatcagccagcctccgtgagcggatcagacacctagatgacatggtgcattgccagcagaagaaagtcaagcagatggtcgaggagattgaatcattaaagaaaaagttgcaacagaaacagctcttaatactgcagcttttagaaaagatatctttcttagaaggagagaataatgaactacaaagcaggttggactatttaacagaaacccaggccaagactgaagtggaaaccagagagataggagtgggctgtgatcttctacccagccaaacaggcaggactcgtgaaattgtgatgccttctaggaactacaccccatacacaagagtcctggagttaaccatgaagaaaactctgacttaggcactcagaggcatacactttttacagatggacaaaagctctggaaccctgtggcttcaaatcctttgggaagggtgactgttgtttcccctacacacagtgtaagccggaatgggaatcgctgaggctctgatccacttctaagacaggaaggaaagtgaaggcagagtgagcaggcaaagtagaaaattcgaaaaggtcctcaacgagtttgtacagctgctcccactccctcatcacctcttgtgggcctttggaaatgtatgttggaggagacattttggattgttgcaatgacttgggagtgccatagcacctagcaggcagaagccagaaacaccaaatgtcttaacaatgcttgaggcggtgctacaaatgaagtccttctccaaatgcattgagccccaagaaaaatcgctgattctgaggaaccttccaactttaacaatttcaggacgtccctaagctgagctaggaggcaccacgcacaggccggaggcaccacgcacaggccagagtctcccaaatcctgtcccgcactctctcccaccttattaatggccagctcatctttcaagtttcgacttgaaccacttctcagagatatcttcccaggtgcccatcccaacgttactattatatcataatttgattctccctccccccatccccccgccaactctgtaaaccccaagtataacacaggacgttgctatttgttgactgacacatagtgcttggtgaggtcacgctggcgctgaatactttttgtataaaccgacgaacagctgatgaccgcatgaatgctcacacaaggggaaagggcgccaagccaaggagccggcgtcatccgacgtaacttccgccctttaacgctcctgcggacgcccccttctcccagtccgtgtttgtttccggaatttcaataaagctcgattcggctcgaagaagaccccgttcttccgggaaaatggcgactcccgctcgtgccccggagtcaccgccgtccgcggatccggcgctagtagcggggcctgccgaggaagccgagtgcccgccgccgcgccagcctcagcccgcgcagaatgtgctcgctgccccgcggcttcgagccccaagctcccgaggacttggcgcagcggagtttggtggagctgcgggaaatgttgaagcgccaggagagacttttgcgcaacga

SEQ ID NO: 27354 - DNA, 2384 bp, Artificial Sequence
  derived and/or modified sequence
gctgaggctgcaagtagccggcgccgtcccgcgtcgcccccgcgcagggcgggccccgcacgcttattctgcccgggaggaacgccggcgtccagcccgctaccgaccgccgctgcgggatgctgcgctccacgtccacggtcaccctgctctcgggcggcgccgccaggacgcccggggcgcccagcaggagggcaaatgtttgcagactacggctgaccgtacctcctgagagtccagttcctgagcaatgtgaaaagaagattgagagaaaagagcagcttcttgacctgagcaatggagaacctaccaggaaacttcctcagggtgttgtttatggtgtggtgcgaagatcagatcaaaatcagcagaaagaaatggtggtgtatgggtggtccaccagtcagctgaaagaagagatgaactacatcaaagatgtgagagccactttggaaaaggtgagaaagcgaatgtatggagactatgatgagatgagacagaagattcgacagctcacccaggaactatcagtttcccatgctcagcaggagtatctggagaatcacatccaaacccagtcgtctgccctggatcgttttaatgccatgaactcagccttggcatcagattccattggcctgcaaaaaaccctcgtggatgtgactttggaaaacagcaacattaaggatcaaatcagaaatctgcagcagacgtatgaagcatccatggacaagctgagggaaaagcagaggcagttggaggtagcgcaagttgaaaaccagctgctaaaaatgaaggtggaatcgtcccaagaagccaatgctgaggtgatgcgagagatgaccaagaagctgtacagccagtatgaggagaagctgcaggaagaacagaggaagcacagtgctgagaaggaggctcttttggaagaaaccaatagttttctgaaagcgattgaagaagccaataaaaagatgcaagcagcagagatcagcctagaggagaaagaccagaggatcggggagctggacaggctgattgagcgcatggaaaaggaacgtcatcaactgcaacttcaactcctagaacatgaaacagaaatgtctggggagttaactgattctgacaaggaaaggtatcagcagttggaggaggcatcagccagcctccgtgagcggatcagacacctagatgacatggtgcattgccagcagaagaaagtcaagcagatggtcgaggagattgaatcattaaagaaaaagttgcaacagaaacagctcttaatactgcagcttttagaaaagatatctttcttagaaggagagaataatgaactacaaagcaggttggactatttaacagaaacccaggccaagactgaagtggaaaccagagagataggagtgggctgtgatcttctacccagccaaacaggcaggactcgtgaaattgtgatgccttctaggaactacaccccatacacaagagtcctggagttaaccatgaagaaaactctgacttaggcactcagaggcatacactttttacagatggacaaaagctctggaaccctgtggcttcaaatcctttgggaagggtgactgttgtttcccctacacacagtgtaagccggaatgggaatcgctgaggctctgatccacttctaagacaggaaggaaagtgaaggcagagtgagcaggtaagagagggatatacaaggtcacatttcagacacccactcggcataccctgccgtactgcatcatcatttgttttctttgtagacactgaaatcctatcaggaggattccttcacaatgtattttatttgctagactttggttgggagggaaaaggacattaatttgaagtttcatgttattcatgccaggattgtttgatagagcatgaaggttttgtttacccataaaagtattagaggcagcgtttctctgatacagagaggcctgtccacaagaagcatgggcacccagccaaacttgaacctggaagggagggttcccggcctgcaggtgctctttcctcttggtcccaagcatctgtgcagggtcgtgggagccacactgagagacttgtgtgggccagacaagcttcattctgatgcgctagtcccttggtttaatttgtgccttatgctttcattggaccagctgaaatcactgtatttattcaactagtgatttttttttctttctcactttaacttaaagagaattttatatgtcttggaaatttaataatttagtgttctcagtatcaattggtgtttttgttaaacgaatgaatcatctgttcatgcatgctctactttgatattataacctatgtcacatgtgtttaataaataccatatattttgttctact

SEQ ID NO: 27355 - DNA, 1401 bp, Artificial Sequence
  derived and/or modified sequence
atgctgcggagcaccagcacagtgaccctgctgagcggcggggccgcccggacccctggggcccccagccggcgggccaacgtgtgccgcctgcggctgactgtgcccccagagagccctgtgcctgagcagtgtgagaagaagattgaaaggaaggagcagctgctggacctgagcaatggagagcccaccaggaagctgccccagggcgtggtgtatggagtggtgagaagaagtgaccagaaccagcagaaggagatggtggtgtatggctggagcaccagccagctgaaggaggagatgaactacatcaaggatgtgcgggccaccctggagaaggtgaggaagaggatgtatggagactatgatgagatgaggcagaagatccggcagctgacccaggagctgtctgtgagccacgcccagcaggagtacctggagaaccacatccagacccagagcagcgccctggaccgcttcaatgccatgaacagcgccctggccagtgacagcatcggcctgcagaagaccctggtggatgtgaccctggagaacagcaacatcaaggaccagatccggaacctgcagcagacctatgaggcctccatggacaagctgcgggagaagcagaggcagctggaggtggcccaggtggagaaccagctgctgaagatgaaggtggagagcagccaggaggccaatgctgaggtgatgagggagatgaccaagaagctgtacagccagtatgaggagaagctgcaggaggagcagaggaagcacagcgctgagaaggaggccctgctggaggagaccaacagcttcctgaaggccatcgaggaggccaacaagaagatgcaggccgctgagatcagcctggaggagaaggaccagagaattggagagctggacaggctcatcgagaggatggagaaggagcggcaccagctgcagctgcagctgctggagcatgaaacagagatgtctggagagctgacagacagcgacaaggagcgctaccagcagctggaggaggccagcgccagcctgcgggagcgcatccgccacctggatgacatggtgcactgccagcagaagaaggtgaagcagatggtggaggagattgagagcctgaagaagaagctgcagcagaagcagctgctgatcctgcagctgctggagaagatctccttcctggagggagaaaataatgagctgcagagccggctggactacctgacagagacccaggccaagacagaggtggagacccgggagattggagtgggctgtgacctgctgcccagccagacaggccgcacccgggagatcgtgatgcccagcaggaactacaccccctacaccagggtgctggagctgaccatgaagaagaccctgacctag

SEQ ID NO: 27356 - DNA, 1194 bp, Artificial Sequence
  derived and/or modified sequence
atgctgcggagcaccagcacagtgaccctgctgagcggcggggccgcccggacccctggggcccccagccggcgggccaacgtgtgccgcctgcggctgactgtgcccccagagagccctgtgcctgagcagtgtgagaagaagattgaaaggaaggagcagctgctggacctgagcaatggagagcccaccaggaagctgccccagggcgtggtgtatggagtggtgagaagaagtgaccagaaccagcagaaggagatggtggtgtatggctggagcaccagccagctgaaggaggagatgaactacatcaaggacaagaccctggtggatgtgaccctggagaacagcaacatcaaggaccagatccggaacctgcagcagacctatgaggcctccatggacaagctgcgggagaagcagaggcagctggaggtggcccaggtggagaaccagctgctgaagatgaaggtggagagcagccaggaggccaatgctgaggtgatgagggagatgaccaagaagctgtacagccagtatgaggagaagctgcaggaggagcagaggaagcacagcgctgagaaggaggccctgctggaggagaccaacagcttcctgaaggccatcgaggaggccaacaagaagatgcaggccgctgagatcagcctggaggagaaggaccagagaattggagagctggaccggctgattgaaagaatggagaaggagcggcaccagctgcagctgcagctgctggagcacgagacagagatgtctggagagctgacagacagcgacaaggagcgctaccagcagctggaggaggccagcgccagcctgcgggagcgcatccgccacctggatgacatggtgcactgccagcagaagaaggtgaagcagatggtggaggagattgagagcctgaagaagaagctgcagcagaagcagctgctgatcctgcagctgctggagaagatctccttcctggagggggagaacaatgagctgcagagccggctggactacctgacagagacccaggccaagacagaggtggagacccgggagattggagtgggctgtgacctgctgcccagccagacaggccgcacccgggagatcgtgatgcccagcaggaactacaccccctacaccagggtgctggagctgaccatgaagaagaccctgacctag

SEQ ID NO: 27357 - DNA, 1308 bp, Artificial Sequence
  derived and/or modified sequence
atgctgcggagcaccagcacagtgaccctgctgagcggcggggccgcccggacccctggggcccccagccggcgggccaacgtgtgccgcctgcggctgactgtgcccccagagagccctgtgcctgagcagtgtgagaagaagattgaaaggaaggagcagctgctggacctgagcaatggagagcccaccaggaagctgccccagggcgtggtgtatggagtggtgagaagaagtgaccagaaccagcagaaggagatggtggtgtatggctggagcaccagccagctgaaggaggagatgaactacatcaaggatgtgtcccatgcccagcaggagtacctggagaaccacatccagacccagagcagcgccctggaccgcttcaatgccatgaacagcgccctggccagtgacagcatcggcctgcagaagaccctggtggatgtgaccctggagaacagcaacatcaaggaccagatccggaacctgcagcagacctatgaggcctccatggacaagctgcgggagaagcagaggcagctggaggtggcccaggtggagaaccagctgctgaagatgaaggtggagagcagccaggaggccaatgctgaggtgatgagggagatgaccaagaagctgtacagccagtatgaggagaagctgcaggaggagcagaggaagcacagcgctgagaaggaggccctgctggaggagaccaacagcttcctgaaggccatcgaggaggccaacaagaagatgcaggccgctgagatcagcctggaggagaaggaccagagaattggagagctggaccggctgattgaaagaatggagaaggagcggcaccagctgcagctgcagctgctggagcacgagacagagatgtctggagagctgacagacagcgacaaggagcgctaccagcagctggaggaggccagcgccagcctgcgggagcgcatccgccacctggatgacatggtgcactgccagcagaagaaggtgaagcagatggtggaggagattgagagcctgaagaagaagctgcagcagaagcagctgctgatcctgcagctgctggagaagatctccttcctggagggggagaacaatgagctgcagagccggctggactacctgacagagacccaggccaagacagaggtggagacccgggagattggagtgggctgtgacctgctgcccagccagacaggccgcacccgggagatcgtgatgcccagcaggaactacaccccctacaccagggtgctggagctgaccatgaagaagaccctgacctag

SEQ ID NO: 27358 - DNA, 1401 bp, Artificial Sequence
  derived and/or modified sequence
atgctgcggagcaccagcaccgtgaccctgctgagcggcggcgccgcgcgtactccaggggcacctagccggcgcgctaacgtgtgcagactgcgcctgaccgtacctcctgagtcaccagtccctgagcaatgtgaaaaaaaaattgaaaggaaggagcagctcctggatctttccaatggggagcccaccagaaaactcccccagggagtggtttatggggtggtgaggagaagtgatcagaaccagcaaaaagaaatggtggtatacggctggtcaacctcccagctgaaggaagagatgaattatatcaaagacgtgcgggctaccctagaaaaggtgcggaaaagaatgtacggggattacgacgaaatgcgacagaagatcaggcaattgacccaagaactgagcgtgtctcatgcccagcaggaatacttggagaatcacattcagacacagagctccgcactggacaggtttaatgcgatgaactctgctctagcttctgacagcatcggcttgcaaaagacactggtggatgtgacactcgaaaacagcaacatcaaagaccaaatccgtaacttgcagcaaacctacgaggcctccatggataagctgagagagaagcagaggcaactcgaagtggctcaggtggagaaccaactgcttaaaatgaaggtagagtcttcccaggaagctaatgccgaagtgatgcgcgagatgacaaaaaagctctactcccagtacgaagagaaactgcaggaggagcagcgaaagcattccgctgagaaggaggcgttattggaagagaccaactcttttctgaaagccattgaggaagctaataaaaagatgcaggcggctgagatcagtctcgaggaaaaggaccagcgtatcggagaactggaccggctaatcgagagaatggagaaggagcgtcaccagctccagctccagttgctcgaacacgagactgagatgtctggcgagctcactgactcagataaggagcgctaccaacaattagaggaagcctccgcctctctgcgcgaacgcattagacatctggacgatatggtgcattgccaacagaagaaagtcaagcaaatggtggaagagatcgaatcacttaagaaaaaactgcagcagaaacagctgcttatcctccagctcttagagaaaatctcatttcttgagggggagaacaatgaacttcagtcgaggctagactatttgactgagactcaggccaagaccgaagtggagactcgcgagattggggtaggttgcgacttgctacctagccaaacagggcgtacccgagagattgtcatgccatcccgtaattacactccatatacccgggtcctggagctgacgatgaaaaaaaccctcacctag

SEQ ID NO: 27359 - DNA, 1194 bp, Artificial Sequence
  derived and/or modified sequence
atgctgcggagcaccagcaccgtgaccctgctgagcggcggcgccgcccgtactccgggcgccccgagtcgccgcgccaatgtttgccggctgcgcttgacagtcccaccagaatcccctgtaccggaacaatgcgaaaagaaaatcgagcggaaagagcagttactggacttgagcaacggagaacccacacggaagctccctcaaggggtggtctatggggtggtgcgcagatccgaccagaatcagcaaaaggagatggtggtttacggctggtccacttcacagttgaaggaggaaatgaactacatcaaggataaaactctggtggatgttacactggagaattctaacatcaaagatcagatcaggaatctacagcaaacctatgaggcaagtatggacaaactgagagagaaacagcggcagttagaggttgcccaagtcgagaatcagctgttgaagatgaaggtggagtcttctcaggaagccaatgccgaagttatgagagagatgaccaagaagctgtactcacagtacgaagagaaactgcaggaggaacaacgcaagcactcggcagagaaagaggcgttgctggaagagacgaatagcttcctcaaagccattgaggaagctaacaagaaaatgcaggcagccgaaatcagcctcgaggaaaaggaccaacggatcggagagctggaccgcctcatcgagcgtatggaaaaagaacgtcaccagctgcagctgcagctgttggagcatgagacagaaatgagcggcgagctgactgattccgacaaggagcggtaccagcagctcgaagaggcttcggcttccctgcgcgaacgcatccgtcacctggacgatatggtccactgtcaacaaaaaaaggtcaagcaaatggtggaagaaatagagagcctcaaaaaaaagctgcagcaaaagcagctgctgattctccaattactggagaagattagctttttagaaggtgaaaataacgaactccaatcaagactagattacctgactgagactcaggccaagactgaagtggagactcgcgagatcggggttggatgtgatctgctgccttctcagaccggccgcaccagagagatcgtcatgcctagccggaactataccccttacacccgcgtgttggaactcacaatgaagaaaactctgacgtag

SEQ ID NO: 27360 - DNA, 1308 bp, Artificial Sequence
  derived and/or modified sequence
atgctgcggagcaccagcaccgtgaccctgctgagcggcggcgccgcccgcacgccaggcgctcctagtcggagggcaaacgtatgtcgactgcgactgacggtgcctccagagtcacctgttcctgagcaatgtgagaaaaagatcgaaaggaaggaacagttgctggacctgagcaacggcgagcccaccaggaaactgccgcagggtgtggtttatggcgtggtcaggcggtccgaccaaaaccagcagaaggaaatggtggtgtacggctggagcacaagtcaactgaaggaggaaatgaactatattaaagacgtaagtcatgcacagcaggagtacctagaaaaccacatacaaacacagtcttctgcgctcgatcgctttaatgccatgaattcagcgctcgccagtgactctattggtttacaaaaaacactggtggacgtgacattagaaaactctaacattaaggatcaaattaggaatctccagcaaacctatgaagccagtatggacaaacttcgcgagaagcagcgccagctagaggtcgcgcaggtcgaaaatcagcttcttaaaatgaaggtggaaagctcccaagaagcaaatgcggaggtgatgagagaaatgacaaagaagctgtatagtcaatatgaggaaaaacttcaagaagaacaacgtaaacatagcgcagaaaaagaagcccttctcgaggagactaatagttttctgaaggccatcgaagaagcaaataaaaagatgcaagctgcagaaatctcactcgaggaaaaggaccagagaatcggagaactagacaggcttattgaacgaatggagaaagagagacaccagctgcagctccagctgctcgagcatgagaccgaaatgtcaggcgagcttactgattcagacaaagagcgctaccagcaattggaagaagcctctgcttcactgcgcgaacggatccgtcacctggatgacatggtgcattgccagcagaaaaaggtcaagcagatggtcgaagagatagaaagcctgaagaagaaactccaacaaaaacaactgttgattctgcagcttctcgaaaaaatctcattcctggagggcgagaataacgagctgcagtctcggttagactatctgaccgaaacgcaggctaaaactgaggtggagactcgcgaaatcggggttggatgcgaccttcttccgagtcagactggtcgaaccagggagattgtcatgccttctagaaattacaccccatacacccgagtgctggagctcaccatgaagaagactctgacctag

SEQ ID NO: 27361 - DNA, 1401 bp, Artificial Sequence
  derived and/or modified sequence
atgctgcggagcaccagcaccgtgaccctgctgagcggcggcgccgcgaggactcccggagcgccttctcgcagggccaacgtatgtaggctcagacttacagtgcccccagagagtcctgtgcctgagcagtgtgagaagaagatcgagaggaaggaacagctgctggacctcagcaacggcgagccgacgcggaagctgcctcagggcgtggtctatggtgttgttcgtcgaagtgatcagaaccagcagaaggaaatggttgtttacggatggtctactagccagttaaaagaagagatgaactacatcaaagacgtgcgtgccactctggaaaaagtccggaagcgcatgtacggagattatgatgagatgagacaaaaaattcggcaactgacacaggagctttctgtgtcccatgcgcaacaggagtaccttgagaaccacattcagacacagagttccgccttggataggtttaatgctatgaattccgctttagccagtgattctatcggactccaaaaaacactggtggatgtcaccctggagaatagtaatatcaaagaccaaatccgtaatctccagcagacctatgaggcgtcaatggataagctgcgggagaaacagcgacagttagaagtggcgcaagtcgagaatcaactgcttaagatgaaggttgaatcttcacaggaagccaacgcagaggtgatgcgagaaatgacgaagaaactatactcacagtacgaggagaagctccaagaggagcagcgcaaacactctgcagagaaggaggctctgctggaagagacaaactcatttttgaaggctattgaagaagccaataaaaaaatgcaagccgccgagatctctctagaggagaaggaccaacggatcggagaacttgacaggctcatagagagaatggagaaagaacgccaccagctgcagctccagctcctggagcatgaaacagaaatgtccggagaactgacagattctgacaaggagcgctatcagcaactcgaggaagcaagcgcatcactccgagagcgcatccggcaccttgacgatatggtgcactgtcaacagaaaaaagtgaaacagatggtggaagaaatcgaatctctgaagaagaagcttcaacagaagcagcttctcattcttcagctgctcgagaagatttcttttctggaaggtgaaaataatgagttgcagtccaggctggactatttgaccgaaacacaagctaagaccgaagttgagacacgcgaaattggggtcggctgcgacctgctgccctcccagacggggcgcactagagaaatcgtcatgccaagcagaaactataccccttataccagagttctggagttaacaatgaagaaaacattaacttag

SEQ ID NO: 27362 - DNA, 1401 bp, Artificial Sequence
  derived and/or modified sequence
atgctgcggagcaccagcaccgtgaccctgctgagcggcggcgccgctaggactcccggcgctccatcgcggagggctaatgtgtgccggctgagactcaccgtgcctccagagagcccggtaccggagcaatgcgaaaagaaaatcgagaggaaggagcagttgctcgatttgtccaatggcgaacctacccggaagctccctcagggcgttgtatacggagtggtgcgaagatccgaccagaaccagcagaaagagatggtggtgtatgggtggagcacttcacaactgaaagaagagatgaactatattaaagatgttcgcgccactctcgagaaagtcaggaagagaatgtacggtgattacgacgaaatgcgccagaaaattcgccagcttacacaggagctatctgtaagtcatgctcaacaggagtatctcgaaaatcacattcaaacccagtcctccgccctcgatcgatttaacgccatgaattctgcactggcgtcagattctattggcttgcagaagacgttagttgacgtgaccctggagaattccaacattaaggaccaaattagaaacctgcagcagacatatgaggccagtatggacaaattgcgcgagaagcagaggcagctcgaggtggcccaggtggagaaccagttgttgaaaatgaaggttgagagcagtcaagaggcgaacgcagaagtcatgcgcgagatgaccaagaagttatatagccagtacgaggaaaaattgcaggaggagcagaggaaacacagcgcagagaaggaggcgctgctcgaggaaactaattcatttttaaaagctattgaggaggcaaacaagaaaatgcaggccgcagagatcagcttggaagagaaggaccagcggatcggtgagctcgatagactgatagaaaggatggagaaagagaggcaccaactacagctccagctactcgaacacgagacggaaatgtccggagaactgacggatagcgacaaagaacgctaccagcagctcgaggaagcctcagcatcattgagagagcggataagacacctagatgacatggtacactgtcagcaaaagaaggttaagcagatggtcgaggagattgagtccttgaaaaagaagctccagcagaagcagctgctgattcttcagctactggaaaaaattagcttcctggaaggagagaataatgagcttcagtcacggctagattacttaaccgaaacccaagctaagaccgaggtggaaacacgggagattggcgtgggatgcgatctgctgccgagccagactggccgtacccgggagattgtaatgcccagcaggaactatacgccttacacccgggttctagagctcactatgaaaaaaaccctaacgtag

SEQ ID NO: 27363 - DNA, 1401 bp, Artificial Sequence
  derived and/or modified sequence
atgctgcgctctacatcaaccgtgaccctgttgagcggaggggctgcacggacgccgggagcaccatctcgtcgagcaaatgtgtgtcgtcttagattgacagtacctcctgaatcccctgttccagagcagtgtgagaaaaagatcgaaaggaaagagcagctgcttgatctctctaacggagaacctacccgaaagctccctcaaggggtcgtgtacggcgtggtgaggaggtcagaccaaaatcaacagaaggaaatggtggtgtatggttggtctacatctcagctgaaagaggaaatgaactacataaaagacgtacgagccaccctcgagaaggtaagaaaacggatgtacggggattatgatgaaatgcgccagaaaataagacagctcacacaggaactgtccgtgtcccatgcgcagcaggaatatttggagaatcatattcaaacccagagcagtgccctggaccggtttaacgcgatgaactcagctctggcgtccgactctataggcctgcaaaaaacactcgtggacgtcaccctcgaaaattccaacattaaagatcagatccgcaatttacagcagacgtacgaggcctcaatggataaactacgggaaaaacaacgacagttggaggttgcccaggttgagaatcagctgttgaaaatgaaggtcgagtcctctcaagaggcaaacgcagaggtgatgagggaaatgactaaaaagctgtacagccagtacgaggaaaagctgcaagaggaacaaaggaagcactccgccgaaaaggaggccttactcgaggaaactaatagtttcctgaaggctatcgaagaggccaacaaaaagatgcaggccgcagagatttcacttgaagaaaaagaccagcgcatcggagagcttgaccggttaattgagaggatggagaaagagagacatcagctgcagcttcagctcctcgagcatgagaccgaaatgtcaggcgagctgaccgactccgataaggaaagataccagcagctggaggaggcctctgcatccctcagggagagaatccggcatttggacgacatggttcactgtcagcagaagaaggtcaaacagatggttgaggaaatagagtcacttaaaaaaaagctccaacagaagcagttgcttatcctgcagctgcttgaaaaaattagcttcctggagggtgagaacaatgagctgcaatccaggttggactatctgacagaaacacaggcaaagaccgaagtcgagacccgggagatcggtgtaggatgcgatctcctcccctctcagactggtcgcactcgcgagatcgtgatgcccagtcggaactacaccccatacacacgggtgctggaactcactatgaaaaagactcttacttag

SEQ ID NO: 27364 - DNA, 1194 bp, Artificial Sequence
  derived and/or modified sequence
atgctgcgcagcacctcgaccgtgacactgctgtcaggcggagccgctaggaccccaggcgcacccagtaggcgtgctaacgtttgccgtctgcgtctgacagtgccaccagagtcacccgtgcccgagcaatgcgagaagaagattgaaaggaaggaacagctgctcgatctctctaacggtgagcccacacggaaactgccccagggcgtcgtgtatggagtagtgagacgtagtgatcagaatcaacaaaaggagatggtggtttatggatggtccacttcacaactcaaagaagaaatgaattacattaaggacaagacactggtagacgtgactctagagaactcaaacatcaaagaccaaatacgcaatctgcagcagacctacgaagcctctatggacaagctgcgagagaagcagcggcaactggaggtcgcacaggtagagaatcagctgttaaaaatgaaggtcgagagcagccaggaagctaatgcagaggttatgcgtgaaatgaccaaaaagctgtacagccaatacgaagagaaattgcaggaagagcaaagaaaacacagcgccgagaaagaggcactgctcgaggaaaccaattcatttttgaaggccatcgaggaagctaataagaaaatgcaggcggcagagatcagtcttgaagaaaaagatcagcgcattggcgaattggaccggcttattgagcgcatggagaaggagaggcaccagctccaactgcagctgctcgagcacgagacagagatgtctggcgaattgactgactccgataaggaacggtaccaacagttagaagaggccagtgcaagtctccgcgaacgcattaggcatctggacgatatggtgcactgtcagcaaaaaaaagttaagcagatggttgaggaaatagagagtctcaagaagaaactgcagcagaagcagctgctaattttacagctgctcgagaagatcagttttttagagggggagaataatgagctccagtcaagactcgactacctcacggaaacccaggcaaagacagaggtggagactcgcgagattggagttggctgcgacctactgcccagccagacagggcgaactcgggaaatagtaatgccgtccagaaattatactccctatacaagagtgttggagttgacgatgaagaagactctcacttag

SEQ ID NO: 27365 - DNA, 1308 bp, Artificial Sequence
  derived and/or modified sequence
atgttacgatccacaagtaccgtgacccttctcagtgggggagctgccaggacccctggcgcaccctctaggcgggcaaatgtctgtagactgcgcctgaccgtacccccagagtctccagtacccgagcagtgcgagaagaaaattgaacgcaaggagcagctgttggacctgagcaatggcgagccaacgaggaaactgcctcagggcgtagtctacggcgtcgtcaggaggagtgaccagaatcagcagaaagagatggtggtgtatggctggtctacaagtcagctgaaggaggagatgaactatatcaaggacgtctctcatgcccagcaggaatacttagaaaaccacatccagacgcaatcttcagccttagaccgattcaatgctatgaactcagccctggcctccgattccatcggcctgcagaaaacactggtggacgtgacgctcgagaacagcaacattaaggaccaaatccggaatctgcagcagacgtacgaagcatccatggacaaattgcgtgagaaacagcgtcaacttgaagttgcacaggtggagaatcagctgctaaagatgaaagtcgaaagtagccaagaagctaatgccgaagtcatgcgtgaaatgacgaaaaaattatacagtcagtacgaagagaagctccaggaggaacagagaaagcacagtgctgaaaaggaagccctactagaggaaacaaattcattcttgaaggctattgaggaagccaataagaagatgcaggcagcagaaatctcactggaggagaaagatcagaggatcggggagctggatagactcatcgaacgcatggagaaagaaagacaccagctgcagctgcagctgctggagcatgaaaccgaaatgtcaggcgagctgaccgattcagacaaagagagataccagcagttggaggaagctagcgccagcctgagagaacggatccgacaccttgacgatatggtgcattgccagcaaaagaaggtaaagcagatggtagaggaaatcgaatcgctgaagaagaaattgcagcaaaagcagttgttgatcctccagcttctggaaaaaatatccttcctggaaggcgagaataatgaactgcagagccgtctggattatcttacagagactcaggcaaagactgaagtggagactagggaaatcggagttggctgtgaccttctgccgtcacaaaccggaagaacacgtgagattgtgatgccctcacggaattatactccctacactcgggtcctggagctaactatgaaaaaaactctgacttag

SEQ ID NO: 27366 - DNA, 1401 bp, Artificial Sequence
  derived and/or modified sequence
atgcttaggtccacctcaacagtaacattgctctctggtggagcagctcgcacccctggagcgccaagccgccgagccaatgtgtgtcggctgagactgacagttcccccagagagccctgtgcctgagcaatgcgagaagaagattgaacgtaaagagcagctgctggatttatccaacggcgagccgacaaggaagctccctcaaggcgtcgtctacggcgtggtcagacgctcagaccagaatcagcaaaaggaaatggttgtttacggctggtctactagccagctcaaagaggaaatgaactatatcaaggatgtacgcgcaactcttgaaaaggtccgcaaaagaatgtatggagattatgatgagatgcgacaaaagattcgccagctcacgcaagaattgagcgtgtcacatgctcagcaggagtacctggagaaccacatccagactcagtcttctgccttggatcgcttcaacgccatgaacagcgcactggcttcagattccatagggctgcagaaaacacttgtggatgttacactggagaatagtaacataaaggaccagatcaggaaccttcagcagacctacgaagccagtatggataagcttagggagaagcagaggcagttggaagtcgctcaagtagaaaaccagttgctgaaaatgaaggtagaatcaagccaagaggcaaatgccgaggtgatgagagaaatgaccaagaaactgtacagccagtacgaagagaagctgcaggaggaacagcggaagcatagcgccgagaaagaggcccttctcgaggagacaaattctttcctgaaggcaatcgaagaggcgaacaaaaaaatgcaggccgctgagatctccttagaggagaaagaccaacggatcggggaactcgataggctaatcgaaagaatggagaaggaaagacaccagctgcaattgcagctgctggaacatgaaaccgagatgtctggcgaattgacggactcagacaaggagcggtatcaacagttggaagaagctagcgccagcttgagggagcgtattaggcacctcgatgacatggtacattgtcaacaaaagaaagtgaaacagatggttgaggagatcgaaagcctaaaaaagaaattacagcagaagcagctcttgatcctgcaactgctggagaagatcagctttctagaaggagagaataatgaactgcagtctaggttggattatctgacagagacacaggctaaaaccgaagtggaaactcgtgagatcggtgtggggtgtgatctcctccctagccagaccgggcgaacacgagaaattgtcatgccctccaggaactatacaccatacacccgggtgcttgagctcacaatgaaaaagacactcacatag

SEQ ID NO: 27367 - DNA, 1401 bp, Artificial Sequence
  derived and/or modified sequence
atgctcagaagtacttcaacagtgacattgttgagcggcggagccgctaggacccccggagctcctagtcgcagggccaacgtctgccgactacggctgaccgtgcctcctgaaagtcccgtgcccgagcaatgtgaaaagaaaattgagcgcaaagaacaactgctcgacctgagcaatggtgaacctacccgcaagcttccccagggggtcgtctatggagtggtgcggaggagcgatcagaatcagcagaaagaaatggtggtctatggctggagcactagccagctcaaagaggaaatgaactacatcaaagacgtccgagcaacgttagagaaggtccgcaaacgcatgtacggagactatgacgagatgcgccagaaaataaggcaactgactcaagagctcagcgtcagccatgcccagcaagaatatttggagaaccacatacaaacgcagtcctccgccctggaccgcttcaatgctatgaattctgctttagcttccgatagcatcggtcttcagaagacactagttgatgtgaccctggaaaactccaatattaaagaccagatcaggaacctccaacagacgtatgaagcttcaatggacaaacttagggaaaaacagcgccagctcgaggtcgcacaagtcgagaatcagcttctgaagatgaaggttgaatcctcccaggaggccaacgccgaggtcatgagagaaatgacaaagaaactatactctcagtacgaggagaagctccaggaggaacagcgcaaacacagtgctgagaaggaggcgctcctcgaagaaacaaactccttcctgaaggcaatagaagaggccaacaagaagatgcaggcagccgagatttcactggaggagaaagatcaacgcatcggagaactggatagactcatcgagcgcatggaaaaggagcggcatcagctacagctgcagctgctggagcacgagacagaaatgtcgggggaattaactgactccgataaggaacggtatcaacaactggaagaggcctctgccagtctgagagagaggattcgacatctggacgacatggtgcactgccagcaaaagaaggtcaaacaaatggtagaagaaattgaatccttaaagaagaagctgcagcagaaacagctcctcatcctgcagctcctggaaaaaatttcgtttctggagggcgagaacaacgagcttcagagccgtcttgactacctgacggagactcaggcaaaaaccgaggtcgagacacgcgaaattggagtaggctgtgatcttctgccctctcagacagggaggacacgcgagatcgtaatgccatcccggaactataccccttacacccgtgtactggagttaaccatgaagaagacattgacatag

SEQ ID NO: 27368 - DNA, 1401 bp, Artificial Sequence
  derived and/or modified sequence
atgctgagaagcaccagcaccgtgaccctgctgagcggcggcgccgccagaacccccggcgcccccagcagaagagccaacgtgtgcagactgagactgaccgtgccccccgagagccccgtgcccgagcagtgcgagaagaagatcgagagaaaggagcagctgctggacctgagcaacggcgagcccaccagaaagctgccccagggcgtggtgtacggcgtggtgagaagaagcgaccagaaccagcagaaggagatggtggtgtacggctggagcaccagccagctgaaggaggagatgaactacatcaaggacgtgagagccaccctggagaaggtgagaaagagaatgtacggcgactacgacgagatgagacagaagatcagacagctgacccaggagctgagcgtgagccacgcccagcaggagtacctggagaaccacatccagacccagagcagcgccctggacagattcaacgccatgaacagcgccctggccagcgacagcatcggcctgcagaagaccctggtggacgtgaccctggagaacagcaacatcaaggaccagatcagaaacctgcagcagacctacgaggccagcatggacaagctgagagagaagcagagacagctggaggtggcccaggtggagaaccagctgctgaagatgaaggtggagagcagccaggaggccaacgccgaggtgatgagagagatgaccaagaagctgtacagccagtacgaggagaagctgcaggaggagcagagaaagcacagcgccgagaaggaggccctgctggaggagaccaacagcttcctgaaggccatcgaggaggccaacaagaagatgcaggccgccgagatcagcctggaggagaaggaccagagaatcggcgagctggacagactgatcgagagaatggagaaggagagacaccagctgcagctgcagctgctggagcacgagaccgagatgagcggcgagctgaccgacagcgacaaggagagataccagcagctggaggaggccagcgccagcctgagagagagaatcagacacctggacgacatggtgcactgccagcagaagaaggtgaagcagatggtggaggagatcgagagcctgaagaagaagctgcagcagaagcagctgctgatcctgcagctgctggagaagatcagcttcctggagggcgagaacaacgagctgcagagcagactggactacctgaccgagacccaggccaagaccgaggtggagaccagagagatcggcgtgggctgcgacctgctgcccagccagaccggcagaaccagagagatcgtgatgcccagcagaaactacaccccctacaccagagtgctggagctgaccatgaagaagaccctgacctag

SEQ ID NO: 27369 - DNA, 1194 bp, Artificial Sequence
  derived and/or modified sequence
atgctgagaagcaccagcaccgtgaccctgctgagcggcggcgccgccagaacccccggcgcccccagcagaagagccaacgtgtgcagactgagactgaccgtgccccccgagagccccgtgcccgagcagtgcgagaagaagatcgagagaaaggagcagctgctggacctgagcaacggcgagcccaccagaaagctgccccagggcgtggtgtacggcgtggtgagaagaagcgaccagaaccagcagaaggagatggtggtgtacggctggagcaccagccagctgaaggaggagatgaactacatcaaggacaagaccctggtggacgtgaccctggagaacagcaacatcaaggaccagatcagaaacctgcagcagacctacgaggccagcatggacaagctgagagagaagcagagacagctggaggtggcccaggtggagaaccagctgctgaagatgaaggtggagagcagccaggaggccaacgccgaggtgatgagagagatgaccaagaagctgtacagccagtacgaggagaagctgcaggaggagcagagaaagcacagcgccgagaaggaggccctgctggaggagaccaacagcttcctgaaggccatcgaggaggccaacaagaagatgcaggccgccgagatcagcctggaggagaaggaccagagaatcggcgagctggacagactgatcgagagaatggagaaggagagacaccagctgcagctgcagctgctggagcacgagaccgagatgagcggcgagctgaccgacagcgacaaggagagataccagcagctggaggaggccagcgccagcctgagagagagaatcagacacctggacgacatggtgcactgccagcagaagaaggtgaagcagatggtggaggagatcgagagcctgaagaagaagctgcagcagaagcagctgctgatcctgcagctgctggagaagatcagcttcctggagggcgagaacaacgagctgcagagcagactggactacctgaccgagacccaggccaagaccgaggtggagaccagagagatcggcgtgggctgcgacctgctgcccagccagaccggcagaaccagagagatcgtgatgcccagcagaaactacaccccctacaccagagtgctggagctgaccatgaagaagaccctgacctag

SEQ ID NO: 27370 - DNA, 1308 bp, Artificial Sequence
  derived and/or modified sequence
atgctgagaagcaccagcaccgtgaccctgctgagcggcggcgccgccagaacccccggcgcccccagcagaagagccaacgtgtgcagactgagactgaccgtgccccccgagagccccgtgcccgagcagtgcgagaagaagatcgagagaaaggagcagctgctggacctgagcaacggcgagcccaccagaaagctgccccagggcgtggtgtacggcgtggtgagaagaagcgaccagaaccagcagaaggagatggtggtgtacggctggagcaccagccagctgaaggaggagatgaactacatcaaggacgtgagccacgcccagcaggagtacctggagaaccacatccagacccagagcagcgccctggacagattcaacgccatgaacagcgccctggccagcgacagcatcggcctgcagaagaccctggtggacgtgaccctggagaacagcaacatcaaggaccagatcagaaacctgcagcagacctacgaggccagcatggacaagctgagagagaagcagagacagctggaggtggcccaggtggagaaccagctgctgaagatgaaggtggagagcagccaggaggccaacgccgaggtgatgagagagatgaccaagaagctgtacagccagtacgaggagaagctgcaggaggagcagagaaagcacagcgccgagaaggaggccctgctggaggagaccaacagcttcctgaaggccatcgaggaggccaacaagaagatgcaggccgccgagatcagcctggaggagaaggaccagagaatcggcgagctggacagactgatcgagagaatggagaaggagagacaccagctgcagctgcagctgctggagcacgagaccgagatgagcggcgagctgaccgacagcgacaaggagagataccagcagctggaggaggccagcgccagcctgagagagagaatcagacacctggacgacatggtgcactgccagcagaagaaggtgaagcagatggtggaggagatcgagagcctgaagaagaagctgcagcagaagcagctgctgatcctgcagctgctggagaagatcagcttcctggagggcgagaacaacgagctgcagagcagactggactacctgaccgagacccaggccaagaccgaggtggagaccagagagatcggcgtgggctgcgacctgctgcccagccagaccggcagaaccagagagatcgtgatgcccagcagaaactacaccccctacaccagagtgctggagctgaccatgaagaagaccctgacctag

SEQ ID NO: 27371 - protein, 211 aa, Artificial Sequence
  derived and/or modified sequence
MCSLPRGFEPQAPEDLAQRSLVELREMLKRQERLLRNELQRITIADQGEQQSEENASTKNLTGLSSGTEKKPHYMEVLEMRAKNPVPQLRKFKTNVLPFRQNDSSSHCQKSGSPISSEERRRRDKQHLDDITAARLLPLHHMPTQLLSIEESLALQKQQKQNYEEMQAKLAAQKLAERLNIKMRSYNPEGESSGRYREVRDEDDDWSSDEF

SEQ ID NO: 27372 - DNA, 636 bp, Artificial Sequence
  derived and/or modified sequence
atgtgttccctccctagggggtttgaaccccaagcgccagaagatctagcacagcggtctctcgtggaactccgcgaaatgttaaaaagacaagaaagactcctgcgcaacgaacttcagagaatcactattgccgatcaaggggaacagcagtccgaggagaacgccagcacaaaaaacctgaccggcctgtcctccggcacagaaaaaaagcctcactatatggaggttctcgagatgcgggccaagaatccagtccctcaattgcgcaagtttaagacgaacgttctgcctttccgccagaacgactcttcctctcactgccaaaagagcggcagccctatctcttccgaagagaggaggcgacgagacaagcagcacctggacgacataaccgccgcgagattactgcctctgcatcatatgcccacacagctcttgtcaatcgaggagagtctggcgctgcagaagcagcagaaacagaactacgaggagatgcaagcaaagttggcggcacagaagttagccgagagactgaatatcaagatgaggagttataatccagagggcgaaagctcaggtcgttaccgagaagtccgagatgaagacgatgattggagctcggatgagttttag

SEQ ID NO: 27373 - DNA, 636 bp, Artificial Sequence
  derived and/or modified sequence
atgtgcagcctgccccggggctttgagccccaggcccctgaggacctggcccagaggagcctggtggagctgcgggagatgctgaagaggcaggagcggctgctgagaaatgagctgcagaggatcaccatcgctgaccagggcgagcagcagagcgaggagaatgccagcaccaagaacctgaccggcctgagcagcggcacagagaagaagccccactacatggaggtgctggagatgagggccaagaaccctgtgccccagctgaggaagttcaagaccaacgtgctgcccttccggcagaatgacagcagcagccactgccagaagagcggcagccccatcagcagcgaggagaggagaagaagagacaagcagcacctggatgacatcacagctgcccggctgctgcccctgcaccacatgcccacccagctgctgagcattgaggagagcctggccctgcagaagcagcagaagcagaactatgaggagatgcaggccaagctggccgcccagaagctggccgagcggctgaacatcaagatgaggagctacaaccctgagggggagagcagcggccgctaccgggaggtgagagatgaagatgatgactggagcagtgatgagttctag

SEQ ID NO: 27374 - DNA, 3629 bp, Artificial Sequence
  derived and/or modified sequence
aaaatggcgactcccgctcgtgccccggagtcaccgccgtccgcggatccggcgctagtagcggggcctgccgaggaagccgagtgcccgccgccgcgccagcctcagcccgcgcagaatgtgctcgctgccccgcggcttcgagccccaagctcccgaggacttggcgcagcggagtttggtggagctgcgggaaatgttgaagcgccaggagagacttttgcgcaacgagttacagaggatcaccattgcggaccaaggtgaacaacagtcagaagaaaacgcaagtactaagaacttgacaggcctttccagtgggactgagaagaaacctcattacatggaagtgctagaaatgcgagccaaaaacccagtgccccagctgcgtaaatttaaaaccaatgtgttaccttttcgacaaaatgattcatctagtcattgccagaagagtgggtctcctatttcctcagaagagcggcggcgcagggataagcagcatcttgatgacatcacagcagctcggcttctaccacttcaccatatgcccacgcagctgctctccatagaagaatccttggcacttcagaaacagcagaaacagaattatgaggagatgcaagcaaagctcgcagcgcaaaaattagctgaaagactgaatattaaaatgcggagttataatccagaaggggagtcttcagggagataccgagaagtaagggatgaagatgacgattggtcctctgatgaattctgaagataatctcctaaatcactgacgttgagatgtcatcatcttacatcagactttctaactagtatcaagatcagtgtcagatattgttgagggaagtaattttataaagttacacaaaggtagttataaaaaaagcccagtttgtctttcagaaggtgactttcatgtgcttgaaaagtttaatatttgaatattgtgtttaaccacatggtattaaaattttgcaatatattgtgtattggtctgatattttagtatatagtagaacatactttttttttctttaagccaaatgaaaagaggtaactttgcttttttcctttttcttacctatcaaatagcatttattacatgtctttcagtgaaatacttagttgttccaggcacctaaaatcaattaggaagacatagttcccttcttttttgggtaatgaagggagcagtctaaagaattgtatgcatgtttgcatggggttattgagacattggatgtgaaatacctaggaagacatgtatggagaatgcttaacaaatgctcttctcctttttctgtcttcccttaggaagaacgttatctctcttctgattaggaaggacttcccttttgagtagatgctggaaagtggaggttttttttgttggtttgtttgtttggttttgtgtttttttttgagatggggtcttgctctgtcgcccaggctggagtgcagtggcaggatctcggctcactgcaatctaggtggaggtctttttaaataacctcatgttacttcaggcaaatctggtacaggagaagcccaagctaactgagctgggtgaaggcttgtgcatcacctggcttgagttccttgctgtcacagatgataggttcatgtacacaacattaatgtttgataaggaaagcattttttttttgttaaaattgaattgtcagtactttacttttttccccccaaataggtatatatagactgcagaagcttcagtcccatatataaacgttcatgtcattttagaggattatatggttgtctccagagaaattaacttacattatcaaaaaattctttgtctaatatattggagtctttaaaagtgttgaagaataaaatattaattagaacaacttcaaatgctaaggtgatgttttaccgggacttaattaaatacaactttttcctttcgaaaaagactgttcacatttgcttccaggtgtaattattgctttcattccttacccccctcaagcaaatgtgaaaagtatactgacctaagattctcattagttttagttcttaaaacgaatagtaaatgatttcacagcgtaaaatttgatgttatttctggaagctggatgatatggaagagttcatgtgcctggacacacagttccctgtaatcctgccatctagggagataaactctgttaacattttgatgttgtgtttttgcttatttttctatgcatagttatgcatttatattctcaaaaatgaaatcataatgtacattgctttgtagtctgctctatatattgtcaatatgttcccatattaaatattttgctttttagacagctgtaggatattttatttcatgggtataccataactttaagatttatttcctattcagcaatttgattatgtattataatgtaatctgtaaatagtgatatgattaacatcttaatcacatccatagaaaatgacttatttccagaagataccgctctaaaaatgaaattgttaggtgaaagtgtttttgagaatttttatatatattactcactgcagagatcatgttcatttacattcccattagcaatatatccaatgctcagaattgaaaattactacttaaaatctttgcaaattgaataattacagaaaagggctacatttaaaatttgtatttgtttttcttacttagtgaaggttgtgttttttttcatattcattggccatgctatattcattcttttgagaattgctcattcatattttttctgttgcttgcttggagaatttgctctttttttggcatataagttcttaagaatgtccgtcctttgtcatatattgtaactttttttagccttatttgtcatttaacatagtttgtggtatttcagtatagaagttgttttctttaggagtctacctttgtgtatgtgcttgaaagtatttttgtaatccaagaatggataaatgtccttattttcttctagtattttcttatttcacttttacacctatctttaaaaggaatttaaattttgtttatatacattaactaaatcagtacaagtttggggtgaaaaggaaatttttaatccatctcaaatgtatttggttatattatataaggtagggatttgattttatttcgaagaatttaccaattggttcagtatgtgaaaccaccatttcccctctgattagtaatgctatttttatagaatattaaattcttatgtgtcttttgtgtcttaggccaatttctgggccttctgggttttttctacactgtcaataattatcgctttaattggtgttaatatttggtagtacacaggttctcccttgttcttttaaattttgtgaaatataacttacaaataagtacttaaaacagagcttaatgggtaaagcaacagctgtgtaatcacaaactagatgcagaggaggtcttgccagcactccaaaatctctgtgtgtcccctcttgacactcactgtttcccccagagctaactatcctgacgtatggtaattctccctctgtccttttaagaattattttaccagttatgtgtataacaatatggtttacattttgctcacttttgacttatataaaaatagaataatact

SEQ ID NO: 27375 - DNA, 636 bp, Artificial Sequence
  derived and/or modified sequence
atgtgcagcctgccccggggcttcgagccccaggcccccgaggacctcgcccagagatcactggttgaattaagggagatgctcaagagacaggagcgtcttcttcggaatgaactgcaaaggattaccatagccgatcagggggaacagcagagtgaagagaacgcctccactaagaatctgacgggactcagctcagggacggagaagaaaccacactatatggaagttctggaaatgcgggccaagaaccctgtcccacagttacgtaaatttaagacaaacgtgctgccatttcgtcaaaacgattcctcctcccactgccagaagagtggtagcccaatctcgagcgaagaaaggagaagacgggataagcagcacctggacgatattacagctgccaggctcctgcctctgcaccatatgcccactcaactcctgtccatagaagaatcactggcccttcagaagcagcagaagcagaactacgaggagatgcaggcaaaactagctgcgcagaaactggccgaacgtttgaacatcaagatgcggagctacaatccggagggggaatcatctggaagatatagagaggtgcgagacgaggatgacgattggagcagcgacgagttttag

SEQ ID NO: 27376 - DNA, 636 bp, Artificial Sequence
  derived and/or modified sequence
atgtgtagcctgccgagagggttcgaaccacaggcaccagaggatctggcacagaggtctctcgttgagctgagagagatgcttaagcgccaggaacggttgttgagaaacgagcttcagcgaattaccatcgctgaccagggcgaacaacagtcggaggagaacgccagtaccaaaaacctgactggtttgagctctggtaccgagaaaaagccgcactatatggaagtcctggaaatgagagcgaaaaatcccgtacctcaactacggaagttcaagaccaacgtacttccgtttcgccagaacgatagttcaagtcattgccaaaaatccgggagccccatttctagcgaagaacggcgaaggagggacaagcagcacctggacgatatcactgccgctaggctcttacctctacaccacatgcctactcagttgttgagcatcgaagaatccttggccctgcaaaaacaacagaagcaaaattacgaagagatgcaggcgaagctcgccgctcagaagttggctgagagacttaacattaagatgcgttcttataaccctgaaggggagagctcgggtcgatatagggaggttcgcgacgaagacgacgactggtcttccgacgagttttag

SEQ ID NO: 27377 - DNA, 636 bp, Artificial Sequence
  derived and/or modified sequence
atgtgcagcctgcccagaggcttcgagccccaggcccccgaggacctggcccagagaagcctggtggagctgagagagatgctgaagagacaggagagactgctgagaaacgagctgcagagaatcaccatcgccgaccagggcgagcagcagagcgaggagaacgccagcaccaagaacctgaccggcctgagcagcggcaccgagaagaagccccactacatggaggtgctggagatgagagccaagaaccccgtgccccagctgagaaagttcaagaccaacgtgctgcccttcagacagaacgacagcagcagccactgccagaagagcggcagccccatcagcagcgaggagagaagaagaagagacaagcagcacctggacgacatcaccgccgccagactgctgcccctgcaccacatgcccacccagctgctgagcatcgaggagagcctggccctgcagaagcagcagaagcagaactacgaggagatgcaggccaagctggccgcccagaagctggccgagagactgaacatcaagatgagaagctacaaccccgagggcgagagcagcggcagatacagagaggtgagagacgaggacgacgactggagcagcgacgagttctag

SEQ ID NO: 27378 - protein, 558 aa, Artificial Sequence
  derived and/or modified sequence
MRCALALSALLLLLSTPPLLPSSPSPSPSPSQNATQTTTDSSNKTAPTPASSVTIMATDTAQQSTVPTSKANEILASVKATTLGVSSDSPGTTTLAQQVSGPVNTTVARGGGSGNPTTTIESPKSTKSADTTTVATSTATAKPNTTSSQNGAEDTTNSGGKSSHSVTTDLTSTKAEHLTTPHPTSPLSPRQPTSTHPVATPTSSGHDHLMKISSSSSTVAIPGYTFTSPGMTTTLLETVFHHVSQAGLELLTSGDLPTLASQSAGITASSVISQRTQQTSSQMPASSTAPSSQETVQPTSPATALRTPTLPETMSSSPTAASTTHRYPKTPSPTVAHESNWAKCEDLETQTQSEKQLVLNLTGNTLCAGGASDEKLISLICRAVKATFNPAQDKCGIRLASVPGSQTVVVKEITIHTKLPAKDVYERLKDKWDELKEAGVSDMKLGDQGPPEEAEDRFSMPLIITIVCMASFLLLVAALYGCCHQRLSQRKDQQRLTEELQTVENGYHDNPTLEVMETSSEMQEKKVVSLNGELGDSWIVPLDNLTKDDLDEEEDTHL

SEQ ID NO: 27379 - protein, 560 aa, Artificial Sequence
  derived and/or modified sequence
MRCALALSALLLLLSTPPLLPSSPSPSPSPSQNETATQTTTDSSNKTAPTPASSVTIMATDTAQQSTVPTSKANEILASVKATTLGVSSDSPGTTTLAQQVSGPVNTTVARGGGSGNPTTTIESPKSTKSADTTTVATSTATAKPNTTSSQNGAEDTTNSGGKSSHSVTTDLTSTKAEHLTTPHPTSPLSPRQPTSTHPVATPTSSGHDHLMKISSSSSTVAIPGYTFTSPGMTTTLLETVFHHVSQAGLELLTSGDLPTLASQSAGITASSVISQRTQQTSSQMPASSTAPSSQETVQPTSPATALRTPTLPETMSSSPTAASTTHRYPKTPSPTVAHESNWAKCEDLETQTQSEKQLVLNLTGNTLCAGGASDEKLISLICRAVKATFNPAQDKCGIRLASVPGSQTVVVKEITIHTKLPAKDVYERLKDKWDELKEAGVSDMKLGDQGPPEEAEDRFSMPLIITIVCMASFLLLVAALYGCCHQRLSQRKDQQRLTEELQTVENGYHDNPTLEVMETSSEMQEKKVVSLNGELGDSWIVPLDNLTKDDLDEEEDTHL

SEQ ID NO: 27380 - DNA, 1677 bp, Artificial Sequence
  derived and/or modified sequence
atgaggtgcgctttagccttgtcggccctccttctgctgctaagtacacctcctttgctcccatcttcaccttcgccatcaccgagcccaagccaaaacgctacacagactactacggattcttctaacaagaccgcccccacaccagcaagctccgtgactattatggccacagacacagcccagcagtctacggtgcctacgtccaaagcaaatgagatcttagctagtgtcaaggccactactctcggagtttcctcagattctcccggtaccacaacccttgcgcagcaggtttctggacccgttaatacaaccgtcgctcgtggcggggggagtggtaatcccacaaccacaatcgagtcccctaaaagcacgaaatcggcggacactactaccgtggcgacctcaactgccactgctaagcccaatacaacgtcttcccagaacggggccgaagacaccaccaactcaggcggcaagtccagtcacagcgtcactaccgacttaacttccacaaaagccgagcacttaaccacaccgcatccgacttcccccctctctcccagacagcccaccagtacacacccagttgctacccctacttcatctgggcatgatcatttgatgaagatctctagctcctcctccacagtggctattcctgggtacacttttacttcccctgggatgaccaccacactactggagacagtgtttcaccatgtaagtcaggccggactggaactgctgacctctggtgacctgccaactctggcctcccaaagtgctggcatcaccgctagctccgtgataagtcagagaacccagcagacttcatctcagatgccagcctcttccactgctccctcatcacaggagactgtccagccaacaagccccgctaccgcattgaggactcccacattgcctgaaaccatgtcttcatcccccaccgccgcctctacaacccataggtaccccaaaaccccctcccctaccgtagctcacgagtctaactgggctaagtgtgaagatcttgagacccagactcagagtgaaaagcagctggtcctaaatctgactggtaacactctctgtgccggcggagcgtcagatgaaaaattgattagtctgatctgccgtgctgtaaaagccacttttaatccagcccaggacaagtgcggcatccgcctggcctccgtgcccggtagccagaccgtggtcgtgaaggagatcacaatccacacaaagttgccagccaaagacgtttacgaaagattaaaagacaagtgggacgagcttaaagaggccggagtttctgacatgaaacttggtgaccaggggccacctgaggaagctgaggatcggttttccatgccgttaataatcacgatcgtgtgtatggcatcctttctgctgttggtagccgcattgtatggatgttgtcaccagcggttatctcagcggaaagatcagcagcgactgacagaggagctgcagacggtcgaaaacggctaccatgacaatcccaccctcgaagttatggaaaccagctccgaaatgcaggaaaaaaaagtagtttccctgaacggggagctcggcgattcttggattgtccctctggataacctgacaaaggacgatctcgacgaggaggaagacacacacctctag

SEQ ID NO: 27381 - DNA, 1683 bp, Artificial Sequence
  derived and/or modified sequence
atgcggtgcgccctggctctctctgccctgctgctcctgctgagcaccccccctttgctcccatcatccccatctccatcaccgtcaccaagtcaaaatgagacagcgacgcagacaactactgatagctcaaacaaaacggcccctacgccagcctcttccgtgactataatggccactgacaccgcacaacaaagcactgtcccaacctctaaggcaaacgaaatcctagcgtctgtcaaagcaaccactttgggagtctcgagcgactcccctgggacaaccacactggcccagcaggtcagtgggcctgtgaataccacagttgcgcgcggaggaggaagtgggaatccaacaactacaatcgaatcacctaagtcaacaaagagcgcagacacaaccaccgtggctacctcgaccgcaactgctaaaccaaacactacatcctcacagaacggcgccgaggacacaacaaactccggcggaaaatcaagccattccgtgactacggacttaaccagtactaaggcggaacacctgacaaccccccatcctacttcacctctgtcgccaagacagccaacgagcacccacccagttgctacacccacgagctctggacacgaccatctaatgaagatcagctctagtagctccacagtcgctattcctggctacacattcacttccccaggcatgactactacgcttctcgaaacggtgtttcaccacgtctcccaagcaggactagaactgctcacgagcggagatctacccaccctggcttcgcagtcagctgggatcaccgcctctagtgtgatttcccagcgcactcagcaaactagtagccagatgcccgcaagctcaacagcacccagctcgcaagaaacggttcagccaacatcccctgctaccgccttacgcaccccaactctgccagagactatgtcttctagcccaacagctgcgagtactacacaccgctatccaaaaacaccatccccaaccgttgcccatgaaagtaattgggcaaaatgcgaggatttggaaacccagactcagagtgaaaagcagttggttctgaatctgacagggaatactctctgtgccggcggtgcttctgacgagaagctgatttccctgatctgcagagccgtcaaagctacattcaaccctgcccaggacaaatgcggcatcagactggcgtctgtgcccggaagccagactgtcgttgtcaaggagataaccatccataccaaactcccggccaaagatgtgtacgaacggcttaaggacaaatgggacgaactcaaggaggctggggtgtccgatatgaagctgggagaccagggaccgccagaggaggctgaagaccgttttagcatgcctctgattattacaattgtctgcatggcatcctttctgctgctggtggcggccttgtacgggtgctgccatcagaggctaagtcaacgaaaagatcagcaacgccttaccgaggagctgcagacagtcgagaatggctaccatgacaaccccaccctcgaggtgatggagacgagttccgaaatgcaagagaagaaagtcgtatctctgaatggggagctcggagatagctggatcgttccccttgataatctcactaaagatgatttagacgaggaagaagacacgcacctctag

SEQ ID NO: 27382 - DNA, 1677 bp, Artificial Sequence
  derived and/or modified sequence
atgagatgtgccctggccctgagcgccctgctgctgctgctgagcaccccacccctgctgcccagcagccccagccccagccccagccccagccagaatgccacccagaccaccacagacagcagcaacaagacagcccccaccccagccagctctgtgaccatcatggccacagacacagcccagcagagcacagtgcccaccagcaaggccaatgagatcctggcctctgtgaaggccaccaccctgggcgtgtccagtgacagccctggcaccaccaccctggcccagcaggtgtctggccctgtgaacaccaccgtggcccggggcggcggcagcggcaaccccaccaccaccatcgagagccccaagagcaccaagtctgctgacaccaccaccgtggccaccagcacagccacagccaagcccaacaccaccagcagccagaatggagctgaggacaccaccaacagcggcggcaagagcagccacagcgtgaccacagacctgaccagcaccaaggccgagcacctgaccaccccccaccccaccagccccctgagcccccggcagcccaccagcacccaccctgtggccacccccaccagcagcggccatgaccacctgatgaagatcagcagcagcagcagcacagtggccatccctggctacaccttcaccagccctggcatgaccaccaccctgctggagaccgtcttccaccacgtgtcccaggccggcctggagctgctgaccagcggggacctgcccaccctggccagccagagcgctggcatcacagccagcagcgtcatcagccagaggacccagcagaccagcagccagatgcctgccagcagcacagcccccagcagccaggagaccgtgcagcccaccagccctgccacagccctgcggacccccaccctgcctgagaccatgagcagcagccccacagctgccagcaccacccaccgctaccccaagacccccagccccaccgtggcccacgagagcaactgggccaagtgtgaggacctggagacccagacccagagcgagaagcagctggtgctgaacctgaccggcaacaccctgtgtgccggcggggccagtgatgagaagctgatcagcctcatctgcagagctgtgaaggccaccttcaacccagcccaggacaagtgtggcatccggctggcctctgtgcccggcagccagacagtggtggtgaaggagatcaccatccacaccaagctgcctgccaaggatgtgtatgagcggctgaaggacaagtgggatgagctgaaggaggccggcgtgtctgacatgaagctgggggaccagggccccccagaggaggctgaagatcgcttctccatgcccctcatcatcaccatcgtgtgcatggccagcttcctgctgctggtggccgccctgtatggctgctgccaccagaggctgagccagaggaaggaccagcagaggctgacagaggagctgcagacagtggagaatggctaccatgacaaccccaccctggaggtgatggagaccagcagcgagatgcaggagaagaaggtggtgtccctgaatggagagctgggggacagctggatcgtgcccctggacaacctgaccaaggatgacctggatgaggaggaggacacccacctgtag

SEQ ID NO: 27383 - DNA, 1683 bp, Artificial Sequence
  derived and/or modified sequence
atgagatgtgccctggccctgagcgccctgctgctgctgctgagcaccccacccctgctgcccagcagccccagccccagccccagccccagccagaatgaaacagccacccagaccaccacagacagcagcaacaagacagcccccaccccagccagctctgtgaccatcatggccacagacacagcccagcagagcacagtgcccaccagcaaggccaatgagatcctggcctctgtgaaggccaccaccctgggcgtgtccagtgacagccctggcaccaccaccctggcccagcaggtgtctggccctgtgaacaccaccgtggcccggggcggcggcagcggcaaccccaccaccaccatcgagagccccaagagcaccaagtctgctgacaccaccaccgtggccaccagcacagccacagccaagcccaacaccaccagcagccagaatggagctgaggacaccaccaacagcggcggcaagagcagccacagcgtgaccacagacctgaccagcaccaaggccgagcacctgaccaccccccaccccaccagccccctgagcccccggcagcccaccagcacccaccctgtggccacccccaccagcagcggccatgaccacctgatgaagatcagcagcagcagcagcacagtggccatccctggctacaccttcaccagccctggcatgaccaccaccctgctggagaccgtcttccaccacgtgtcccaggccggcctggagctgctgaccagcggggacctgcccaccctggccagccagagcgctggcatcacagccagcagcgtcatcagccagaggacccagcagaccagcagccagatgcctgccagcagcacagcccccagcagccaggagaccgtgcagcccaccagccctgccacagccctgcggacccccaccctgcctgagaccatgagcagcagccccacagctgccagcaccacccaccgctaccccaagacccccagccccaccgtggcccacgagagcaactgggccaagtgtgaggacctggagacccagacccagagcgagaagcagctggtgctgaacctgaccggcaacaccctgtgtgccggcggggccagtgatgagaagctgatcagcctcatctgcagagctgtgaaggccaccttcaacccagcccaggacaagtgtggcatccggctggcctctgtgcccggcagccagacagtggtggtgaaggagatcaccatccacaccaagctgcctgccaaggatgtgtatgagcggctgaaggacaagtgggatgagctgaaggaggccggcgtgtctgacatgaagctgggggaccagggccccccagaggaggctgaagatcgcttctccatgcccctcatcatcaccatcgtgtgcatggccagcttcctgctgctggtggccgccctgtatggctgctgccaccagaggctgagccagaggaaggaccagcagaggctgacagaggagctgcagacagtggagaatggctaccatgacaaccccaccctggaggtgatggagaccagcagcgagatgcaggagaagaaggtggtgtccctgaatggagagctgggggacagctggatcgtgcccctggacaacctgaccaaggatgacctggatgaggaggaggacacccacctgtag

SEQ ID NO: 27384 - DNA, 1677 bp, Artificial Sequence
  derived and/or modified sequence
atgcggtgcgccctggccctgagcgccctgctgctgctgctgagcacgccccctctattgccttcaagtccaagccctagcccatcacccagtcagaacgccactcagacaaccacggattccagtaacaaaacggctccaacgcctgcctcctctgtgacaataatggccaccgacacggctcagcaatccactgtcccaaccagtaaggccaatgagatattagcctcagtgaaagctaccaccctgggggtgtcaagcgatagcccaggaacaaccactctggcgcagcaggtgtccggcccggtcaatacaaccgtagctcgagggggggggagtggaaatccaacgactacaatagaatcacctaagtcaacaaagtcagcagataccaccacagtcgctacaagtactgcgacagcgaaacccaacaccacctccagtcagaacggtgctgaagataccaccaattcaggcgggaaaagtagccactcagtaacaacagatcttaccagtaccaaagctgagcacttgacaactccacacccgaccagccccctgagccctcgccagcccactagcactcatcccgtggcaacccccacaagtagtggacacgaccatcttatgaagatttcttcatcatccagcacagttgcgatccccggatacacttttacatcaccagggatgaccaccactctactggagaccgtttttcaccatgtaagtcaggccggactcgaactgctgacatcaggcgacctacctacccttgcttcccagtcagcaggtatcacagcgagctctgtgatcagtcagcgcactcaacaaactagctcgcagatgccagcctcctccacagccccaagttctcaggagactgttcagccgaccagccctgcaacagccctcaggacccccactcttcctgaaaccatgagttcgtcaccgacagctgcctcgacaactcatcggtaccccaaaacaccttcacctaccgtagcacatgagtccaactgggccaagtgtgaagacctggaaactcagacacagtcggagaagcagttagttctgaatctcacaggaaacacactctgcgctggcggggcaagcgatgaaaaactgatctcactaatttgccgtgccgtcaaggctactttcaatccagcccaagacaagtgtggaatccggctggcctccgtgccgggatcccagacggtcgttgtaaaagagataacaatccacacaaagctcccagctaaggacgtctacgaacgattgaaagataagtgggatgagctgaaagaggccggggtgtcagatatgaaactgggggaccagggccctcctgaggaggccgaagacagatttagcatgcctttgatcatcaccattgtttgcatggccagttttctgctcttagtggctgccctttacggctgctgccatcagagactgagccagcggaaagaccagcagagattgaccgaggaactgcagactgtggagaatggatatcatgataatcccacgctggaggtgatggagactagcagcgaaatgcaggagaaaaaagtcgtgtcgttgaacggggaacttggggacagctggatcgtcccgctagacaatctgactaaggatgatctggacgaggaggaagacactcatctgtag

SEQ ID NO: 27385 - DNA, 1683 bp, Artificial Sequence
  derived and/or modified sequence
atgcggtgcgccctggccctgagcgccctgctgctgctgctgagcacacctccattactgccttcttcaccctctccaagcccttcacctagccagaacgagactgcgacccagactaccaccgactcttccaataaaacagcccccactccagcctcaagtgtgacaattatggctaccgacacagctcagcagagtacggtcccgacttcaaaagccaatgaaatcctagcctccgtaaaagcgacgacccttggtgtatcctctgattctcccggcaccaccaccctggctcagcaggtcagtggccctgtaaacacaaccgtggctcgtgggggcggctccgggaaccctactaccacaatcgagagtcccaaatcaacaaagagtgcagatacgactactgtggccacctctaccgctaccgctaaaccaaatacgacaagttcccagaacggagcagaggacaccaccaatagcggagggaagtccagccactctgtaactaccgacctgacttctaccaaggccgaacatttgacaacccctcaccccaccagcccactgagccctaggcagcccacttcaactcatccagttgctacaccaacttcctccggccacgaccaccttatgaaaattagttctagttccagcactgtggcaattcccggctataccttcacctcacccggaatgacaactacgttacttgaaacagtttttcaccacgtgagccaagcgggactcgaactgttaactagcggggacctgccaactttggcgagtcagtctgccgggataaccgcgtcctctgtgattagtcagcggacacagcagacttcctctcagatgcctgcttcttcaacggctcccagctcccaggagaccgtgcaaccaacctctcctgccaccgccctccggacccccaccctccctgaaacaatgtcctctagcccaaccgctgcttccacaacccaccgctacccaaagactccctccccgactgtagcgcatgaaagtaattgggccaagtgcgaggacttggagacacagacacaaagtgaaaaacagctagtgctaaatttaacaggcaacacactctgcgcggggggcgcatccgacgaaaagctgatcagtcttatctgccgcgccgtgaaagcgaccttcaaccctgcacaggataaatgcggcattagactcgcatctgtgccagggagtcagaccgtagtagtgaaggagatcaccatccacaccaaactgccggccaaggacgtttacgagcgtctgaaagacaaatgggatgaactcaaggaggcaggcgtttccgatatgaagttaggtgaccaggggccccctgaagaagcggaggatcggttttctatgcctctaattataacgatcgtgtgcatggcttcttttctactgcttgtcgctgctctctacgggtgttgccaccaaaggttaagccagagaaaggaccagcagcgcttgacagaggaactgcaaacggtcgagaacggttaccacgacaatccaacactcgaagtgatggaaacgtcttctgaaatgcaggagaagaaggtcgtaagcctgaatggagaattgggtgatagctggatcgtgcctttagataatctgactaaggatgatcttgatgaggaagaagatacacatctttag

SEQ ID NO: 27386 - DNA, 2105 bp, Artificial Sequence
  derived and/or modified sequence
acgccgcccaggacgcagccgccgccgccgccgctcctctgccactggctctgcgccccagcccggctctgctgcagcggcagggaggaagagccgccgcagcgcgactcgggagccccgggccacagcctggcctccggagccacccacaggcctccccgggcggcgcccacgctcctaccgcccggacgcgcggatcctccgccggcaccgcagccacctgctcccggcccagaggcgacgacacgatgcgctgcgcgctggcgctctcggcgctgctgctactgttgtcaacgccgccgctgctgccgtcgtcgccgtcgccgtcgccgtcgccctcccagaatgcaacccagactactacggactcatctaacaaaacagcaccgactccagcatccagtgtcaccatcatggctacagatacagcccagcagagcacagtccccacttccaaggccaacgaaatcttggcctcggtcaaggcgaccacccttggtgtatccagtgactcaccggggactacaaccctggctcagcaagtctcaggcccagtcaacactaccgtggctagaggaggcggctcaggcaaccctactaccaccatcgagagccccaagagcacaaaaagtgcagacaccactacagttgcaacctccacagccacagctaaacctaacaccacaagcagccagaatggagcagaagatacaacaaactctggggggaaaagcagccacagtgtgaccacagacctcacatccactaaggcagaacatctgacgacccctcaccctacaagtccacttagcccccgacaacccacttcgacgcatcctgtggccaccccaacaagctcgggacatgaccatcttatgaaaatttcaagcagttcaagcactgtggctatccctggctacaccttcacaagcccggggatgaccaccaccctactagagacagtgtttcaccatgtcagccaggctggtcttgaactcctgacctcgggtgatctgcccaccttggcctcccaaagtgctgggattacagcgtcatcggttatctcgcaaagaactcaacagacctccagtcagatgccagccagctctacggccccttcctcccaggagacagtgcagcccacgagcccggcaacggcattgagaacacctaccctgccagagaccatgagctccagccccacagcagcatcaactacccaccgataccccaaaacaccttctcccactgtggctcatgagagtaactgggcaaagtgtgaggatcttgagacacagacacagagtgagaagcagctcgtcctgaacctcacaggaaacaccctctgtgcagggggcgcttcggatgagaaattgatctcactgatatgccgagcagtcaaagccaccttcaacccggcccaagataagtgcggcatacggctggcatctgttccaggaagtcagaccgtggtcgtcaaagaaatcactattcacactaagctccctgccaaggatgtgtacgagcggctgaaggacaaatgggatgaactaaaggaggcaggggtcagtgacatgaagctaggggaccaggggccaccggaggaggccgaggaccgcttcagcatgcccctcatcatcaccatcgtctgcatggcatcattcctgctcctcgtggcggccctctatggctgctgccaccagcgcctctcccagaggaaggaccagcagcggctaacagaggagctgcagacagtggagaatggttaccatgacaacccaacactggaagtgatggagacctcttctgagatgcaggagaagaaggtggtcagcctcaacggggagctgggggacagctggatcgtccctctggacaacctgaccaaggacgacctggatgaggaggaagacacacacctctagtccggtctgccggtggcctccagcagcaccacagagctccagaccaaccaccccaagtgccgtttggatggggaagggaaagactggggagggagagtgaactccgaggggtgtcccctcccaatccccccagggccttaatttttcccttttcaacctgaacaaatcacattctgtcca

SEQ ID NO: 27387 - DNA, 5988 bp, Artificial Sequence
  derived and/or modified sequence
agccgcgcagacgccgcccaggacgcagccgccgccgccgccgctcctctgccactggctctgcgccccagcccggctctgctgcagcggcagggaggaagagccgccgcagcgcgactcgggagccccgggccacagcctggcctccggagccacccacaggcctccccgggcggcgcccacgctcctaccgcccggacgcgcggatcctccgccggcaccgcagccacctgctcccggcccagaggcgacgacacgatgcgctgcgcgctggcgctctcggcgctgctgctactgttgtcaacgccgccgctgctgccgtcgtcgccgtcgccgtcgccgtcgccctcccagaatgaaacagcaacccagactactacggactcatctaacaaaacagcaccgactccagcatccagtgtcaccatcatggctacagatacagcccagcagagcacagtccccacttccaaggccaacgaaatcttggcctcggtcaaggcgaccacccttggtgtatccagtgactcaccggggactacaaccctggctcagcaagtctcaggcccagtcaacactaccgtggctagaggaggcggctcaggcaaccctactaccaccatcgagagccccaagagcacaaaaagtgcagacaccactacagttgcaacctccacagccacagctaaacctaacaccacaagcagccagaatggagcagaagatacaacaaactctggggggaaaagcagccacagtgtgaccacagacctcacatccactaaggcagaacatctgacgacccctcaccctacaagtccacttagcccccgacaacccacttcgacgcatcctgtggccaccccaacaagctcgggacatgaccatcttatgaaaatttcaagcagttcaagcactgtggctatccctggctacaccttcacaagcccggggatgaccaccaccctactagagacagtgtttcaccatgtcagccaggctggtcttgaactcctgacctcgggtgatctgcccaccttggcctcccaaagtgctgggattacagcgtcatcggttatctcgcaaagaactcaacagacctccagtcagatgccagccagctctacggccccttcctcccaggagacagtgcagcccacgagcccggcaacggcattgagaacacctaccctgccagagaccatgagctccagccccacagcagcatcaactacccaccgataccccaaaacaccttctcccactgtggctcatgagagtaactgggcaaagtgtgaggatcttgagacacagacacagagtgagaagcagctcgtcctgaacctcacaggaaacaccctctgtgcagggggcgcttcggatgagaaattgatctcactgatatgccgagcagtcaaagccaccttcaacccggcccaagataagtgcggcatacggctggcatctgttccaggaagtcagaccgtggtcgtcaaagaaatcactattcacactaagctccctgccaaggatgtgtacgagcggctgaaggacaaatgggatgaactaaaggaggcaggggtcagtgacatgaagctaggggaccaggggccaccggaggaggccgaggaccgcttcagcatgcccctcatcatcaccatcgtctgcatggcatcattcctgctcctcgtggcggccctctatggctgctgccaccagcgcctctcccagaggaaggaccagcagcggctaacagaggagctgcagacagtggagaatggttaccatgacaacccaacactggaagtgatggagacctcttctgagatgcaggagaagaaggtggtcagcctcaacggggagctgggggacagctggatcgtccctctggacaacctgaccaaggacgacctggatgaggaggaagacacacacctctagtccggtctgccggtggcctccagcagcaccacagagctccagaccaaccaccccaagtgccgtttggatggggaagggaaagactggggagggagagtgaactccgaggggtgtcccctcccaatccccccagggccttaatttttcccttttcaacctgaacaaatcacattctgtccagattcctcttgtaaaataacccactagtgcctgagctcagtgctgctggatgatgagggagatcaagaaaaagccacgtaagggactttatagatgaactagtggaatcccttcattctgcagtgagattgccgagacctgaagagggtaagtgacttgcccaaggtcagagccacttggtgacagagccaggatgagaacaaagattccatttgcaccatgccacactgctgtgttcacatgtgccttccgtccagagcagtcccgggcaggggtgaaactccagcaggtggctgggctggaaaggagggcagggctacatcctggctcggtgggatctgacgacctgaaagtccagctcccaagttttccttctcctaccccagcctcgtgtacccatcttcccaccctctatgttcttacccctccctacactcagtgtttgttcccacttactctgtcctggggcctctgggattagcacaggttattcataaccttgaaccccttgttctggattcggattttctcacatttgcttcgtgagatgggggcttaacccacacaggtctccgtgcgtgaaccaggtctgcttaggggacctgcgtgcaggtgaggagagaaggggacactcgagtccaggctggtatctcagggcagctgatgaggggtcagcaggaacactggcccattgcccctggcactccttgcagaggccacccacgatcttctttgggcttccatttccaccagggactaaaatctgctgtagctagtgagagcagcgtgttccttttgttgttcactgctcagctgatgggagtgattccctgagacccagtatgaaagagcagtggctgcaggagaggccttcccggggccccccatcagcgatgtgtcttcagagacaatccattaaagcagccaggaaggacaggctttcccctgtatatcataggaaactcagggacatttcaagttgctgagagttttgttatagttgttttctaacccagccctccactgccaaaggccaaaagctcagacagttggcagacgtccagttagctcatctcactcactctgattctcctgtgccacaggaaaagagggcctggaaagcgcagtgcatgctgggtgcatgaagggcagcctgggggacagactgttgtgggaacgtcccactgtcctggcctggagctaggccttgctgttcctcttctctgtgagcctagtggggctgctgcggttctcttgcagtttctggtggcatctcaggggaacacaaagctatgtctattccccaatataggacttttatgggctcggcagttagctgccatgtagaaggctcctaagcagtgggcatggtgaggtttcatctgattgagaagggggaatcctgtgtggaatgttgaactttcgccatggtctccatcgttctgggcgtaaattccctgggatcaagtaggaaaatgggcagaactgcttaggggaatgaaattgccatttttcgggtgaaacgccacacctccagggtcttaagagtcaggctccggctgtagtagctctgatgaaataggctatccactcgggatggcttactttttaaaagggtagggggaggggctggggaagatctgtcctgcaccatctgcctaattccttcctcacagtctgtagccatctgatatcctaggggaaaaggaaggccaggggttcacatagggccccagcgagtttcccaggagttagagggatgcgaggctaacaagttccaaaaacatctgccccgatgctctagtgtttggaggtgggcaggatggagaacagtgcctgtttgggggaaaacaggaaatcttgttaggcttgagtgaggtgtttgcttccttcttgcccagcgctgggttctctccacccagtaggttttctgttgtggtcccgtgggagaggccagactggattattcctcctttgctgatcctgggtcacacttcaccagccagggcttttgacggagacagcaaataggcctctgcaaatcaatcaaaggctgcaaccctatggcctcttggagacagatgatgactggcaaggactagagagcaggagtgcctggccaggtcggtcctgactctcctgactctccatcgctctgtccaaggagaacccggagaggctctgggctgattcagaggttactgctttatattcgtccaaactgtgttagtctaggcttaggacagcttcagaatctgacaccttgccttgctcttgccaccaggacacctatgtcaacaggccaaacagccatgcatctataaaggtcatcatcttctgccacctttactgggttctaaatgctctctgataattcagagagcattgggtctgggaagaggtaagaggaacactagaagctcagcatgacttaaacaggttgtagcaaagacagtttatcatcagctctttcagtggtaaactgtggtttccccaagctgcacaggaggccagaaaccacaagtatgatgactaggaagcctactgtcatgagagtggggagacaggcagcaaagcttatgaaggaggtacagaatattctttgcgttgtaagacagaatacgggtttaatctagtctaggcaccagatttttttcccgcttgataaggaaagctagcagaaagtttatttaaaccacttcttgagctttatcttttttgacaatatactggagaaactttgaagaacaagttcaaactgatacatatacacatatttttttgataatgtaaatacagtgaccatgttaacctaccctgcactgctttaagtgaacatactttgaaaaagcattatgttagctgagtgatggccaagttttttctctggacaggaatgtaaatgtcttactggaaatgacaagtttttgcttgatttttttttttaaacaaaaaatgaaatataacaagacaaacttatgataaagtatttgtcttgtagatcaggtgttttgttttgtttttttaattttaaaatgcaaccctgccccctccccagcaaagtcacagctccatttcagtaaaggttggagtcaatatgctctggttggcaggcaaccctgtagtcatggagaaaggtatttcaagatctagtccaatctttttctagagaaaaagataatctgaagctcacaaagatgaagtgacttcctcaaaatcacatggttcaggacagaaacaagattaaaacctggatccacagactgtgcgcctcagaaggaataatcggtaaattaagaattgctactcgaaggtgccagaatgacacaaaggacagaattcctttcccagttgttaccctagcaaggctagggagggcatgaacacaaacataagaactggtcttctacactttctctgaatcatttaggtttaagatgtaagtgaacaattctttctttctgccaagaaacaaagttttggatgagcttttatatatggaacttactccaacaggactgagggaccaaggaaacatgatgggggaggcagagagggcaagagtaaaactgtagcatagcttttgtcacggtcactagctgatccctcaggtctgctgcaaacacagcatggaggacacagatgactctttggtgttggtctttttgtctgcagtgaatgttcaacagtttgcccaggaactgggggatcatatatgtcttagtggacaggggtctgaagtacactggaatttactgagaaacttgtttgtaaaaactatagttaataattattgcattttcttacaaaaatatattttggaaaattgtatactgtcaattaaagtgtttttgtgtaaactggttc

SEQ ID NO: 27388 - DNA, 1677 bp, Artificial Sequence
  derived and/or modified sequence
atgagatgtgcgctggcactgtccgctctgcttctcctgctttcaactccacccctgttaccttcctcaccgagtccatccccaagtccttcgcagaacgcaactcagaccaccactgattccagtaacaagaccgccccaacgcccgcatcatctgtgactatcatggccacggacaccgcccaacagtccactgtccctacttccaaggcaaacgaaatcctggctagcgtcaaggccacaacgctcggagtctcttctgatagcccaggcactacaaccctcgctcaacaggtcagcggccctgtcaataccacagtggccagggggggtggatcaggtaaccctactaccacaattgagagccccaaatcaacaaaatctgccgacaccaccactgtcgcaacttccactgcaacggcaaagcccaacacaacatcatctcagaacggcgcagaggatacaactaatagtggtggaaaatcttcccactctgtgaccactgatttgacatccaccaaggccgagcacctgacaaccccccatccaacatcacccctgtctccgagacagcctactagcacgcaccctgtagcgaccccaactagtagcggacacgatcatctgatgaaaatttccagctcatcttctaccgtggccattcctggctacacatttaccagtccagggatgaccactacattgttagaaacagtttttcaccacgtgtctcaggccggacttgaactcctgacctctggggatctgcccactctggccagtcagtcagcgggaatcacagcatccagcgtaattagtcaaagaacccagcagacgagctctcagatgccagcttctagcactgcgccttccagccaggagaccgtccagccaaccagccctgccaccgccctgagaacacctaccttgcccgagacaatgagttcttcacctaccgctgcatcaacaacacaccggtatccaaaaaccccctcaccaactgtcgcgcacgaatccaattgggcaaagtgtgaagatctggagactcagactcaaagtgaaaagcagttagtcctcaacctgactggcaacaccctttgtgccggaggagcttcagatgaaaaacttatcagtctgatctgccgggcagtgaaggccacttttaaccccgcacaggacaagtgtggcattcgactggcctccgtccctgggtcccagaccgtcgtggtgaaggagattacgatccacactaaactgcctgcaaaggacgtgtacgagcgcctcaaagacaaatgggatgaactcaaagaagccggagtgagcgatatgaagcttggagaccaggggccacctgaagaggccgaggaccgcttctccatgccattgatcatcacaatagtctgcatggctagtttcctgctgttggtggccgctctgtatggctgctgtcatcaacggctcagccagcgtaaggaccaacaacgcctcaccgaagagctccagaccgtagagaacgggtaccacgataacccgacccttgaagtgatggagacgagttctgagatgcaggagaagaaggtggtgtcactaaatggcgaactcggagacagctggatcgtcccactcgacaacctgacgaaggatgacctagatgaagaagaggatacccacctctag

SEQ ID NO: 27389 - DNA, 1683 bp, Artificial Sequence
  derived and/or modified sequence
atgcgatgcgctttagcactcagtgccctcctcctcctgctgtcaacccccccactcctgccgtccagcccgtccccatcgccatccccttctcagaacgaaacggccacccaaaccactacggactcctcaaacaagaccgccccaactcccgcttcttcagtaaccattatggcaactgatactgcccagcagagcacggtccctactagcaaggctaacgaaatccttgcaagtgtaaaggccaccacacttggcgtgtcgagcgactcacctggcactacaactcttgcacaacaagtgtcgggccctgttaacacgaccgttgcacggggaggcggaagcgggaatcctaccaccacaatcgagagcccaaagtctacgaagtctgctgacaccaccaccgtggcgacctctaccgccacagccaaacccaacacaaccagttcacaaaacggtgccgaagacacaacaaacagcggaggcaagtcaagccacagcgtgacaacagatctgacctcaacaaaagccgagcatctgaccacaccccaccccacctctccactctcaccaaggcagccaacctctacacatcccgtggcaactccgacatcttcaggacacgatcatctgatgaagatatccagctctagttctactgtggctattccgggatataccttcacatctccaggcatgacaactacgctgctggaaaccgtttttcaccacgtttcgcaggctgggcttgaattactgacatctggggacttacccaccttagcctcacaatctgcaggtattaccgcatcttctgttatatcgcaaaggactcagcagacaagctcccaaatgccagcttcatccaccgcaccgtcctcacaagagacggtgcagccaacctcgcccgctactgcgctgcgaactcccactttacctgaaaccatgtccagttcaccaactgctgcatccacaacgcacagatatcctaaaacaccgagccctaccgtggcccacgagtctaattgggctaaatgcgaggacctcgaaactcaaactcagtctgaaaagcagctggttctgaacttaactggcaatactttatgtgccggaggcgcaagcgacgagaagttgattagtctaatctgccgcgctgtgaaggctactttcaaccccgctcaggacaagtgtggcatccggttggcgagcgttcctgggtcccaaaccgtggtggtaaaggagatcaccattcacactaagctgccggctaaagacgtttatgagaggctcaaggacaagtgggatgagctgaaagaggccggagtgtccgacatgaagctcggtgatcaggggcctcccgaagaagctgaggatcgtttcagcatgcccctgatcattaccattgtttgcatggcgagctttctgctgctggttgcagccctgtatgggtgctgccaccagcgcctttctcagcggaaagatcagcagaggttgaccgaagagttacagaccgtagaaaacggctaccacgacaatcccaccctggaggtgatggagacgtcctcagagatgcaggaaaagaaagtcgtctctctcaatggcgagctgggcgactcgtggattgtgccactggacaatctgacgaaagacgacctggacgaggaagaggatactcacctttag

SEQ ID NO: 27390 - DNA, 1677 bp, Artificial Sequence
  derived and/or modified sequence
atgagatgcgccctggccctgagcgccctgctgctgctgctgagcaccccccccctgctgcccagcagccccagccccagccccagccccagccagaacgccacccagaccaccaccgacagcagcaacaagaccgcccccacccccgccagcagcgtgaccatcatggccaccgacaccgcccagcagagcaccgtgcccaccagcaaggccaacgagatcctggccagcgtgaaggccaccaccctgggcgtgagcagcgacagccccggcaccaccaccctggcccagcaggtgagcggccccgtgaacaccaccgtggccagaggcggcggcagcggcaaccccaccaccaccatcgagagccccaagagcaccaagagcgccgacaccaccaccgtggccaccagcaccgccaccgccaagcccaacaccaccagcagccagaacggcgccgaggacaccaccaacagcggcggcaagagcagccacagcgtgaccaccgacctgaccagcaccaaggccgagcacctgaccaccccccaccccaccagccccctgagccccagacagcccaccagcacccaccccgtggccacccccaccagcagcggccacgaccacctgatgaagatcagcagcagcagcagcaccgtggccatccccggctacaccttcaccagccccggcatgaccaccaccctgctggagaccgtgttccaccacgtgagccaggccggcctggagctgctgaccagcggcgacctgcccaccctggccagccagagcgccggcatcaccgccagcagcgtgatcagccagagaacccagcagaccagcagccagatgcccgccagcagcaccgcccccagcagccaggagaccgtgcagcccaccagccccgccaccgccctgagaacccccaccctgcccgagaccatgagcagcagccccaccgccgccagcaccacccacagataccccaagacccccagccccaccgtggcccacgagagcaactgggccaagtgcgaggacctggagacccagacccagagcgagaagcagctggtgctgaacctgaccggcaacaccctgtgcgccggcggcgccagcgacgagaagctgatcagcctgatctgcagagccgtgaaggccaccttcaaccccgcccaggacaagtgcggcatcagactggccagcgtgcccggcagccagaccgtggtggtgaaggagatcaccatccacaccaagctgcccgccaaggacgtgtacgagagactgaaggacaagtgggacgagctgaaggaggccggcgtgagcgacatgaagctgggcgaccagggcccccccgaggaggccgaggacagattcagcatgcccctgatcatcaccatcgtgtgcatggccagcttcctgctgctggtggccgccctgtacggctgctgccaccagagactgagccagagaaaggaccagcagagactgaccgaggagctgcagaccgtggagaacggctaccacgacaaccccaccctggaggtgatggagaccagcagcgagatgcaggagaagaaggtggtgagcctgaacggcgagctgggcgacagctggatcgtgcccctggacaacctgaccaaggacgacctggacgaggaggaggacacccacctgtag

SEQ ID NO: 27391 - DNA, 1683 bp, Artificial Sequence
  derived and/or modified sequence
atgagatgcgccctggccctgagcgccctgctgctgctgctgagcaccccccccctgctgcccagcagccccagccccagccccagccccagccagaacgagaccgccacccagaccaccaccgacagcagcaacaagaccgcccccacccccgccagcagcgtgaccatcatggccaccgacaccgcccagcagagcaccgtgcccaccagcaaggccaacgagatcctggccagcgtgaaggccaccaccctgggcgtgagcagcgacagccccggcaccaccaccctggcccagcaggtgagcggccccgtgaacaccaccgtggccagaggcggcggcagcggcaaccccaccaccaccatcgagagccccaagagcaccaagagcgccgacaccaccaccgtggccaccagcaccgccaccgccaagcccaacaccaccagcagccagaacggcgccgaggacaccaccaacagcggcggcaagagcagccacagcgtgaccaccgacctgaccagcaccaaggccgagcacctgaccaccccccaccccaccagccccctgagccccagacagcccaccagcacccaccccgtggccacccccaccagcagcggccacgaccacctgatgaagatcagcagcagcagcagcaccgtggccatccccggctacaccttcaccagccccggcatgaccaccaccctgctggagaccgtgttccaccacgtgagccaggccggcctggagctgctgaccagcggcgacctgcccaccctggccagccagagcgccggcatcaccgccagcagcgtgatcagccagagaacccagcagaccagcagccagatgcccgccagcagcaccgcccccagcagccaggagaccgtgcagcccaccagccccgccaccgccctgagaacccccaccctgcccgagaccatgagcagcagccccaccgccgccagcaccacccacagataccccaagacccccagccccaccgtggcccacgagagcaactgggccaagtgcgaggacctggagacccagacccagagcgagaagcagctggtgctgaacctgaccggcaacaccctgtgcgccggcggcgccagcgacgagaagctgatcagcctgatctgcagagccgtgaaggccaccttcaaccccgcccaggacaagtgcggcatcagactggccagcgtgcccggcagccagaccgtggtggtgaaggagatcaccatccacaccaagctgcccgccaaggacgtgtacgagagactgaaggacaagtgggacgagctgaaggaggccggcgtgagcgacatgaagctgggcgaccagggcccccccgaggaggccgaggacagattcagcatgcccctgatcatcaccatcgtgtgcatggccagcttcctgctgctggtggccgccctgtacggctgctgccaccagagactgagccagagaaaggaccagcagagactgaccgaggagctgcagaccgtggagaacggctaccacgacaaccccaccctggaggtgatggagaccagcagcgagatgcaggagaagaaggtggtgagcctgaacggcgagctgggcgacagctggatcgtgcccctggacaacctgaccaaggacgacctggacgaggaggaggacacccacctgtag

SEQ ID NO: 27392 - DNA, 894 bp, Artificial Sequence
  derived and/or modified sequence
atgagcgacagctgggtgcccaacagcgccagcggccaggaccccggcggcagaagaagagcctgggccgagctgctggccggcagagtgaagagagagaagtacaaccccgagagagcccagaagctgaaggagagcgccgtgagactgctgagaagccaccaggacctgaacgccctgctgctggaggtggagggccccctgtgcaagaagctgagcctgagcaaggtgatcgactgcgacagcagcgaggcctacgccaaccacagcagcagcttcatcggcagcgccctgcaggaccaggccagcagactgggcgtgcccgtgggcatcctgagcgccggcatggtggccagcagcgtgggccagatctgcaccgcccccgccgagaccagccaccccgtgctgctgaccgtggagcagagaaagaagctgagcagcctgctggagttcgcccagtacctgctggcccacagcatgttcagcagactgagcttctgccaggagctgtggaagatccagagcagcctgctgctggaggccgtgtggcacctgcacgtgcagggcatcgtgagcctgcaggagctgctggagagccaccccgacatgcacgccgtgggcagctggctgttcagaaacctgtgctgcctgtgcgagcagatggaggccagctgccagcacgccgacgtggccagagccatgctgagcgacttcgtgcagatgttcgtgctgagaggcttccagaagaacagcgacctgagaagaaccgtggagcccgagaagatgccccaggtgaccgtggacgtgctgcagagaatgctgatcttcgccctggacgccctggccgccggcgtgcaggaggagagcagcacccacaagatcgtgagatgctag

SEQ ID NO: 27393 - DNA, 909 bp, Artificial Sequence
  derived and/or modified sequence
atgagcgacagctgggtgcccaacagcgccagcggccaggaccccggcggcagaagaagagcctgggccgagctgctggccggcagagtgaagagagagaagtacaaccccgagagagcccagaagctgaaggagagcgccgtgagactgctgagaagccaccaggacctgaacgccctgctgctggaggtggagggccccctgtgcaagaagctgagcctgagcaaggtgatcgactgcgacagcagcgaggcctacgccaaccacagcagcagcttcatcggcagcgccctgcaggaccaggccagcagactgggcgtgcccgtgggcatcctgagcgccggcatggtggccagcagcgtgggccagatctgcaccgcccccgccgagaccagccaccccgtgctgctgaccgtggagcagagaaagaagctgagcagcctgctggagttcgcccagtacctgctggcccacagcatgttcagcagactgagcttctgccaggagctgtggaagatccagagcagcctgctgctggaggccgtgtggcacctgcacgtgcagggcatcgtgagcctgcaggagctgctggagagccaccccgacatgcacgccgtgggcagctggctgttcagaaacctgtgctgcctgtgcgagcagatggaggccagctgccagcacgccgacgtggccagagccatgctgagcgacttcgtgcagatgttcgtgctgagaggcttccagaagaacagcgacctgagaagaaccgtggagcccgagaagatgccccaggtgaccgtggacgtgctgcagagaatgctgatcttcgccctggacgccctggccgccggcgtgcaggaggagagcagcacccacaagatcgtgagagccagcgccgccagaagctag

SEQ ID NO: 27394 - DNA, 798 bp, Artificial Sequence
  derived and/or modified sequence
atgagcgacagctgggtgcccaacagcgccagcggccaggaccccggcggcagaagaagagcctgggccgagctgctggccggcagagtgaagagagagaagtacaaccccgagagagcccagaagctgaaggagagcgccgtgagactgctgagaagccaccaggacctgaacgccctgctgctggaggtggagggccccctgtgcaagaagctgagcctgagcaaggtgatcgactgcgacagcagcgaggcctacgccaaccacagcagcagcttcatcggcagcgccctgcaggaccaggccagcagactgggcgtgcccgtgggcatcctgagcgccggcatggtggccagcagcgtgggccagatctgcaccgcccccgccgagaccagccaccccgtgctgctgaccgtggagcagagaagcagcctgctgctggaggccgtgtggcacctgcacgtgcagggcatcgtgagcctgcaggagctgctggagagccaccccgacatgcacgccgtgggcagctggctgttcagaaacctgtgctgcctgtgcgagcagatggaggccagctgccagcacgccgacgtggccagagccatgctgagcgacttcgtgcagatgttcgtgctgagaggcttccagaagaacagcgacctgagaagaaccgtggagcccgagaagatgccccaggtgaccgtggacgtgctgcagagaatgctgatcttcgccctggacgccctggccgccggcgtgcaggaggagagcagcacccacaagatcgtgagatgctag

SEQ ID NO: 27395 - DNA, 894 bp, Artificial Sequence
  derived and/or modified sequence
atgagcgactcctgggtgcccaatagcgctagtgggcaggacccaggaggaagacgacgcgcctgggccgagctactcgccggtcgtgtgaaaagggaaaaatacaatccagagcgcgcacagaaacttaaggagagtgctgtccgactgctgcgcagccatcaggatcttaacgccttgttgttggaagtggaggggcctctgtgcaaaaagcttagcttatctaaggtaatcgattgcgacagcagcgaggcatatgcaaaccattcctcatcgttcattggtagcgccttgcaggaccaggccagcaggctcggtgttcctgttgggatcctgagcgccgggatggtggcaagcagtgtgggccagatttgtactgcgccggccgagacctcacatccggtgctgctgacagtggagcagagaaaaaagctgtcctctctgctcgagttcgcacagtacttattggcccacagtatgttcagtagactttccttttgccaggagctttggaagatccagtcaagtctcctgctggaggccgtatggcatctgcatgtgcaagggattgtttccctgcaggagctcctcgagtcacatccagacatgcatgctgtaggatcctggctgtttaggaatctgtgctgcctatgtgaacagatggaggctagctgccagcatgcagatgtcgcgcgtgccatgctcagtgactttgtgcagatgtttgtgctgcgcggattccagaaaaacagcgatttaagacgaacagttgaaccagagaaaatgccacaggttactgttgatgtacttcaacgcatgctgatctttgctctggatgcgcttgccgccggtgttcaagaagaatcctctacccacaagatcgtcaggtgctag

SEQ ID NO: 27396 - DNA, 909 bp, Artificial Sequence
  derived and/or modified sequence
atgagtgatagttgggtgccaaactcggcatctgggcaggatccaggcggacgacgccgtgcttgggccgaattgctggcaggcagggtcaagagagaaaaatacaaccccgagcgcgctcaaaaactgaaagaatccgcggtgagactactgcggagccaccaggacttaaacgctctgcttctggaggtggagggccctttatgtaaaaaactgtctctgtcaaaggtcatcgattgcgactcaagcgaggcatacgctaaccacagctccagcttcatcggctctgccctgcaggaccaggcatcccggctgggcgtacccgtcggaatccttagcgccggaatggttgccagttctgtgggccagatctgcacggctccagcagagaccagccatcctgttctgttgactgtggagcagcggaaaaaactgagtagccttttggagttcgcccagtatctgctggctcattcgatgttcagcaggctgtccttctgtcaggaattgtggaagatccaatcatctttgttgctggaggctgtctggcacctccacgtacagggcatcgtgtcgcttcaagagctgcttgaatcgcaccccgatatgcatgccgtcggatcatggctgtttagaaacttgtgttgtctgtgcgaacagatggaggcctcttgccagcacgctgacgtggcacgggccatgctaagcgacttcgtacagatgttcgtcctaaggggctttcaaaagaattcagatctacggcggacagtggagcctgagaaaatgccacaggtcaccgtcgatgtactccagcgcatgctaatcttcgcactggatgctcttgctgctggcgtccaggaagagtcatcgacacataagatcgtccgagcctcagctgcgcgttcatag

SEQ ID NO: 27397 - DNA, 798 bp, Artificial Sequence
  derived and/or modified sequence
atgtctgattcctgggtgcctaacagcgcgtccggtcaggaccccggtgggcggcgacgtgcctgggccgaactgctggccggcagggtgaagcgggagaagtataacccagagagggcccagaagttgaaagagtctgcagtccgactgctcagaagccatcaggacctgaacgccttgctgttagaagttgagggccccctgtgcaaaaagttatcgctgtctaaagtgatcgactgcgactccagcgaggcatacgccaatcacagttcttctttcataggatcagcactccaggaccaggcgtcccggcttggagtgcccgtcggcattctctcagctggaatggtggcctctagcgtcggacagatctgtactgcccccgcagaaacaagtcacccagtgctgctcactgtcgaacagcgcagttcgttgctccttgaagcagtatggcacctgcacgtgcagggaattgtgtcactgcaagaactcctcgagtcacacccagatatgcatgccgtgggatcttggttgtttcgcaacctctgctgcttgtgcgagcaaatggaggccagctgccagcatgcagacgtggctagagctatgctgtccgactttgtccagatgttcgtcttacgtggattccagaaaaatagtgacctccggaggacggtcgagccagagaaaatgcctcaagtcacggtggatgtgttgcagcgcatgctgatattcgccctagatgcgttggctgctggagtgcaagaagagagcagcacccacaaaatcgtccgctgctag

SEQ ID NO: 27398 - DNA, 1656 bp, Artificial Sequence
  derived and/or modified sequence
cgggcgcagggagccgccgccggggctgtaggcgccaaggccatgtccgactcgtgggtcccgaactccgcctcgggccaggacccagggggccgccggagggcctgggccgagctgctggcgggaagggtcaagagggaaaaatataatcctgaaagggcacagaaattaaaggaatcagctgtgcgcctcctgcgaagccatcaggacctgaatgcccttttgcttgaggtagaaggtccactgtgtaaaaaattgtctctcagcaaagtgattgactgtgacagttctgaggcctatgctaatcattctagttcatttataggctctgctttgcaggatcaagcctcaaggctgggggttcccgtgggtattctctcagccgggatggttgcctctagcgtgggacagatctgcacggctccagcggagaccagtcaccctgtgctgctgactgtggagcagagaaagaagctgtcttccctgttagagtttgctcagtatttattggcacacagtatgttctcccgtctttccttctgtcaagaattatggaaaatacagagttctttgttgcttgaagcggtgtggcatcttcacgtacaaggcattgtgagcctgcaagagctgctggaaagccatcccgacatgcatgctgtgggatcgtggctcttcaggaatctgtgctgcctttgtgaacagatggaagcatcctgccagcatgctgacgtcgccagggccatgctttctgattttgttcaaatgtttgttttgaggggatttcagaaaaactcagatctgagaagaactgtggagcctgaaaaaatgccgcaggtcacggttgatgtactgcagagaatgctgatttttgcacttgacgctttggctgctggagtacaggaggagtcctccactcacaagatcgtgaggtgctgagcttcagcagcccgctcctgagcacacttcctctgccagttacgataacgtgcgtgaggaggaggcgaccatgggaaagcccggggaacgctctggtcagccttttcctgtgaggatgaggtcggaaggtgcgcccactgcagtatcctgttccgcctctggaagtcctgcaccaatgtttgtcccactcactgtgacctcctcctgtgtggagtctccccttgctcctccttccctgggtgtgattcaggctctagagctggccctgcctctcagccccccacatttctagaacacactgtagctgtgcctctacagactcccgctgcctggcctccacagatcctgctcagattcaccagtaggcaaagcttggccctattagctttttctctccatggctctgtggagatgtgcggagacccttacaggtcgggaggcggaagctgaggagtgggggctgggtggaaggtggacatcggggtttggtggaaatggggctctggggtttgcttccctctagtgtgggcaggggaccttgaagtgaagtcttgagaaaccagtagaatttgccactgtttccaggccttgtcaaccttttcattctttattttgctcctcatttcccatccctcacagtaactgtttaactgctcaattaaatgtgttgtaccgttcggtacttttactgaaacagtgaataaagcactgtgtgatttc

SEQ ID NO: 27399 - DNA, 1088 bp, Artificial Sequence
  derived and/or modified sequence
ggcgcagggagccgccgccggggctgtaggcgccaaggccatgtccgactcgtgggtcccgaactccgcctcgggccaggacccagggggccgccggagggcctgggccgagctgctggcgggaagggtcaagagggaaaaatataatcctgaaagggcacagaaattaaaggaatcagctgtgcgcctcctgcgaagccatcaggacctgaatgcccttttgcttgaggtagaaggtccactgtgtaaaaaattgtctctcagcaaagtgattgactgtgacagttctgaggcctatgctaatcattctagttcatttataggctctgctttgcaggatcaagcctcaaggctgggggttcccgtgggtattctctcagccgggatggttgcctctagcgtgggacagatctgcacggctccagcggagaccagtcaccctgtgctgctgactgtggagcagagaaagaagctgtcttccctgttagagtttgctcagtatttattggcacacagtatgttctcccgtctttccttctgtcaagaattatggaaaatacagagttctttgttgcttgaagcggtgtggcatcttcacgtacaaggcattgtgagcctgcaagagctgctggaaagccatcccgacatgcatgctgtgggatcgtggctcttcaggaatctgtgctgcctttgtgaacagatggaagcatcctgccagcatgctgacgtcgccagggccatgctttctgattttgttcaaatgtttgttttgaggggatttcagaaaaactcagatctgagaagaactgtggagcctgaaaaaatgccgcaggtcacggttgatgtactgcagagaatgctgatttttgcacttgacgctttggctgctggagtacaggaggagtcctccactcacaagatcgtgagagcttcagcagcccgctcctgagcacacttcctctgccagttacgataacgtgcgtgaggaggaggcgaccatgggaaagcccggggaacgctctggtcagccttttcctgtgaggatgaggtcggaaggtgcgcccactgcagtatcctgttccgcctct

SEQ ID NO: 27400 - DNA, 1000 bp, Artificial Sequence
  derived and/or modified sequence
cgggcgcagggagccgccgccggggctgtaggcgccaaggccatgtccgactcgtgggtcccgaactccgcctcgggccaggacccagggggccgccggagggcctgggccgagctgctggcgggaagggtcaagagggaaaaatataatcctgaaagggcacagaaattaaaggaatcagctgtgcgcctcctgcgaagccatcaggacctgaatgcccttttgcttgaggtagaaggtccactgtgtaaaaaattgtctctcagcaaagtgattgactgtgacagttctgaggcctatgctaatcattctagttcatttataggctctgctttgcaggatcaagcctcaaggctgggggttcccgtgggtattctctcagccgggatggttgcctctagcgtgggacagatctgcacggctccagcggagaccagtcaccctgtgctgctgactgtggagcagagaagttctttgttgcttgaagcggtgtggcatcttcacgtacaaggcattgtgagcctgcaagagctgctggaaagccatcccgacatgcatgctgtgggatcgtggctcttcaggaatctgtgctgcctttgtgaacagatggaagcatcctgccagcatgctgacgtcgccagggccatgctttctgattttgttcaaatgtttgttttgaggggatttcagaaaaactcagatctgagaagaactgtggagcctgaaaaaatgccgcaggtcacggttgatgtactgcagagaatgctgatttttgcacttgacgctttggctgctggagtacaggaggagtcctccactcacaagatcgtgaggtgctgagcttcagcagcccgctcctgagcacacttcctctgccagttacgataacgtgcgtgaggaggaggcgaccatgggaaagcccggggaacgctctggtcagccttttcctgtgaggatgaggtcggaaggtgcgcccactgcagtatcctgttccgcctct

SEQ ID NO: 27401 - DNA, 894 bp, Artificial Sequence
  derived and/or modified sequence
atgtctgacagctgggtgcccaacagcgccagcggccaggaccccggcggcagaagaagagcctgggccgagctgctggccggccgggtgaagcgggagaagtacaaccctgagcgggcccagaagctgaaggagagcgctgtgcggctgctgcggagccaccaggacctgaatgccctgctgctggaggtggagggccccctgtgcaagaagctgagcctgagcaaggtgattgactgtgacagcagcgaggcctatgccaaccacagcagcagcttcatcggcagcgccctgcaggaccaggccagccggctgggcgtgcctgtgggcatcctgtctgctggcatggtggccagctctgtgggccagatctgcacagccccagctgagaccagccaccctgtgctgctgactgtggagcagaggaagaagctgagcagcctgctggagtttgcccagtacctgctggcccacagcatgttcagccggctgtccttctgccaggagctgtggaagatccagagcagcctgctgctggaggccgtgtggcacctgcacgtgcagggcatcgtgtccctgcaggagctgctggagagccacccagacatgcatgctgtgggctcctggctgttcaggaacctgtgctgcctgtgtgagcagatggaggccagctgccagcacgcagatgtggcccgggccatgctgagtgactttgtgcagatgtttgtgctgcggggcttccagaagaacagcgacctgcggaggacagtggagcctgagaagatgccccaggtgacagtggatgtgctgcagaggatgctgatctttgccctggatgccctggccgccggcgtgcaggaggagagcagcacccacaagatcgtgcgctgctag

SEQ ID NO: 27402 - DNA, 909 bp, Artificial Sequence
  derived and/or modified sequence
atgtctgacagctgggtgcccaacagcgccagcggccaggaccccggcggcagaagaagagcctgggccgagctgctggccggccgggtgaagcgggagaagtacaaccctgagcgggcccagaagctgaaggagagcgctgtgcggctgctgcggagccaccaggacctgaatgccctgctgctggaggtggagggccccctgtgcaagaagctgagcctgagcaaggtgattgactgtgacagcagcgaggcctatgccaaccacagcagcagcttcatcggcagcgccctgcaggaccaggccagccggctgggcgtgcctgtgggcatcctgtctgctggcatggtggccagctctgtgggccagatctgcacagccccagctgagaccagccaccctgtgctgctgactgtggagcagaggaagaagctgagcagcctgctggagtttgcccagtacctgctggcccacagcatgttcagccggctgtccttctgccaggagctgtggaagatccagagcagcctgctgctggaggccgtgtggcacctgcacgtgcagggcatcgtgtccctgcaggagctgctggagagccacccagacatgcatgctgtgggctcctggctgttcaggaacctgtgctgcctgtgtgagcagatggaggccagctgccagcacgcagatgtggcccgggccatgctgagtgactttgtgcagatgtttgtgctgcggggcttccagaagaacagcgacctgcggaggacagtggagcctgagaagatgccccaggtgacagtggatgtgctgcagaggatgctgatctttgccctggatgccctggccgccggcgtgcaggaggagagcagcacccacaagatcgtgcgggccagcgctgcccggagctag

SEQ ID NO: 27403 - DNA, 798 bp, Artificial Sequence
  derived and/or modified sequence
atgtctgacagctgggtgcccaacagcgccagcggccaggaccccggcggcagaagaagagcctgggccgagctgctggccggccgggtgaagcgggagaagtacaaccctgagcgggcccagaagctgaaggagagcgctgtgcggctgctgcggagccaccaggacctgaatgccctgctgctggaggtggagggccccctgtgcaagaagctgagcctgagcaaggtgattgactgtgacagcagcgaggcctatgccaaccacagcagcagcttcatcggcagcgccctgcaggaccaggccagccggctgggcgtgcctgtgggcatcctgtctgctggcatggtggccagctctgtgggccagatctgcacagccccagctgagaccagccaccctgtgctgctgactgtggagcagaggagcagcctgctgctggaggccgtgtggcacctgcacgtgcagggcatcgtgtccctgcaggagctgctggagagccacccagacatgcatgctgtgggctcctggctgttcaggaacctgtgctgcctgtgtgagcagatggaggccagctgccagcacgcagatgtggcccgggccatgctgagtgactttgtgcagatgtttgtgctgcggggcttccagaagaacagcgacctgcggaggacagtggagcctgagaagatgccccaggtgacagtggatgtgctgcagaggatgctgatctttgccctggatgccctggccgccggcgtgcaggaggagagcagcacccacaagatcgtgcgctgctag

SEQ ID NO: 27404 - DNA, 894 bp, Artificial Sequence
  derived and/or modified sequence
atgagcgacagctgggtgcccaacagcgccagcggccaggaccccggggggagaaggcgcgcctgggccgaattgctcgccggccgagtgaagcgggagaagtataatccagaaagagcccagaagctcaaagagtccgctgtgcggctgctgcggagccaccaggatttgaacgccctgctgctggaagtggaaggaccgctgtgtaagaagttgagtctttctaaagtaatagattgcgacagttctgaggcctacgcgaatcactcaagcagtttcatcgggagcgccctccaagaccaggcctctcgcttgggggttcccgtgggaatactcagtgccggcatggtggcttcatctgtgggtcagatctgtactgccccagccgagaccagccaccccgtgcttctgacagtggagcagcgcaaaaagctgagctctctgctcgaattcgcccagtatttgctggcacactctatgttcagccggctttctttttgccaggagctgtggaagattcagagcagtctgctgctggaggcagtgtggcatctgcacgtgcagggtattgtgtcacttcaggagttactggaatctcaccccgacatgcatgccgtgggttcctggctgttccgcaacctttgctgtctctgcgaacagatggaagcttcgtgtcagcacgctgacgtggcccgggcgatgctgtcagacttcgtgcagatgtttgtactgcggggattccagaaaaatagcgacctgcgacggacagttgaacctgagaaaatgccacaggtgacagtggacgtgctgcagcggatgttgattttcgcactcgacgcattggccgccggggtgcaggaagaaagctctacacacaagatcgtgagatgctag

SEQ ID NO: 27405 - DNA, 909 bp, Artificial Sequence
  derived and/or modified sequence
atgagcgacagctgggtgcccaacagcgccagcggccaggaccccgggggtcgacgcagagcttgggctgagcttctggccggtagggttaagcgcgaaaagtacaaccccgagcgggcacagaaactgaaagagtcagcagtgcgtctcttgaggtcacatcaggaccttaatgctcttctcttggaagtagaaggcccgctctgcaagaagctgtccctgtccaaggtcatcgattgtgattcttcggaggcatacgctaatcactcctccagctttatagggtctgctcttcaggaccaggcaagtcggctcggagtgcccgtgggaatcttatccgctgggatggtggctagctcagtgggccaaatctgcaccgcccccgccgagacctcacatcctgtgttgctgactgtcgagcagagaaagaagctctccagtctgctcgagtttgcccagtacttgttggcccacagcatgtttagcaggcttagtttttgtcaggaactgtggaaaattcagtcatccctgctgttagaagcagtttggcacctgcatgtgcagggtatcgtgtctctgcaggagcttcttgagtcccatccagacatgcatgccgtgggcagctggctgttccgtaatctctgctgtctatgcgagcagatggaggcttcttgtcagcacgcagatgtcgccagggccatgctaagcgactttgtccagatgtttgtcttgcgaggatttcagaagaactctgacctgagacgcacggtcgaacccgaaaaaatgccccaggtgactgtggatgtactgcagaggatgctgatcttcgctctagacgcattggccgccggcgtgcaagaagaatcaagcactcacaagatcgtgcgagcttctgcagccaggtcatag

SEQ ID NO: 27406 - DNA, 798 bp, Artificial Sequence
  derived and/or modified sequence
atgagcgacagctgggtgcccaacagcgccagcggccaggaccccggagggcgccgcagggcctgggctgagctgctcgccggtagggtgaagagggaaaagtacaaccccgagagggcacagaagttaaaagagtctgctgttcggttgcttaggagtcaccaggacctgaatgcactgctccttgaggtggaaggacccctgtgcaaaaagctgtccctgtctaaggtgatagactgtgattcctctgaggcttatgccaaccacagcagcagcttcatcgggtcagcactgcaggaccaggccagccggctaggcgtgccagtgggaatcttgagcgctggaatggtcgcctcctcagtgggtcaaatctgtaccgcacccgctgagacttcacaccctgtgttattaactgtcgaacagagaagcagtctgttactggaagccgtgtggcaccttcatgtgcaggggatagtgagtcttcaggagctgctggagtcccatcctgatatgcatgccgtagggagctggctcttcagaaatctgtgctgcctgtgcgagcagatggaagcctcctgccagcatgcagacgttgcccgtgctatgctgtctgactttgtccagatgttcgtgttaagaggcttccagaagaattcggacctgaggcgcacagttgagccggaaaagatgcctcaggtaacagtcgacgtcctgcaacggatgctgatcttcgcgctggatgcgctggcagctggggtccaggaagaatcaagcactcacaagatcgtcaggtgttag

SEQ ID NO: 27407 - DNA, 894 bp, Artificial Sequence
  derived and/or modified sequence
atgagcgatagttgggtgccaaactcagctagcggtcaggatccgggaggacgcaggagggcctgggcagagctgctggcgggtcgtgtgaaacgggagaagtacaaccccgagagagcccagaagcttaaagagtcggccgttcggctccttcggtctcaccaggacctgaatgccctgcttctcgaggttgaaggcccactgtgtaagaaactgagtctgtctaaagtgatagattgcgattcgtccgaagcctatgcaaaccactccagcagcttcatcggaagcgctctgcaagatcaggcaagtcgccttggcgtacctgtgggaattctaagtgctggcatggtggctagttccgttggccagatatgtaccgcgcctgctgaaactagccaccccgtgctgctgacagtcgagcagcgaaaaaagctgagctctctcctggaattcgcccagtacctgcttgcccatagtatgttttctaggctgtccttttgccaagaactgtggaagatccagtccagcctgctgctagaggcagtgtggcaccttcatgtgcagggcattgtttcccttcaggagttgcttgaatcacaccctgacatgcacgccgtgggtagctggctgtttaggaatctgtgctgcctctgtgaacagatggaggcttcatgccagcatgctgacgtggctagagctatgttgtcagacttcgttcagatgttcgttctacgtggcttccagaaaaactccgacctacggagaactgtagagcccgaaaaaatgccccaggtaactgtggatgtgctccagcggatgctcatcttcgccctcgacgccctggccgctggcgtacaggaagaaagcagtacacacaaaatcgtaaggtgctag

SEQ ID NO: 27408 - DNA, 909 bp, Artificial Sequence
  derived and/or modified sequence
atgagcgatagctgggttccgaacagtgcctctggtcaagaccccggaggtagaaggcgcgcttgggcagaactcctggccggtagagtgaagagagaaaagtataacccagagcgcgctcagaaactgaaagagtcagccgtgagattactgcggtctcaccaggatctaaacgctctcctcctggaagtggagggtccgctgtgcaaaaagctttctctttctaaagtgatcgattgcgattcttcagaggcatatgcaaaccacagcagctcctttatagggtctgccttacaagatcaggctagcaggttgggtgttccagtgggcatcctgagcgcgggtatggttgcatcctcagtgggacaaatttgtactgctcctgccgagaccagtcatcctgttttgcttactgttgagcaaagaaagaaactgtccagtctccttgagtttgcacagtatctcttagcccacagcatgttttctcgtctatcattctgccaggagttgtggaagatacagtcgtccctgttgctggaagcggtatggcacttacatgtgcaaggaattgtgtccctgcaggaactgctagagtcacatccggatatgcatgctgtggggtcttggctcttccggaacttatgttgcctgtgcgaacaaatggaagcaagctgtcaacacgccgacgtcgccagagcgatgctgtccgactttgtgcagatgtttgtgctgagaggatttcagaagaactctgatctgagacgcactgtggaacctgagaagatgcctcaggtgaccgttgatgtcctccagcggatgctgatattcgccctcgacgcactggctgccggagttcaagaggaatcgtcaacacataaaattgtcagagcttccgcagctaggagttag

SEQ ID NO: 27409 - DNA, 798 bp, Artificial Sequence
  derived and/or modified sequence
atgtccgactcatgggtgcccaactccgctagtggtcaagatcctggcggacgaaggagggcgtgggcggagctgctggcagggagagtgaaaagagaaaagtacaaccccgaaagagcacagaagctcaaggagtccgctgtaaggctgcttagatcacatcaagacttgaacgcactgttgcttgaggtggaggggccactgtgtaaaaagctgagcctgtccaaggtgatcgattgtgacagttctgaggcctacgctaaccacagttcatctttcatcgggagcgccctccaagaccaggcctcccggctgggagttcccgtcggaatactgtcagccggtatggtggcaagcagtgtcggacaaatctgcactgccccagccgaaactagtcaccccgtcctgttgactgtagagcagcgctccagtctcctgttagaagcagtgtggcacctgcacgtgcaggggatcgtcagcctacaggagctattagaaagtcatcccgatatgcacgcagttggatcttggctgttcaggaacctgtgctgcctgtgtgaacaaatggaggcgagctgccagcacgctgacgtcgcaagagccatgctcagtgatttcgtgcagatgtttgtgctacgaggattccagaagaactcggatctccgaagaactgtcgaaccggaaaaaatgccccaggtgaccgtggatgtcctgcagcgaatgctgatttttgccttagatgcacttgcagcaggcgtgcaggaggaaagtagtacccacaaaatcgtgaggtgctag

SEQ ID NO: 27410 - protein, 859 aa, Artificial Sequence
  derived and/or modified sequence
MTSKQAMSSNEQERLLCYNGEVLVFQLSKGNFADKEPTKTPILHVRRMVFDRGTKVFVQKSTGFFTIKEENSHLKIMCCNCVSDFRTGINLPYIVIEKNKKNNVFEYFLLILHSTNKFEMRLSFKLGYEMKDGLRVLNGPLILWRHVKAFFFISSQTGKVVSVSGNFSSIQWAGEIENLGMVLLGLKECCLSEEECTQEPSKSDYAIWNTKFCVYSLESQEVLSDIYIIPPAYSSVVTYVHICATEIIKNQLRISLIALTRKNQLISFQNGTPKNVCQLPFGDPCAVQLMDSGGGNLFFVVSFISNNACAVWKESFQVAAKWEKLSLVLIDDFIGSGTEQVLLLFKDSLNSDCLTSFKITDLGKINYSSEPSDCNEDDLFEDKQENRYLVVPPLETGLKVCFSSFRELRQHLLLKEKIISKSYKALINLVQGKDDNTSSAEEKECLVPLCGEEENSVHILDEKLSDNFQDSEQLVEKIWYRVIDDSLVVGVKTTSSLKLSLNDVTLSLLMDQAHDSRFRLLKCQNRVIKLSTNPFPAPYLMPCEIGLEAKRVTLTPDSKKEESFVCEHPSKKECVQIITAVTSLSPLLTFSKFCCTVLLQIMERESGNCPKDRYVVCGRVFLSLEDLSTGKYLLTFPKKKPIEHMEDLFALLAAFHKSCFQITSPGYALNSMKVWLLEHMKCEIIKEFPEVYFCERPGSFYGTLFTWKQRTPFEGILIIYSRNQTVMFQCLHNLIRILPINCFLKNLKSGSENFLIDNMAFTLEKELVTLSSLSSAIAKHESNFMQRCEVSKGKSSVVAAALSDRRENIHPYRKELQREKKKMLQTNLKVSGALYREITLKVAEVQLKSDFAAQKLSNL

SEQ ID NO: 27411 - protein, 818 aa, Artificial Sequence
  derived and/or modified sequence
MTSKQAMSSNEQERLLCYNGEVLVFQLSKGNFADKEPTKTPILHVRRMVFDRGTKVFVQKSTGFFTIKEENSHLKIMCCNCVSDFRTGINLPYIVIEKNKKNNVFEYFLLILHSTNKFEMRLSFKLGYEMKDGLRVLNGPLILWRHVKAFFFISSQTGKVVSVSGNFSSIQWAGEIENLGMVLLGLKECCLSEEECTQEPSKSDYAIWNTKFCVYSLESQEVLSDIYIIPPAYSSVVTYVHICATEIIKNQLRISLIALTRKNQLISFQNGTPKNVCQLPFGDPCAVQLMDSGGGNLFFVVSFISNNACAVWKESFQVAAKWEKLSLVLIDDFIGSGTEQVLLLFKDSLNSDCLTSFKITDLGKINYSSEPSDCNEDDLFEDKQENRYLVVPPLETGLKVCFSSFRELRQHLLLKEKIISKSYKALINLVQGKDDNTSSAEEKECLVPLCGEEENSVHILDEKLSDNFQDSEQLVEKIWYRVIDDSLVVGVKTTSSLKLSLNDVTLSLLMDQAHDSRFRLLKCQNRVIKLSTNPFPAPYLMPCEIGLEAKRVTLTPDSKKEESFVCEHPSKKECVQIITAVTSLSPLLTFSKFCCTVLLQIMERESGNCPKDRYVVCGRVFLSLEDLSTGKYLLTFPKKKPIEHMEDLFALLAAFHKSCFQITSPGYALNSMKVWLLEHMKCEIIKEFPEVYFCERPGSFYGTLFTWKQRTPFEGILIIYSRNQTVMFQCLHNLIRILPINCFLKNLKSGSENFLIDNMAFTLEKELVTLSSLSSAIAKHESNFMQRCEVSKGKSSVVAAALSDRRENIHPYRKELQR

SEQ ID NO: 27412 - DNA, 2894 bp, Artificial Sequence
  derived and/or modified sequence
aggatgcagcgcgctggcgggaggtttggagcagatggataccgtatcgacgtggggcctccggtatgttgccgctgcgttgaggtttagaaacatcaactggaatcaatttgcatttgaaaattagatcagcacaaagacttgatattgtggaatgactagcaaacaagcaatgtcatctaacgaacaagaaaggctcttgtgttataatggggaagtccttgttttccagttgtctaaaggaaattttgcagataaagagcctacaaaaacacccatattacatgtcagaagaatggtatttgacagaggaacaaaagtatttgttcagaagtccactggattttttaccataaaggaagaaaactctcatttaaaaatcatgtgttgcaactgtgtgtcagatttcagaactggaattaacctcccttacattgtgatagaaaaaaataaaaagaataatgtttttgaatattttttactaatccttcacagtactaataaatttgaaatgcgtttgagttttaaactaggctatgagatgaaggatggcctaagggtccttaatggccctttaattttatggaggcatgtcaaagcattcttctttatctcttctcaaactggcaaagttgttagtgtgtcaggtaacttttcctctattcagtgggcaggggagattgaaaatttaggtatggttttattgggactaaaggaatgttgtttatctgaggaagaatgtactcaagagccttcaaaatcagattatgcaatttggaataccaaattttgtgtatattctcttgaaagtcaagaagtattaagtgatatatacattattcctcctgcttacagcagtgtggtgacttatgtacatatttgtgcaactgagatcatcaaaaaccagttaagaatatctctcattgcccttactcgaaagaatcagctgatttcatttcagaatggaactcctaaaaatgtgtgccagcttccatttggagatccttgtgcagttcaacttatggattcaggtggaggaaacctctttttcgttgtatcctttatatccaataatgcttgtgctgtatggaaagagagctttcaggttgctgctaaatgggaaaaacttagcttagtactgatagatgactttattggaagtggaactgaacaagtactcctactttttaaggactccttgaactcagactgcctgacttcatttaaaataacggatcttggaaaaataaactattcgagtgaaccatcagattgcaatgaagatgacttatttgaagacaaacaagagaatcgttacctggtggttccacctctagaaacaggactgaaagtttgtttttcttcttttcgggaattacggcagcatctgttgcttaaggaaaaaattatttcaaaatcttacaaagctttaataaacctagttcaaggaaaagatgataatacgtcaagtgcagaggagaaggaatgtcttgttcctctttgtggtgaagaagaaaattctgtccatatcttagatgaaaagttatcagacaattttcaagattcagaacagctagtagagaagatatggtatcgtgtaatagatgatagcttggttgttggagtgaaaactacatcttctttgaagctgtccctgaatgatgtgactttatcattgttaatggatcaagcccatgactccagatttcggcttctaaagtgtcaaaatagggtgattaagttgagtacaaatcctttcccagcaccatacttgatgccatgtgaaataggattggaagcaaaaagggtcacgttgacccctgatagcaagaaagaggaaagctttgtttgtgaacacccatctaagaaagagtgtgtacagataattactgctgtaacatctctttcaccacttttaacattcagtaaattttgttgcactgtactgctacaaattatggagagagaaagtggtaactgtcctaaagatcgttatgttgtgtgtggcagagtttttttaagtctagaagatctttcaactgggaagtacctactgacatttccaaagaagaaacctatagagcacatggaagatctttttgcacttcttgcagcattccataaatcttgttttcaaatcacatcacccggctatgccctgaattcaatgaaggtgtggctcttagaacatatgaaatgtgaaataatcaaagaatttccagaagtgtacttttgtgaaagaccgggaagtttctatgggacactcttcacttggaaacagagaacaccattcgaagggattttaataatctattccaggaatcaaacagttatgttccagtgccttcataatctcatcagaattctccctataaactgtttcctcaaaaatctaaaatcaggaagtgagaatttcctaattgataatatggcatttactttggagaaggaactagtcacccttagttctctttcttctgccatagctaaacatgaaagcaattttatgcagaggtgtgaagtgagcaaaggaaagagtagtgtcgtcgcggctgctttatcagacagaagggaaaatatccatccctacagaaaagaacttcagagagaaaagaagaaaatgttgcaaacgaacctaaaagtgagtggtgccctttacagagaaataactttgaaagtagctgaggttcagttgaaatcagactttgctgcacagaaactgagtaatttataattataatttcaatttgatcatattttaaaatatgttttcaccaccatataagattttggttctacttgctatatgcctcctttgtaaaaataaacaccgaggcttactgtagtagaaactttagttttgatgatgcacaaaataaacagcagtggttctc

SEQ ID NO: 27413 - DNA, 3008 bp, Artificial Sequence
  derived and/or modified sequence
agcgcgctggcgggaggtttggagcagatggataccgtatcgacgtggggcctccggtatgttgccgctgcgttgagtttcataagtacaagccagacctttgatttacctaccctatcttctttactgatgaagctgaaactactttgtgatgcctattgtcccagatctttctgttaattgcctaacaacaaaccagtttagaaacatcaactggaatcaatttgcatttgaaaattagatcagcacaaagacttgatattgtggaatgactagcaaacaagcaatgtcatctaacgaacaagaaaggctcttgtgttataatggggaagtccttgttttccagttgtctaaaggaaattttgcagataaagagcctacaaaaacacccatattacatgtcagaagaatggtatttgacagaggaacaaaagtatttgttcagaagtccactggattttttaccataaaggaagaaaactctcatttaaaaatcatgtgttgcaactgtgtgtcagatttcagaactggaattaacctcccttacattgtgatagaaaaaaataaaaagaataatgtttttgaatattttttactaatccttcacagtactaataaatttgaaatgcgtttgagttttaaactaggctatgagatgaaggatggcctaagggtccttaatggccctttaattttatggaggcatgtcaaagcattcttctttatctcttctcaaactggcaaagttgttagtgtgtcaggtaacttttcctctattcagtgggcaggggagattgaaaatttaggtatggttttattgggactaaaggaatgttgtttatctgaggaagaatgtactcaagagccttcaaaatcagattatgcaatttggaataccaaattttgtgtatattctcttgaaagtcaagaagtattaagtgatatatacattattcctcctgcttacagcagtgtggtgacttatgtacatatttgtgcaactgagatcatcaaaaaccagttaagaatatctctcattgcccttactcgaaagaatcagctgatttcatttcagaatggaactcctaaaaatgtgtgccagcttccatttggagatccttgtgcagttcaacttatggattcaggtggaggaaacctctttttcgttgtatcctttatatccaataatgcttgtgctgtatggaaagagagctttcaggttgctgctaaatgggaaaaacttagcttagtactgatagatgactttattggaagtggaactgaacaagtactcctactttttaaggactccttgaactcagactgcctgacttcatttaaaataacggatcttggaaaaataaactattcgagtgaaccatcagattgcaatgaagatgacttatttgaagacaaacaagagaatcgttacctggtggttccacctctagaaacaggactgaaagtttgtttttcttcttttcgggaattacggcagcatctgttgcttaaggaaaaaattatttcaaaatcttacaaagctttaataaacctagttcaaggaaaagatgataatacgtcaagtgcagaggagaaggaatgtcttgttcctctttgtggtgaagaagaaaattctgtccatatcttagatgaaaagttatcagacaattttcaagattcagaacagctagtagagaagatatggtatcgtgtaatagatgatagcttggttgttggagtgaaaactacatcttctttgaagctgtccctgaatgatgtgactttatcattgttaatggatcaagcccatgactccagatttcggcttctaaagtgtcaaaatagggtgattaagttgagtacaaatcctttcccagcaccatacttgatgccatgtgaaataggattggaagcaaaaagggtcacgttgacccctgatagcaagaaagaggaaagctttgtttgtgaacacccatctaagaaagagtgtgtacagataattactgctgtaacatctctttcaccacttttaacattcagtaaattttgttgcactgtactgctacaaattatggagagagaaagtggtaactgtcctaaagatcgttatgttgtgtgtggcagagtttttttaagtctagaagatctttcaactgggaagtacctactgacatttccaaagaagaaacctatagagcacatggaagatctttttgcacttcttgcagcattccataaatcttgttttcaaatcacatcacccggctatgccctgaattcaatgaaggtgtggctcttagaacatatgaaatgtgaaataatcaaagaatttccagaagtgtacttttgtgaaagaccgggaagtttctatgggacactcttcacttggaaacagagaacaccattcgaagggattttaataatctattccaggaatcaaacagttatgttccagtgccttcataatctcatcagaattctccctataaactgtttcctcaaaaatctaaaatcaggaagtgagaatttcctaattgataatatggcatttactttggagaaggaactagtcacccttagttctctttcttctgccatagctaaacatgaaagcaattttatgcagaggtgtgaagtgagcaaaggaaagagtagtgtcgtcgcggctgctttatcagacagaagggaaaatatccatccctacagaaaagaacttcagagagaaaagaagaaaatgttgcaaacgaacctaaaagtgagtggtgccctttacagagaaataactttgaaagtagctgaggttcagttgaaatcagactttgctgcacagaaactgagtaatttataattataatttcaatttgatcatattttaaaatatgttttcaccaccatataagattttggttctacttgctatatgcctcctttgtaaaaataaacaccgaggcttactgtagtagaaactttagttttgatgatgcacaaaataaacagcagtggttctc

SEQ ID NO: 27414 - DNA, 2712 bp, Artificial Sequence
  derived and/or modified sequence
cgggaggtttggagcagatggataccgtatcgacgtggggcctccggtatgttgccgctgcgttgagtttcataagtacaagccagacctttgatttacctaccctatcttctttactgatgaagctgaaactactttgtgatgcctattgtcccagatctttctgttaattgcctaacaacaaaccagtttagaaacatcaactggaatcaatttgcatttgaaaattagatcagcacaaagacttgatattgtggaatgactagcaaacaagcaatgtcatctaacgaacaagaaaggctcttgtgttataatggggaagtccttgttttccagttgtctaaaggaaattttgcagataaagagcctacaaaaacacccatattacatgtcagaagaatggtatttgacagaggaacaaaagtatttgttcagaagtccactggattttttaccataaaggaagaaaactctcatttaaaaatcatgtgttgcaactgtgtgtcagatttcagaactggaattaacctcccttacattgtgatagaaaaaaataaaaagaataatgtttttgaatattttttactaatccttcacagtactaataaatttgaaatgcgtttgagttttaaactaggctatgagatgaaggatggcctaagggtccttaatggccctttaattttatggaggcatgtcaaagcattcttctttatctcttctcaaactggcaaagttgttagtgtgtcaggtaacttttcctctattcagtgggcaggggagattgaaaatttaggtatggttttattgggactaaaggaatgttgtttatctgaggaagaatgtactcaagagccttcaaaatcagattatgcaatttggaataccaaattttgtgtatattctcttgaaagtcaagaagtattaagtgatatatacattattcctcctgcttacagcagtgtggtgacttatgtacatatttgtgcaactgagatcatcaaaaaccagttaagaatatctctcattgcccttactcgaaagaatcagctgatttcatttcagaatggaactcctaaaaatgtgtgccagcttccatttggagatccttgtgcagttcaacttatggattcaggtggaggaaacctctttttcgttgtatcctttatatccaataatgcttgtgctgtatggaaagagagctttcaggttgctgctaaatgggaaaaacttagcttagtactgatagatgactttattggaagtggaactgaacaagtactcctactttttaaggactccttgaactcagactgcctgacttcatttaaaataacggatcttggaaaaataaactattcgagtgaaccatcagattgcaatgaagatgacttatttgaagacaaacaagagaatcgttacctggtggttccacctctagaaacaggactgaaagtttgtttttcttcttttcgggaattacggcagcatctgttgcttaaggaaaaaattatttcaaaatcttacaaagctttaataaacctagttcaaggaaaagatgataatacgtcaagtgcagaggagaaggaatgtcttgttcctctttgtggtgaagaagaaaattctgtccatatcttagatgaaaagttatcagacaattttcaagattcagaacagctagtagagaagatatggtatcgtgtaatagatgatagcttggttgttggagtgaaaactacatcttctttgaagctgtccctgaatgatgtgactttatcattgttaatggatcaagcccatgactccagatttcggcttctaaagtgtcaaaatagggtgattaagttgagtacaaatcctttcccagcaccatacttgatgccatgtgaaataggattggaagcaaaaagggtcacgttgacccctgatagcaagaaagaggaaagctttgtttgtgaacacccatctaagaaagagtgtgtacagataattactgctgtaacatctctttcaccacttttaacattcagtaaattttgttgcactgtactgctacaaattatggagagagaaagtggtaactgtcctaaagatcgttatgttgtgtgtggcagagtttttttaagtctagaagatctttcaactgggaagtacctactgacatttccaaagaagaaacctatagagcacatggaagatctttttgcacttcttgcagcattccataaatcttgttttcaaatcacatcacccggctatgccctgaattcaatgaaggtgtggctcttagaacatatgaaatgtgaaataatcaaagaatttccagaagtgtacttttgtgaaagaccgggaagtttctatgggacactcttcacttggaaacagagaacaccattcgaagggattttaataatctattccaggaatcaaacagttatgttccagtgccttcataatctcatcagaattctccctataaactgtttcctcaaaaatctaaaatcaggaagtgagaatttcctaattgataatatggcatttactttggagaaggaactagtcacccttagttctctttcttctgccatagctaaacatgaaagcaattttatgcagaggtgtgaagtgagcaaaggaaagagtagtgtcgtcgcggctgctttatcagacagaagggaaaatatccatccctacagaaaagaacttcagaga

SEQ ID NO: 27415 - DNA, 2580 bp, Artificial Sequence
  derived and/or modified sequence
atgacctctaagcaggccatgtcgagtaatgaacaggagcgcttactgtgctataacggcgaggtcctggtgtttcagctctccaaaggcaattttgccgataaagaacctacaaaaaccccgatcctgcatgtgaggagaatggtcttcgatcggggcactaaagtcttcgtgcaaaagtcaacagggttcttcacaatcaaggaggagaactcccacctcaaaatcatgtgctgcaactgtgtttcggatttcagaactggtattaacctcccttatatcgtcattgaaaagaacaaaaagaacaatgtgtttgagtactttctcttgatcctgcactccactaacaagttcgagatgcgtctctctttcaagctaggctatgaaatgaaggatggcttgcgggtattgaatgggcccctgatcctgtggcggcacgtgaaagcatttttttttatcagctcccagacgggcaaggtggtgtctgtttccggaaatttctcttcaatacagtgggctggcgaaattgagaatctgggcatggtcctgcttggcctgaaagaatgctgcctatccgaggaggagtgcactcaggaaccttccaagtcggactatgctatatggaacaccaaattctgcgtatatagcctggaatcccaggaggtgctctctgacatctacattatcccccccgcatacagctcggtcgtgacatacgtccatatctgcgccactgagatcatcaagaaccagctgcgcatctccttgatcgctctgactagaaagaatcaattgatctcattccagaacgggacccccaagaacgtgtgtcagcttcccttcggtgacccatgtgccgtgcagttgatggattctggaggcggaaacctcttcttcgtcgtgtcctttattagtaataacgcttgcgcagtgtggaaagagtcgttccaagttgccgccaaatgggaaaagctgagccttgtgctgatagacgatttcattggtagcggtacggaacaggtgctgttgctttttaaagactcactgaactctgactgtcttacttcctttaagatcaccgatctgggtaaaatcaattattctagcgaaccctccgattgcaatgaggatgacctattcgaagacaaacaggagaaccgctacctcgtagtgccccccttggagacagggctgaaggtgtgtttctcaagcttcagggaactgaggcagcatctgctcttaaaagagaagataatttccaaatcctacaaagcactgataaaccttgtgcagggaaaggacgataataccagtagcgccgaagagaaggagtgtctggtcccactctgcggggaagaagagaacagcgtccacattctggatgagaaactcagtgataactttcaagacagtgagcagctcgtggagaaaatttggtaccgcgtgattgacgattccttggtagtgggcgtgaagactacctcctctctgaaactgagcctaaacgacgttactctgagtctgctgatggatcaagcacatgacagcaggtttcgtttgctgaagtgtcaaaatcgtgtgatcaagctatcaacaaaccctttcccggctccatacctgatgccctgcgagatcggattggaagctaaacgggtcaccctgaccccagactctaagaaagaggagtcattcgtgtgcgagcatcccagcaagaaggaatgtgttcagattattactgcagtgaccagcctgagtcccctgttaactttctccaagttttgttgtaccgtcctactgcagattatggagcgcgaaagtggaaactgtcctaaagatcgctacgtggtgtgtggcagggtctttctcagtctagaggatttgtcaacaggcaaatacctgctgaccttcccaaaaaagaagccaattgagcatatggaggatctattcgccctgctcgccgccttccacaaaagttgtttccagattacttcacccggctacgccctgaatagcatgaaagtgtggctgctggaacatatgaagtgcgagatcattaaggaatttcctgaagtctacttctgtgagaggcctggcagcttctatgggaccctgttcacatggaagcaacgcacaccatttgaagggatcctgatcatctactcgaggaatcaaactgttatgtttcagtgtctccataatcttatacgaatcctgccaatcaattgcttccttaaaaatctcaagagtggatccgaaaattttctgatcgacaatatggcctttactctagaaaaggagctggtgactctgagctccttgagctcagctatcgcgaaacatgagtcaaatttcatgcagcgctgcgaagtaagtaaaggcaagtcgtccgtggtggccgcagctctgtcagacaggcgagagaatatccacccttacaggaaggaactgcagcgggagaaaaagaaaatgcttcagaccaatctgaaggtgagcggagccctgtacagggaaatcactttaaaggtggccgaagtgcagctcaaatccgacttcgcagcacaaaagttaagcaacctatag

SEQ ID NO: 27416 - DNA, 2580 bp, Artificial Sequence
  derived and/or modified sequence
atgacctccaagcaggccatgtcctccaatgagcaggagaggctgctgtgctacaatggagaagtcctggtgttccagttgagtaagggcaattttgcggacaaagaaccaacaaagaccccgatccttcatgtgcgtcgcatggtcttcgacagggggaccaaggtcttcgtgcaaaaatccacagggtttttcaccataaaggaggagaactcacacttgaaaattatgtgttgcaactgcgtgagcgatttcaggactggcatcaacctgccctatatcgtgatcgaaaaaaacaagaaaaataatgtgtttgaatacttcctgttaattctacactctaccaataagtttgagatgagattgtcgttcaagcttggatatgaaatgaaagatggtttgcgcgtgttaaatggacctctgatcctatggcgccacgtgaaagcatttttctttataagttcacagacggggaaggtggttagcgtaagcggcaacttctcctctatccagtgggctggcgaaatagaaaacttggggatggtgctgttgggcttgaaggagtgttgtctgagcgaagaggaatgcacacaagaacccagcaagtccgattacgctatctggaacacaaagttttgtgtctattctctggaatctcaggaagtgctgtccgatatatatattattccaccagcctatagcagcgtggttacatacgttcatatttgcgcgacggagataatcaaaaaccaactcagaatttctcttattgctctgacaaggaagaatcaactcatcagtttccaaaatgggacgcccaaaaacgtatgccagctgcccttcggggatccatgcgctgtccagctgatggatagtgggggcggaaacctgttctttgtggttagctttatttctaacaatgcgtgtgcagtatggaaagagtcctttcaggtagccgcgaagtgggagaagctaagtcttgtgctgattgatgactttatcgggtcagggaccgagcaggtgcttttgctctttaaagatagcttaaatagcgactgtctcacaagttttaaaataaccgatctggggaaaatcaattacagcagcgagccctcggactgcaatgaagacgatctgttcgaagataagcaggagaaccgttatctcgttgtacccccactggaaacaggcctgaaggtgtgtttttctagcttcagggagttgagacaacacctccttcttaaggagaagatcatttctaaatcctacaaagctctgatcaacctggtgcaggggaaagatgataacaccagcagtgccgaggagaaagaatgcctggtgcccctttgcggagaggaggagaatagcgtccacatacttgatgaaaaactatccgacaacttccaagattccgagcagcttgtggagaaaatctggtatagggttatagacgatagcctcgtagtcggggtgaagactacttcaagcttgaagttgtctttgaatgatgtgacacttagtttgctcatggaccaggcccatgattctaggttcaggctgctcaagtgccaaaaccgggttattaagctctctacgaatccatttccggcgccgtatcttatgccttgcgaaataggcttggaagccaagagagttaccctcacacccgacagcaagaaagaggaatcattcgtttgcgaacatccatctaagaaagaatgcgtacagatcataaccgcggtgaccagcctgagtcctctgcttacctttagcaagttctgctgcacagtgctgctgcagataatggagagagagtcaggaaattgccccaaggatcggtacgtcgtctgtggtcgagtgttcctgagtctggaggacctgtccaccggcaagtacctcctgacgtttcccaagaagaagcccattgagcatatggaagatttgttcgccctattggctgccttccacaagtcatgctttcagatcaccagcccaggatatgctctgaattccatgaaggtgtggttgctggaacacatgaaatgcgagattatcaaagaattccctgaggtttacttctgtgagcgacccggtagcttctacgggactttgttcacatggaagcagaggaccccttttgaggggatattgattatctattcccgcaaccagacggtcatgtttcaatgccttcacaacctcatacgcatactcccaattaattgtttcttgaaaaacctgaagagtggctccgaaaattttcttatagacaatatggcttttaccttggagaaagagctcgtgaccctgtcaagtctttcctctgccatcgcaaagcacgaatctaatttcatgcaaaggtgtgaggtgtcaaagggcaaaagctccgttgttgcagccgccttaagcgatcgcagggagaacattcacccctataggaaggagttgcagagagagaaaaagaagatgttacagaccaatctcaaagtcagcggggccttgtatagggagattacattgaaagtcgcagaagtgcagctcaaaagtgactttgcagctcaaaagctgtcaaacctctag

SEQ ID NO: 27417 - DNA, 2457 bp, Artificial Sequence
  derived and/or modified sequence
atgacctcgaagcaggcgatgtcctcaaatgagcaagagaggctcctgtgttataacggagaggtgcttgtttttcagctgtcaaagggaaatttcgcagataaggagccaaccaaaacaccaatacttcacgtgcgtagaatggtcttcgatcgcggaactaaggtttttgtgcagaagtcaactggttttttcacaatcaaggaggagaactcccacttaaaaataatgtgctgcaactgcgtgtctgactttcgaactggtattaatcttccctatattgtaatcgagaagaacaagaaaaacaacgtattcgaatattttctgctgatccttcacagcacaaataaatttgagatgcgtctgagttttaaactaggatatgagatgaaggatggtcttcgggtcctgaatggcccactcatactttggcgccacgtcaaggccttcttcttcatcagttcccagaccgggaaggttgtgtccgtgagtggaaatttttctagtatccagtgggcgggagaaatagaaaaccttgggatggtcttgttgggactgaaggagtgttgcctcagtgaggaagaatgcacacaggagccctcaaaaagcgactatgcaatctggaacacaaagttttgcgtgtacagcctggagagtcaggaggtgctctctgacatatacattataccgccagcctatagctccgtcgtaacatatgtccatatttgcgccactgagatcatcaagaaccagctgaggattagcctgattgccttgacacgcaagaaccagttgatttcttttcaaaatgggacccctaagaatgtgtgtcagttgccctttggcgatccgtgcgccgtgcaactcatggactctggggggggcaacttgttttttgttgtgtccttcatatcgaacaacgcctgcgcagtgtggaaagagtccttccaggtggccgccaagtgggagaaactctccctggttttgatagacgactttattggtagtgggacagagcaggtgctcttgctgttcaaagacagccttaacagcgattgtttgacgtccttcaaaattactgatctcggcaaaatcaactattcttccgaaccctcggattgcaacgaggatgatctgtttgaggataaacaggagaaccgatatttagtggtcccaccattggaaacaggactgaaagtgtgtttctctagctttagagagctgagacagcatctgctgttgaaggagaaaatcattagcaagagctacaaggctctgattaatctcgtgcagggcaaagacgacaatacttcttcagccgaagagaaagagtgcctcgtgccattgtgcggagaggaagagaactccgttcatatcctggatgagaagttgtctgacaacttccaggattccgaacagcttgttgagaagatctggtacagagtgattgacgatagcctagtagtgggtgtgaagacaacctcctctcttaaactgtctcttaacgacgttacactctcactgctgatggaccaagcacatgactcccggtttaggcttctcaaatgccagaatagagtcatcaagctgagtactaatcctttcccggcgccgtatctcatgccatgtgaaattggcttggaggccaagcgggttactctgaccccagattcaaagaaggaggagagctttgtgtgcgagcacccgagcaagaaagaatgtgtgcagatcataacggcagtgacctcgctctcacccctgctgaccttttccaagttctgctgtactgtccttttgcagatcatggagagggagtcgggaaactgtcctaaagaccgctacgtcgtgtgcggtcgggtgtttctctcactggaggatctatctaccggcaagtatttactgacctttccaaagaagaagcccatagaacacatggaggatctgttcgccttgctggcagcttttcataagtcctgttttcagataacatctcctggctacgcattaaactccatgaaggtctggctcctggaacacatgaagtgtgaaattataaaagaatttcccgaggtctacttctgtgaacggcccggatctttttacggcactctgtttacatggaagcagagaacaccgttcgagggcatcctgattatttattcaaggaaccagacggtgatgttccagtgtctgcacaacttgattcggattctaccaatcaattgttttcttaaaaatctgaaatcgggctcggaaaactttctgattgataatatggcctttactttggagaaggagctggtaaccctcagtagcctgagctccgctatcgctaagcacgaaagcaattttatgcagaggtgtgaggtttctaaaggcaagtcttctgtagtggccgccgccctgtccgaccgtagagaaaacatacacccttatcgtaaggagctgcaacgctag

SEQ ID NO: 27418 - DNA, 2580 bp, Artificial Sequence
  derived and/or modified sequence
atgaccagcaagcaggccatgagcagcaatgagcaggagcggctgctgtgctacaatggagaggtgctggtgttccagctgagcaaaggaaactttgctgacaaggagcccaccaagacccccatcctgcacgtgcggaggatggtgtttgaccggggcaccaaggtgtttgtgcagaagagcacaggcttcttcaccatcaaggaggagaacagccacctgaagatcatgtgctgcaactgtgtgtctgacttcagaacaggcatcaacctgccctacatcgtcatcgagaagaacaagaagaacaacgtgtttgagtacttcctgctgatcctgcacagcaccaacaagtttgagatgaggctgtccttcaagctgggctatgagatgaaggatggcctgcgggtgctgaatggccccctcatcctgtggaggcatgtgaaggccttcttcttcatcagcagccagacaggcaaggtggtgtctgtgtctggcaacttcagcagcatccagtgggccggggagattgagaacctgggcatggtgctgctgggcctgaaggagtgctgcctgtctgaggaggagtgcacccaggagcccagcaagagtgactatgccatctggaacaccaagttctgtgtgtacagcctggagagccaggaggtgctgagtgacatctacatcatccccccagcctacagctctgtggtgacctacgtgcacatctgtgccacagagatcatcaagaaccagctgcgcatcagcctgattgccctgaccaggaagaaccagctgatctccttccagaatggcacccccaagaatgtgtgccagctgccctttggagacccctgtgctgtgcagctgatggacagcggcggcggcaacctcttctttgtggtgtccttcatcagcaacaatgcctgtgctgtgtggaaggagagcttccaggtggccgccaagtgggagaagctgagcctggtgctgattgatgacttcatcggcagcggcacagagcaggtgctgctgctcttcaaggacagcctgaacagcgactgcctgaccagcttcaagatcacagacctgggcaagatcaactacagcagcgagcccagcgactgcaatgaagatgacctgtttgaggacaagcaggagaaccgctacctggtggtgccccccctggagaccggcctgaaggtgtgcttcagcagcttccgggagctgcggcagcacctgctgctgaaggagaagatcatcagcaagagctacaaggccctgatcaacctggtgcagggcaaggatgacaacaccagcagcgctgaggagaaggagtgcctggtgcccctgtgtggggaggaggagaacagcgtgcacatcctggatgagaagctgagtgacaacttccaggacagcgagcagctggtggagaagatctggtacagagtgattgatgacagcctggtggtgggcgtgaagaccaccagcagcctgaagctgagcctgaatgatgtgaccctgagcctgctgatggaccaggcccatgacagccgcttccggctgctgaagtgccagaacagagtcatcaagctgagcaccaaccccttccctgccccctacctgatgccctgtgaaattggcctggaggccaagagggtgaccctgaccccagacagcaagaaggaggagagctttgtgtgtgagcaccccagcaagaaggaatgtgtgcagatcatcacagctgtgaccagcctgagccccctgctgaccttcagcaagttctgctgcaccgtgctgctgcagatcatggagcgggagagcggcaactgccccaaggaccgctacgtggtgtgtggccgggtcttcctgagcctggaggacctgagcacaggcaagtacctgctgaccttccccaagaagaagcccatcgagcacatggaggacctgtttgccctgctggccgccttccacaagagctgcttccagatcaccagccctggctacgccctgaacagcatgaaggtgtggctgctggagcacatgaagtgtgagatcatcaaggagttccctgaggtgtacttctgtgagaggcctggcagcttctacggcaccctcttcacctggaagcagaggaccccatttgagggcatcctgatcatctacagcaggaaccagacagtgatgttccagtgcctgcacaacctgatccgcatcctgcccatcaactgcttcctgaagaacctgaagagcggcagcgagaacttcctgattgacaacatggccttcaccctggagaaggagctggtgaccctgagcagcctgagcagcgccatcgccaagcatgagagcaacttcatgcagagatgtgaggtgtccaagggcaagagctctgtggtggccgccgccctgagtgacagaagagagaacatccacccctacaggaaggagctgcagcgggagaagaagaagatgctgcagaccaacctgaaggtgtctggggccctgtaccgggagatcaccctgaaggtggccgaggtgcagctgaagagtgactttgctgcccagaagctgagcaacctgtag

SEQ ID NO: 27419 - DNA, 2457 bp, Artificial Sequence
  derived and/or modified sequence
atgaccagcaagcaggccatgagcagcaatgagcaggagcggctgctgtgctacaatggagaggtgctggtgttccagctgagcaaaggaaactttgctgacaaggagcccaccaagacccccatcctgcacgtgcggaggatggtgtttgaccggggcaccaaggtgtttgtgcagaagagcacaggcttcttcaccatcaaggaggagaacagccacctgaagatcatgtgctgcaactgtgtgtctgacttcagaacaggcatcaacctgccctacatcgtcatcgagaagaacaagaagaacaacgtgtttgagtacttcctgctgatcctgcacagcaccaacaagtttgagatgaggctgtccttcaagctgggctatgagatgaaggatggcctgcgggtgctgaatggccccctcatcctgtggaggcatgtgaaggccttcttcttcatcagcagccagacaggcaaggtggtgtctgtgtctggcaacttcagcagcatccagtgggccggggagattgagaacctgggcatggtgctgctgggcctgaaggagtgctgcctgtctgaggaggagtgcacccaggagcccagcaagagtgactatgccatctggaacaccaagttctgtgtgtacagcctggagagccaggaggtgctgagtgacatctacatcatccccccagcctacagctctgtggtgacctacgtgcacatctgtgccacagagatcatcaagaaccagctgcgcatcagcctgattgccctgaccaggaagaaccagctgatctccttccagaatggcacccccaagaatgtgtgccagctgccctttggagacccctgtgctgtgcagctgatggacagcggcggcggcaacctcttctttgtggtgtccttcatcagcaacaatgcctgtgctgtgtggaaggagagcttccaggtggccgccaagtgggagaagctgagcctggtgctgattgatgacttcatcggcagcggcacagagcaggtgctgctgctcttcaaggacagcctgaacagcgactgcctgaccagcttcaagatcacagacctgggcaagatcaactacagcagcgagcccagcgactgcaatgaagatgacctgtttgaggacaagcaggagaaccgctacctggtggtgccccccctggagaccggcctgaaggtgtgcttcagcagcttccgggagctgcggcagcacctgctgctgaaggagaagatcatcagcaagagctacaaggccctgatcaacctggtgcagggcaaggatgacaacaccagcagcgctgaggagaaggagtgcctggtgcccctgtgtggggaggaggagaacagcgtgcacatcctggatgagaagctgagtgacaacttccaggacagcgagcagctggtggagaagatctggtacagagtgattgatgacagcctggtggtgggcgtgaagaccaccagcagcctgaagctgagcctgaatgatgtgaccctgagcctgctgatggaccaggcccatgacagccgcttccggctgctgaagtgccagaacagagtcatcaagctgagcaccaaccccttccctgccccctacctgatgccctgtgaaattggcctggaggccaagagggtgaccctgaccccagacagcaagaaggaggagagctttgtgtgtgagcaccccagcaagaaggaatgtgtgcagatcatcacagctgtgaccagcctgagccccctgctgaccttcagcaagttctgctgcaccgtgctgctgcagatcatggagcgggagagcggcaactgccccaaggaccgctacgtggtgtgtggccgggtcttcctgagcctggaggacctgagcacaggcaagtacctgctgaccttccccaagaagaagcccatcgagcacatggaggacctgtttgccctgctggccgccttccacaagagctgcttccagatcaccagccctggctacgccctgaacagcatgaaggtgtggctgctggagcacatgaagtgtgagatcatcaaggagttccctgaggtgtacttctgtgagaggcctggcagcttctacggcaccctcttcacctggaagcagaggaccccatttgagggcatcctgatcatctacagcaggaaccagacagtgatgttccagtgcctgcacaacctgatccgcatcctgcccatcaactgcttcctgaagaacctgaagagcggcagcgagaacttcctgattgacaacatggccttcaccctggagaaggagctggtgaccctgagcagcctgagcagcgccatcgccaagcatgagagcaacttcatgcagagatgtgaggtgtccaagggcaagagctctgtggtggccgccgccctgagtgacagaagagagaacatccacccctacaggaaggagctgcagaggtag

SEQ ID NO: 27420 - DNA, 2580 bp, Artificial Sequence
  derived and/or modified sequence
atgaccagcaagcaggccatgagcagcaacgagcaggagcggctgctctgctataacggcgaggtactggtgttccagctaagtaagggaaactttgccgacaaggagccgaccaagacacccatactgcacgtgcgccgcatggtgttcgataggggaacgaaggtcttcgtgcaaaagagtactgggttttttaccataaaggaggagaactcacaccttaagatcatgtgctgtaattgcgtttcagactttagaacgggcatcaatctcccatacatcgtcattgagaaaaataaaaaaaataatgtgttcgaatatttcctcctaattctgcattccactaataagtttgagatgaggctgagctttaagctcgggtatgagatgaaggatgggctccgtgtcttaaacggtccccttattctctggcgtcatgtgaaggcctttttctttattagcagtcaaaccggaaaggttgtatcagtgagtggcaatttttcttccattcagtgggccggcgaaatcgagaacctggggatggtccttcttgggctaaaagagtgctgtctgagtgaagaggaatgtacacaggagcccagcaaaagcgactacgccatctggaatacaaaattttgtgtgtacagcctggaatcacaagaagtattgagtgatatctacattattccccctgcctatagctctgtggttacatatgtgcatatctgcgccacagagatcatcaagaatcagcttcgcatcagccttattgcactcactcggaaaaaccagctgatctcattccagaacgggactccgaaaaacgtctgccagctgccatttggcgacccttgtgccgtgcaactgatggactccggcggtggaaacctgttctttgttgtgagctttatctctaacaatgcatgtgctgtgtggaaagagagtttccaagtggctgccaaatgggaaaagctatcattggtattaatcgacgacttcattggttcaggcaccgagcaggttctgctgcttttcaaggactctcttaattctgattgcctcacatccttcaagattacagatctaggaaaaatcaattactcatccgaaccctccgactgtaatgaagatgacctctttgaggataagcaggaaaatcggtacctcgtggttccacctctagaaactggtcttaaggtgtgtttctcatccttcagggaacttcggcagcatttgttgcttaaggagaagataatttcgaaaagctacaaggctctcattaacctggttcaaggaaaggacgataatacctcctccgccgaggaaaaggagtgccttgtgccactgtgcggcgaggaggaaaattcagttcacatcctagacgaaaaactgagtgacaacttccaggactctgagcagctcgtcgaaaaaatctggtatcgagtaatagatgactccctggtggtgggcgtcaaaacaacttctagcttaaaactgtcactgaacgatgtaactctgtccctcctaatggaccaagctcacgattcccgcttcagactcctgaagtgtcagaatcgggtgatcaagctgtccaccaacccttttcctgctccctatctgatgccctgtgagatcgggttggaggccaagcgagtgacattgaccccagatagcaaaaaagaagagagctttgtttgcgaacacccctccaaaaaagaatgtgtccagatcatcacagccgtgacctccctgtcacccctgctgaccttttctaagttctgttgtacagtgcttctccagattatggagcgcgaaagtggaaattgcccgaaagaccgttatgtggtgtgcggccgcgtgttcctgagcctggaggatctttcaacaggcaagtatctcctgacgtttccaaaaaagaaacccatcgaacacatggaagacctgttcgcgctgctggccgcctttcataagagctgtttccagattaccagccccggctatgcgctgaactccatgaaggtgtggctcttggagcatatgaagtgcgagatcataaaggagttcccagaggtctatttttgcgagcgacccggaagcttttacggtactctattcacttggaaacaacgcacacccttcgaggggatcttgattatctattctcgcaatcaaaccgtgatgtttcagtgtcttcacaatctgattaggatccttcccatcaattgctttctgaagaacctcaagtcgggatcggaaaacttcctgatcgataatatggcattcacgctagagaaagaattagttacactgtctagcctgagctccgccatagccaaacatgagagcaactttatgcagcggtgtgaagtgtcaaagggaaaaagctctgtggttgcggccgccctgtcagatcgaagggaaaacattcatccgtacagaaaagaactccagagggaaaagaagaaaatgctgcaaaccaatcttaaggtcagcggggctctataccgagagattacactgaaggtggccgaggtgcagctgaaatcagatttcgccgctcagaagctcagcaacctgtag

SEQ ID NO: 27421 - DNA, 2580 bp, Artificial Sequence
  derived and/or modified sequence
atgaccagcaagcaggccatgagcagcaacgagcaggagcggctgctgtgctataatggcgaggtcctggtgtttcagctgagcaaagggaatttcgccgataaggagccgactaagactcctattttacacgttagacgaatggttttcgacaggggcaccaaagtgtttgtgcagaagagcactgggttctttacaatcaaagaggaaaattcccacctgaagataatgtgctgtaattgcgtaagcgacttccgaacagggataaatctcccttacatcgttattgagaaaaacaagaagaataacgtttttgagtactttcttctgatactgcattctacgaacaaatttgaaatgcgcctaagttttaaattgggatacgaaatgaaagacggcctaagggtgttgaacggtcctctgatcctgtggagacatgtcaaggcttttttctttatttcttcgcaaactgggaaggttgtgtcagtgagtggaaatttctcttccattcagtgggctggtgagatcgagaatctgggaatggtcctcctgggactcaaagagtgctgtctcagcgaagaagaatgtacacaagagccgtccaagtctgattatgccatctggaatacaaagttctgcgtgtacagcctcgaaagtcaagaagttcttagcgatatctacattataccccctgcctacagctccgttgtgacgtacgttcacatctgtgctaccgagatcataaaaaaccaattgaggattagcttgattgcattgactaggaaaaatcagctgattagttttcaaaatggaacacctaagaacgtatgtcagttaccctttggggacccatgcgcagtgcagctcatggatagcggcgggggcaatctgtttttcgtcgtttccttcattagcaacaatgcctgcgccgtctggaaagagtccttccaggtggcagcaaagtgggagaagcttagcttggttctgattgacgattttattggttccggcaccgagcaggtccttctgctgttcaaggatagcttgaatagcgattgccttacctccttcaagattactgatctcgggaagataaactactcatctgagccgagcgattgtaacgaagacgacctgttcgaggacaagcaggagaatcgatacctggtggtcccaccactggagaccgggctgaaagtctgcttttcatcctttcgggaacttcgtcaacatctgttgctgaaggaaaagatcatcagtaagtcttacaaggcgcttatcaatctcgtgcaaggtaaggacgataatacttcttctgcagaagaaaaagaatgccttgtgcctctgtgtggggaggaggaaaatagtgtccatattctggacgaaaagctctctgacaattttcaggatagcgagcaacttgtcgaaaagatatggtacagagttatagacgatagccttgtcgtgggggtgaaaacgacaagctctttgaagctcagcctcaacgatgttacactctctctgttaatggatcaggcccacgactcaaggttcagactcctgaagtgtcagaaccgggtaattaaactgagcactaatccatttccagccccttacctcatgccctgtgaaatcgggctggaggccaagcgggtcacattaacccctgattcgaagaaggaagaaagttttgtgtgtgagcacccttctaaaaaggaatgtgtacagatcatcaccgccgtgaccagtctgtctcctctcttgacttttagcaaattctgctgtaccgtactgctgcagatcatggagcgcgagagtggcaattgtccgaaggacaggtacgtcgtgtgcggtagggttttcctgtcacttgaagatctgtctactgggaagtatctgctaacctttccgaaaaagaagcccatagagcacatggaggatctctttgccctgctggcagcttttcacaagagttgtttccagatcacaagccctgggtacgctcttaattctatgaaggtctggctgcttgagcatatgaagtgcgaaataattaaggaatttcctgaggtgtatttctgcgaaaggcccggttcattctacggcactctttttacatggaaacagaggacccctttcgagggcatcctcattatctactccaggaaccagacggtgatgttccagtgtctgcataacctgatccggatcttgcctataaattgtttcctcaagaacctgaagagcggatcagagaacttcctgattgacaatatggcattcactctggaaaaagagcttgtcaccctgtctagtctcagctccgccattgccaaacatgagtccaattttatgcagagatgcgaagtgtcaaaaggtaagtcctcagtggtcgccgctgccctaagtgacaggcgggagaatatccacccataccggaaggaactacagcgagagaagaagaaaatgctgcagacaaatctgaaagtgtccggagccctatatcgggaaataaccttaaaagtggcagaagtccagcttaagtcggatttcgccgcccagaaactttctaatctgtag

SEQ ID NO: 27422 - DNA, 2457 bp, Artificial Sequence
  derived and/or modified sequence
atgaccagcaagcaggccatgagcagcaacgagcaggagcggctgttgtgctataacggggaagtgctcgtttttcaactgtcgaaaggcaatttcgccgataaggaacccactaagactccgattctgcatgtgcgtcgtatggtatttgatagaggaacgaaagtgttcgtccaaaagtcaaccggctttttcaccataaaggaagagaacagccacctgaaaattatgtgctgtaattgcgtgtctgactttcgaactggcatcaatctgccttacatagtcatcgaaaagaacaagaaaaacaacgtcttcgagtatttcctgcttatccttcactccacaaacaaattcgaaatgcgtctatcctttaaactcggttatgagatgaaggacggactaagagtccttaatgggccgctgattctttggcgccatgtgaaagcattcttctttatctccagccaaaccggtaaagttgtatcggtctcagggaacttctcgtctatccagtgggcaggtgagattgagaatttaggcatggtattactgggtttaaaggagtgttgtttgtccgaagaggagtgcacccaagagccatctaaaagtgactacgcaatctggaacactaagttttgcgtctattccctcgagtcccaagaagttctgtccgatatttacatcattccacctgcctatagcagcgtagtgacatacgtgcacatctgcgcaacggagatcataaaaaaccagttgcggataagcctcatagctctcacacgcaagaaccaactgatttcgtttcagaacgggacacccaaaaacgtctgccagctgccttttggggatccctgcgcagtccaactgatggactcaggtggggggaaccttttctttgtggttagttttatctctaataatgcttgcgccgtgtggaaagaatccttccaggtcgccgcaaagtgggagaaactgtctttggtgctaattgatgactttattggcagcggtacagaacaggtactgctgctcttcaaagacagtctgaatagcgattgtctgacttcgttcaaaataaccgacctgggaaaaatcaattacagctcagagccttcagactgtaatgaggacgatctctttgaggacaagcaagagaaccgatacctcgtcgttccaccactcgaaaccggcttgaaagtatgtttctcgtcctttagggagctgagacagcacttactgctcaaagagaagattatatccaaatcatacaaagctctgatcaacctggtgcagggcaaggacgataacacctcttcagccgaggaaaaggaatgtctggtacctctgtgtggagaggaagagaacagtgtgcacattttggacgagaaattgtcagacaattttcaggactcagagcagctggtggaaaagatctggtacagagttattgatgactcactcgttgtgggtgtaaagacaacttcttctctgaagctgtctttgaacgacgtgacactcagcttgctaatggaccaggcccacgactcccgtttcaggctcttgaagtgccagaatagagtaattaaactttcaactaatccctttcctgccccctatctgatgccttgcgagatcggcctggaggccaaacgggtaaccctcacacccgattccaaaaaggaagagtcgtttgtttgtgagcatcccagcaaaaaggagtgcgtacaaataattacagcagtgacctccctgtctccactattgaccttctctaagttttgttgtactgtgctgctgcagatcatggaaagagagagcggcaactgtccaaaggacaggtatgtggtgtgtggcagagtgtttctgagcttagaggacctgtctaccggaaaatatctactcacttttcctaagaagaaacccatcgagcatatggaagatctgtttgctttactagccgcatttcacaaatcctgtttccagatcacaagcccgggctatgctctcaactcaatgaaagtgtggcttcttgaacacatgaagtgcgaaatcatcaaggagttcccggaggtctacttttgcgaacgtcctggatccttctacggaacgctgttcacctggaagcagcggacccccttcgaaggcattctcattatctatagccgcaatcaaaccgtgatgttccagtgcctgcacaatctgattaggattcttccaatcaattgcttcctgaagaaccttaaatctggaagcgagaattttctgattgataacatggcgtttactcttgagaaggagctcgtcacactctctagcctctcgtccgcaatcgctaagcacgagtcaaactttatgcagagatgcgaggtgagcaaagggaagtcctccgtggtggccgcggccctgtcggaccgccgcgaaaacatccatccgtaccgcaaagagctgcagaggtag

SEQ ID NO: 27423 - DNA, 2580 bp, Artificial Sequence
  derived and/or modified sequence
atgacgagcaagcaggcaatgtcttccaacgaacaagagcgtctgttatgctacaatggggaggtactcgtcttccagctgtccaagggaaacttcgccgataaagaaccaaccaaaacccctatccttcatgttaggaggatggtgtttgacaggggcaccaaggttttcgtccaaaagagcacagggttttttacaatcaaagaagaaaacagtcatttgaaaatcatgtgttgcaattgtgtgtccgacttccgtactggtattaatttgccttacatcgttattgaaaagaataagaaaaataatgtatttgaatactttctgctcattctccacagcacgaataagtttgagatgcggctcagtttcaagctcggctacgagatgaaggatggtcttcgagtgttaaacggacctttaattctttggcgacacgttaaagccttcttctttattagctcccaaacaggaaaagttgttagtgtcagtgggaacttcagctctatccaatgggctggagagattgagaatttggggatggtgctactggggctaaaggaatgctgcctgtctgaggaggagtgcactcaggaaccaagtaaatccgattacgcaatctggaacacgaagttttgtgtgtattcactggagtctcaggaagtgctgagcgatatctatataattcctcccgcatactcttctgtagtaacctacgtacacatctgtgcaaccgagataatcaagaaccaactgagaatttcactgattgccctgaccagaaagaaccagctcatttctttccaaaacgggacgcctaagaatgtctgtcaactcccctttggagatccatgcgcagtgcagcttatggatagtggcggtggaaatttgttttttgttgtcagtttcattagcaataatgcatgcgcggtgtggaaagaatccttccaggtcgcagctaaatgggagaagttgtccctggtgctcattgacgacttcatcggctctggcactgagcaggtcttactgctgtttaaggatagcctgaattctgactgcctgaccagttttaaaattactgatcttggcaaaatcaactatagttccgaaccttctgactgcaacgaggatgacctcttcgaggacaagcaggaaaacaggtatttagtagttccgcctctcgagaccgggctcaaggtatgcttcagttccttcagagaactaagacagcacctactcctcaaggagaaaattattagcaaatcttataaggctctgatcaacctggtgcagggtaaggatgataacacttcgtcagctgaggaaaaggagtgtctggtgccgttgtgtggcgaagaggaaaatagcgtccatatcctggacgaaaaactttccgataactttcaagatagtgagcaactggtggagaagatttggtatcgcgtgatagatgattctctggtcgtgggagtgaaaactacttcgtcactcaagctcagcctgaacgatgtgaccttatccctgttaatggatcaggctcatgactccaggtttagactgctgaaatgtcagaaccgtgtgataaagctctccactaacccttttcccgcaccttacctcatgccttgcgagattggtttggaggccaagagagtcacacttaccccagattctaaaaaagaggagtcctttgtgtgtgagcatccgagcaagaaagagtgcgtccagattatcactgcggtgacaagcctgtcccctttgttaaccttttccaaattttgctgcactgtgttactgcaaatcatggagagggagtccggcaattgtccgaaagaccgctacgtcgtgtgtggcagagtctttctgtccctggaagacttatctactggcaaatacctgttgacgtttcccaaaaagaagccaatcgagcacatggaagaccttttcgctctgctcgcagctttccacaaaagttgtttccagattacaagcccagggtatgctctgaacagcatgaaggtctggctacttgagcacatgaagtgcgagatcatcaaagaattccccgaggtatatttctgtgaacggccaggctccttttacgggacactgtttacctggaaacaacgaactccctttgaaggaatcctcatcatctactctcggaaccagacagttatgttccaatgcctgcataacttaatacggattctgcccatcaactgtttccttaaaaatctcaaatctgggagtgaaaacttccttattgataacatggctttcacacttgaaaaggagctggtcacgctctccagtcttagcagtgccatagctaaacacgaaagcaatttcatgcagcggtgtgaggtgagtaagggaaagtccagcgtggtcgctgcagctctcagtgatcggcgtgaaaatatccatccatacaggaaggaattacagcgggaaaaaaaaaagatgctgcagaccaatttgaaagttagtggcgcactgtatagagagattactctgaaggtggccgaggtgcagcttaagtccgactttgccgcacagaagctgagcaacctgtag

SEQ ID NO: 27424 - DNA, 2580 bp, Artificial Sequence
  derived and/or modified sequence
atgacaagcaagcaggccatgtcgagcaatgagcaggaaagactgctgtgctataacggtgaggtcctggtattccagctctctaagggaaacttcgccgacaaggagcctacgaaaacccccatattgcacgttagaagaatggtgtttgatcgtggtaccaaggtgtttgtccagaagtccacgggtttcttcactatcaaagaggagaattctcacctcaaaatcatgtgttgcaattgcgtgtcggactttaggactggaattaacttgccctacatcgtgatagaaaagaacaagaagaacaacgtttttgagtactttctcctgattctccattcaactaataagtttgaaatgagactcagttttaagctgggatatgagatgaaggatggtctgcgagtgctgaacgggcctctgatactgtggcgccacgtgaaggcgttctttttcatcagcagccagaccggtaaagttgtttcggtgtccggcaatttcagtagcatccagtgggccggagagattgagaacttgggcatggtgcttttaggcttgaaggaatgctgtctctccgaggaggagtgcacccaggaaccgagcaagtcagattacgccatctggaatactaagttctgtgtgtactcactcgaatcacaggaagtactcagtgatatctatataattccgcctgcatatagttcagttgtgacatacgtacatatctgcgctaccgaaatcattaagaatcagctacgcatcagcctgatagctctgactcgaaagaaccagcttataagtttccagaacggaaccccaaaaaacgtgtgtcagctgcctttcggcgacccctgtgccgtgcagctcatggattcagggggagggaatctgttctttgtggtcagctttattagtaacaatgcttgcgcagtgtggaaggagagctttcaggtcgccgcaaagtgggaaaagctgagcttggtcctcatcgacgatttcatcggatcagggacagaacaggtgttgttactgtttaaagatagtctgaactcagactgtttaaccagttttaaaattaccgacctgggcaaaatcaattacagctccgagccatcagattgcaacgaagacgacctttttgaggacaagcaggagaatcgatacctggttgtgccgccacttgaaacaggcctcaaggtttgcttctctagctttagggagcttaggcaacatctgttattaaaggagaaaataatctctaagagctacaaggctctgatcaatctggtccagggcaaggacgacaatacttcatccgcagaagaaaaagagtgccttgttcccctgtgcggggaggaagagaattctgtgcatattctagatgaaaagttgtccgataactttcaggatagtgagcaactcgtcgaaaaaatctggtatagagtgattgacgactccctggtcgtgggggtcaagaccacatctagcctaaaacttagcttgaacgacgttacactatctttgctgatggaccaggcccacgacagccggttccgcttgctgaagtgccaaaatcgcgtgattaagctaagtaccaacccattccctgctccatatctgatgccttgcgagataggcctagaggccaaacgagttacactcactcccgattctaagaaggaagaatcatttgtttgcgagcatccttctaagaaagagtgcgtgcagattattaccgctgtgacatccctctccccactgttgactttctcaaagttctgctgtaccgtgctattgcagattatggagcgggaaagcgggaactgccccaaggataggtatgtggtatgtggcagggtgttcttgtcactggaggatctgagcaccggaaagtacctacttaccttcccaaagaagaaaccaatcgagcatatggaagacctgttcgctcttctcgccgctttccacaagagttgctttcagatcacatctcccggatatgcactcaacagcatgaaagtctggctcttagaacacatgaaatgcgaaatcattaaggaattcccagaggtctatttctgtgaaaggcccggtagcttctacggcaccctgttcacctggaagcagagaaccccctttgaaggcatccttattatttactctagaaaccaaacagtaatgttccagtgccttcataacctgatcagaatcctccccataaactgctttctgaagaatctgaaaagcggctctgagaacttcctgattgacaatatggcctttaccctcgagaaggagctcgttacactttcttcattgtccagtgcaatagcaaaacacgagtcaaacttcatgcaaagatgcgaagtctccaaggggaaaagcagcgtggtggccgctgctttgagcgaccggcgagaaaacatccatccgtatcgaaaagagctgcagagagagaagaaaaaaatgcttcaaaccaatctcaaagtcagcggggcattataccgcgaaatcactcttaaagttgcagaggtccagctcaagtctgatttcgctgcgcaaaaattgagcaatctgtag

SEQ ID NO: 27425 - DNA, 2457 bp, Artificial Sequence
  derived and/or modified sequence
atgacttctaagcaggctatgagttctaatgaacaggaacgtctgctgtgttacaacggcgaagtcttagtgttccagctttcaaagggcaactttgctgataaagagcctaccaaaactcctatcctgcatgtccggcgaatggtcttcgaccgcggaactaaagtgtttgtgcagaaaagcacaggattctttacaataaaagaagagaactctcatctcaaaatcatgtgctgcaattgcgtctccgacttccgaaccgggattaatctgccttacatagttatcgagaagaataagaagaacaatgtctttgaatacttcttactcatcctccacagtactaataagttcgagatgcgcctcagcttcaagctggggtacgaaatgaaggatggccttcgggtcctgaacggcccactcattctctggaggcacgtaaaagccttcttttttatcagcagccagactggtaaggtcgtatcggtgagcggtaacttttcatcaattcagtgggccggagagatcgaaaacctcggcatggtgctcctaggtttgaaggaatgttgcttgtcagaagaggagtgcacccaggagccatctaagagcgactacgcaatatggaacaccaagttctgcgtctactcacttgagtctcaagaagtgctgagcgacatatatatcatcccaccggcatactctagtgtggtcacttacgtgcatatctgcgcaaccgaaatcataaaaaatcaacttaggatcagcctcatcgctctaacgagaaagaaccaacttatcagctttcagaatggtacgccaaagaacgtatgtcaactgcccttcggagacccatgtgctgtgcaactgatggattcggggggtgggaatctattctttgtggtttcctttatcagtaataatgcctgcgctgtgtggaaggagtcgttccaagtggctgcaaaatgggagaagctctccctagtcttgatagacgacttcatcggatccgggacagagcaggttctcttactttttaaggattcacttaattccgactgtcttacgtcatttaaaatcactgaccttgggaagattaactacagcagtgagccatccgattgcaatgaagacgacctcttcgaggacaagcaggagaacagatatctcgtggtgccacctcttgagactggacttaaggtctgctttagctccttccgcgaattgagacaacatttactgctgaaagaaaaaattatctccaaaagctacaaggctctcatcaacctcgtgcaggggaaggatgacaatacgtcctccgctgaagagaaggaatgcttagtgccgctttgtggggaagaggaaaattctgttcatatcctcgacgagaaactttccgataacttccaggactcagagcaactggtggagaagatctggtatcgcgttattgacgacagtctggtggttggagttaaaacaactagctcgctgaaattgagcctgaatgatgtcaccctctccttactcatggaccaggcccatgatagtcgcttccgcctcctgaagtgccagaaccgggtcatcaagctgtccaccaacccgtttcctgcgccatacctcatgccatgtgagatcggattggaagcaaaacgcgtgacacttactcctgattccaagaaggaagagagctttgtgtgtgagcacccaagtaaaaaggaatgtgtgcagataatcacagctgttacgtctctcagtcctctgttgaccttttccaagttttgctgcacagtgttactgcagataatggaaagagagagcggaaattgccctaaagaccgctacgtggtgtgcgggcgtgtctttctgtctttggaggacctgtccacaggtaagtacctcctgacattccccaagaaaaaacccatcgagcatatggaggatcttttcgccctgctggccgctttccataagtcctgtttccagatcacatcgcctggttacgctctgaattccatgaaagtgtggctccttgagcacatgaaatgcgaaattattaaggagtttccagaagtgtacttctgtgagcgtcctgggagtttctatggaacgctgttcacatggaaacaaagaaccccctttgagggtatactgataatttactcaaggaaccaaaccgtgatgtttcagtgcttacacaacctgatacgaatattacccatcaactgctttctgaaaaacttgaagtctgggtccgaaaatttcctgattgacaacatggcgttcactctggaaaaagagttagtcactctctcctctttaagctctgcaattgcaaagcatgaaagtaatttcatgcaaagatgcgaagtcagcaagggtaaaagctctgttgtggctgctgctctgtctgacagacgcgagaacatccatccttatcgaaaggagctgcagagatag

SEQ ID NO: 27426 - DNA, 2580 bp, Artificial Sequence
  derived and/or modified sequence
atgaccagcaagcaggccatgagcagcaacgagcaggagagactgctgtgctacaacggcgaggtgctggtgttccagctgagcaagggcaacttcgccgacaaggagcccaccaagacccccatcctgcacgtgagaagaatggtgttcgacagaggcaccaaggtgttcgtgcagaagagcaccggcttcttcaccatcaaggaggagaacagccacctgaagatcatgtgctgcaactgcgtgagcgacttcagaaccggcatcaacctgccctacatcgtgatcgagaagaacaagaagaacaacgtgttcgagtacttcctgctgatcctgcacagcaccaacaagttcgagatgagactgagcttcaagctgggctacgagatgaaggacggcctgagagtgctgaacggccccctgatcctgtggagacacgtgaaggccttcttcttcatcagcagccagaccggcaaggtggtgagcgtgagcggcaacttcagcagcatccagtgggccggcgagatcgagaacctgggcatggtgctgctgggcctgaaggagtgctgcctgagcgaggaggagtgcacccaggagcccagcaagagcgactacgccatctggaacaccaagttctgcgtgtacagcctggagagccaggaggtgctgagcgacatctacatcatcccccccgcctacagcagcgtggtgacctacgtgcacatctgcgccaccgagatcatcaagaaccagctgagaatcagcctgatcgccctgaccagaaagaaccagctgatcagcttccagaacggcacccccaagaacgtgtgccagctgcccttcggcgacccctgcgccgtgcagctgatggacagcggcggcggcaacctgttcttcgtggtgagcttcatcagcaacaacgcctgcgccgtgtggaaggagagcttccaggtggccgccaagtgggagaagctgagcctggtgctgatcgacgacttcatcggcagcggcaccgagcaggtgctgctgctgttcaaggacagcctgaacagcgactgcctgaccagcttcaagatcaccgacctgggcaagatcaactacagcagcgagcccagcgactgcaacgaggacgacctgttcgaggacaagcaggagaacagatacctggtggtgccccccctggagaccggcctgaaggtgtgcttcagcagcttcagagagctgagacagcacctgctgctgaaggagaagatcatcagcaagagctacaaggccctgatcaacctggtgcagggcaaggacgacaacaccagcagcgccgaggagaaggagtgcctggtgcccctgtgcggcgaggaggagaacagcgtgcacatcctggacgagaagctgagcgacaacttccaggacagcgagcagctggtggagaagatctggtacagagtgatcgacgacagcctggtggtgggcgtgaagaccaccagcagcctgaagctgagcctgaacgacgtgaccctgagcctgctgatggaccaggcccacgacagcagattcagactgctgaagtgccagaacagagtgatcaagctgagcaccaaccccttccccgccccctacctgatgccctgcgagatcggcctggaggccaagagagtgaccctgacccccgacagcaagaaggaggagagcttcgtgtgcgagcaccccagcaagaaggagtgcgtgcagatcatcaccgccgtgaccagcctgagccccctgctgaccttcagcaagttctgctgcaccgtgctgctgcagatcatggagagagagagcggcaactgccccaaggacagatacgtggtgtgcggcagagtgttcctgagcctggaggacctgagcaccggcaagtacctgctgaccttccccaagaagaagcccatcgagcacatggaggacctgttcgccctgctggccgccttccacaagagctgcttccagatcaccagccccggctacgccctgaacagcatgaaggtgtggctgctggagcacatgaagtgcgagatcatcaaggagttccccgaggtgtacttctgcgagagacccggcagcttctacggcaccctgttcacctggaagcagagaacccccttcgagggcatcctgatcatctacagcagaaaccagaccgtgatgttccagtgcctgcacaacctgatcagaatcctgcccatcaactgcttcctgaagaacctgaagagcggcagcgagaacttcctgatcgacaacatggccttcaccctggagaaggagctggtgaccctgagcagcctgagcagcgccatcgccaagcacgagagcaacttcatgcagagatgcgaggtgagcaagggcaagagcagcgtggtggccgccgccctgagcgacagaagagagaacatccacccctacagaaaggagctgcagagagagaagaagaagatgctgcagaccaacctgaaggtgagcggcgccctgtacagagagatcaccctgaaggtggccgaggtgcagctgaagagcgacttcgccgcccagaagctgagcaacctgtag

SEQ ID NO: 27427 - DNA, 2457 bp, Artificial Sequence
  derived and/or modified sequence
atgaccagcaagcaggccatgagcagcaacgagcaggagagactgctgtgctacaacggcgaggtgctggtgttccagctgagcaagggcaacttcgccgacaaggagcccaccaagacccccatcctgcacgtgagaagaatggtgttcgacagaggcaccaaggtgttcgtgcagaagagcaccggcttcttcaccatcaaggaggagaacagccacctgaagatcatgtgctgcaactgcgtgagcgacttcagaaccggcatcaacctgccctacatcgtgatcgagaagaacaagaagaacaacgtgttcgagtacttcctgctgatcctgcacagcaccaacaagttcgagatgagactgagcttcaagctgggctacgagatgaaggacggcctgagagtgctgaacggccccctgatcctgtggagacacgtgaaggccttcttcttcatcagcagccagaccggcaaggtggtgagcgtgagcggcaacttcagcagcatccagtgggccggcgagatcgagaacctgggcatggtgctgctgggcctgaaggagtgctgcctgagcgaggaggagtgcacccaggagcccagcaagagcgactacgccatctggaacaccaagttctgcgtgtacagcctggagagccaggaggtgctgagcgacatctacatcatcccccccgcctacagcagcgtggtgacctacgtgcacatctgcgccaccgagatcatcaagaaccagctgagaatcagcctgatcgccctgaccagaaagaaccagctgatcagcttccagaacggcacccccaagaacgtgtgccagctgcccttcggcgacccctgcgccgtgcagctgatggacagcggcggcggcaacctgttcttcgtggtgagcttcatcagcaacaacgcctgcgccgtgtggaaggagagcttccaggtggccgccaagtgggagaagctgagcctggtgctgatcgacgacttcatcggcagcggcaccgagcaggtgctgctgctgttcaaggacagcctgaacagcgactgcctgaccagcttcaagatcaccgacctgggcaagatcaactacagcagcgagcccagcgactgcaacgaggacgacctgttcgaggacaagcaggagaacagatacctggtggtgccccccctggagaccggcctgaaggtgtgcttcagcagcttcagagagctgagacagcacctgctgctgaaggagaagatcatcagcaagagctacaaggccctgatcaacctggtgcagggcaaggacgacaacaccagcagcgccgaggagaaggagtgcctggtgcccctgtgcggcgaggaggagaacagcgtgcacatcctggacgagaagctgagcgacaacttccaggacagcgagcagctggtggagaagatctggtacagagtgatcgacgacagcctggtggtgggcgtgaagaccaccagcagcctgaagctgagcctgaacgacgtgaccctgagcctgctgatggaccaggcccacgacagcagattcagactgctgaagtgccagaacagagtgatcaagctgagcaccaaccccttccccgccccctacctgatgccctgcgagatcggcctggaggccaagagagtgaccctgacccccgacagcaagaaggaggagagcttcgtgtgcgagcaccccagcaagaaggagtgcgtgcagatcatcaccgccgtgaccagcctgagccccctgctgaccttcagcaagttctgctgcaccgtgctgctgcagatcatggagagagagagcggcaactgccccaaggacagatacgtggtgtgcggcagagtgttcctgagcctggaggacctgagcaccggcaagtacctgctgaccttccccaagaagaagcccatcgagcacatggaggacctgttcgccctgctggccgccttccacaagagctgcttccagatcaccagccccggctacgccctgaacagcatgaaggtgtggctgctggagcacatgaagtgcgagatcatcaaggagttccccgaggtgtacttctgcgagagacccggcagcttctacggcaccctgttcacctggaagcagagaacccccttcgagggcatcctgatcatctacagcagaaaccagaccgtgatgttccagtgcctgcacaacctgatcagaatcctgcccatcaactgcttcctgaagaacctgaagagcggcagcgagaacttcctgatcgacaacatggccttcaccctggagaaggagctggtgaccctgagcagcctgagcagcgccatcgccaagcacgagagcaacttcatgcagagatgcgaggtgagcaagggcaagagcagcgtggtggccgccgccctgagcgacagaagagagaacatccacccctacagaaaggagctgcagagatag

SEQ ID NO: 27428 - protein, 1451 aa, Artificial Sequence
  derived and/or modified sequence
MVSKRRLSKSEDKESLTEDASKTRKQPLSKKTKKSHIANEVEENDSIFVKLLKISGIILKTGESQNQLAVDQIAFQKKLFQTLRRHPSYPKIIEEFVSGLESYIEDEDSFRNCLLSCERLQDEEASMGASYSKSLIKLLLGIDILQPAIIKTLFEKLPEYFFENKNSDEINIPRLIVSQLKWLDRVVDGKDLTTKIMQLISIAPENLQHDIITSLPEILGDSQHADVGKELSDLLIENTSLTVPILDVLSSLRLDPNFLLKVRQLVMDKLSSIRLEDLPVIIKFILHSVTAMDTLEVISELREKLDLQHCVLPSRLQASQVKLKSKGRASSSGNQESSGQSCIILLFDVIKSAIRYEKTISEAWIKAIENTASVSEHKVFDLVMLFIIYSTNTQTKKYIDRVLRNKIRSGCIQEQLLQSTFSVHYLVLKDMCSSILSLAQSLLHSLDQSIISFGSLLYKYAFKFFDTYCQQEVVGALVTHICSGNEAEVDTALDVLLELVVLNPSAMMMNAVFVKGILDYLDNISPQQIRKLFYVLSTLAFSKQNEASSHIQDDMHLVIRKQLSSTVFKYKLIGIIGAVTMAGIMAADRSESPSLTQERANLSDEQCTQVTSLLQLVHSCSEQSPQASALYYDEFANLIQHEKLDPKALEWVGHTICNDFQDAFVVDSCVVPEGDFPFPVKALYGLEEYDTQDGIAINLLPLLFSQDFAKDGGPVTSQESGQKLVSPLCLAPYFRLLRLCVERQHNGNLEEIDGLLDCPIFLTDLEPGEKLESMSAKERSFMCSLIFLTLNWFREIVNAFCQETSPEMKGKVLTRLKHIVELQIILEKYLAVTPDYVPPLGNFDVETLDITPHTVTAISAKIRKKGKIERKQKTDGSKTSSSDTLSEEKNSECDPTPSHRGQLNKEFTGKEEKTSLLLHNSHAFFRELDIEVFSILHCGLVTKFILDTEMHTEATEVVQLGPPELLFLLEDLSQKLESMLTPPIARRVPFLKNKGSRNIGFSHLQQRSAQEIVHCVFQLLTPMCNHLENIHNYFQCLAAENHGVVDGPGVKVQEYHIMSSCYQRLLQIFHGLFAWSGFSQPENQNLLYSALHVLSSRLKQGEHSQPLEELLSQSVHYLQNFHQSIPSFQCALYLIRLLMVILEKSTASAQNKEKIASLARQFLCRVWPSGDKEKSNISNDQLHALLCIYLEHTESILKAIEEIAGVGVPELINSPKDASSSTFPTLTRHTFVVFFRVMMAELEKTVKKIEPGTAADSQQIHEEKLLYWNMAVRDFSILINLIKVFDSHPVLHVCLKYGRLFVEAFLKQCMPLLDFSFRKHREDVLSLLETFQLDTRLLHHLCGHSKIHQDTRLTQHVPLLKKTLELLVCRVKAMLTLNNCREAFWLGNLKNRDLQGEEIKSQNSQESTADESEDDMSSQASKSKATEDGEEDEVSAGEKEQDSDESYDDSD

SEQ ID NO: 27429 - DNA, 5008 bp, Artificial Sequence
  derived and/or modified sequence
ggcctggcgggaaagtcgaaaactacgggcggcgacggcttctcggaagtaatttaagtgcacaagacattggtcaaaatggtttccaaaagaagactgtcaaaatctgaggataaagagagcctgacagaagatgcctccaaaaccaggaagcaaccactttccaaaaagacaaagaaatctcatattgctaatgaagttgaagaaaatgacagcatctttgtaaagcttcttaagatatcaggaattattcttaaaacgggagagagtcagaatcaactagctgtggatcaaatagctttccaaaagaagctctttcagaccctgaggagacacccttcctatcccaaaataatagaagaatttgttagtggcctggagtcttacattgaggatgaagacagtttcaggaactgccttttgtcttgtgagcgtctgcaggatgaggaagccagtatgggtgcatcttattctaagagtctcatcaaactgcttctggggattgacatactgcagcctgccattatcaaaaccttatttgagaagttgccagaatatttttttgaaaacaagaacagtgatgaaatcaacatacctcgactcattgtcagtcaactaaaatggcttgacagagttgtggatggcaaggacctcaccaccaagatcatgcagctgatcagtattgctccagagaacctgcagcatgacatcatcaccagcctacctgagatcctaggggattcccagcacgctgatgtggggaaagaactcagtgacctactgatagagaatacttcactcactgtcccaatcctggatgtcctttcaagcctccgacttgacccaaacttcctattgaaggttcgccagttggtgatggataagttgtcgtctattagattggaggatttacctgtgataataaagttcattcttcattccgtaacagccatggatacacttgaggtaatttctgagcttcgggagaagttggatctgcagcattgtgttttgccatcacggttacaggcttcccaagtaaagttgaaaagtaaaggacgagcaagttcctcaggaaatcaagaaagcagcggtcagagctgtattattctcctctttgatgtaataaagtcagctattagatatgagaaaaccatttcagaagcctggattaaggcaattgaaaacactgcctcagtatctgaacacaaggtgtttgacctggtgatgcttttcatcatctatagcaccaatactcagacaaagaagtacattgacagggtgctaagaaataagattcgatcaggctgcattcaagaacagctgctccagagtacattctctgttcattacttagttcttaaggatatgtgttcatccattctgtcgctggctcagagtttgcttcactctctagaccagagtataatttcatttggcagtctcctatacaaatatgcatttaagttttttgacacgtactgccagcaggaagtggttggtgccttagtgacccatatctgcagtgggaatgaagctgaagttgatactgccttagatgtccttctagagttggtagtgttaaacccatctgctatgatgatgaatgctgtctttgtaaagggcattttagattatctggataacatatcccctcagcaaatacgaaaactcttctatgttctcagcacactggcatttagcaaacagaatgaagccagcagccacatccaggatgacatgcacttggtgataagaaagcagctctctagcaccgtattcaagtacaagctcattgggattattggtgctgtgaccatggctggcatcatggcggcagacagaagtgaatcacctagtttgacccaagagagagccaacctgagcgatgagcagtgcacacaggtgacctccttgttgcagttggttcattcctgcagtgagcagtctcctcaggcctctgcactttactatgatgaatttgccaacctgatccaacatgaaaagctggatccaaaagccctggaatgggttgggcataccatctgtaatgatttccaggatgccttcgtagtggactcctgtgttgttccggaaggtgactttccatttcctgtgaaagcactgtacggactggaagaatacgacactcaggatgggattgccataaacctcctgccgctgctgttttctcaggactttgcaaaagatgggggtccggtgacctcacaggaatcaggccaaaaattggtgtctccgctgtgcctggctccgtatttccggttactgagactttgtgtggagagacagcataacggaaacttggaggagattgatggtctactagattgtcctatattcctaactgacctggagcctggagagaagttggagtccatgtctgctaaagagcgttcattcatgtgttctctcatatttcttactctcaactggttccgagagattgtaaatgccttctgccaggaaacatcacctgagatgaaggggaaggtgctcactcggttaaagcacattgtagaattgcaaataatcctggaaaagtacttggcagtcaccccagactatgtccctcctcttggaaactttgatgtggaaactttagatataacacctcatactgttactgctatttcagcaaaaatcagaaagaaaggaaaaatagaaaggaaacaaaaaacagatggcagcaagacatcctcctctgacacactttcagaagagaaaaattcagaatgtgaccctacgccatctcatagaggccagctaaacaaggagttcacagggaaggaagaaaagacatcattgttactacataattcccatgcttttttccgagagctggacattgaggtcttctctattctacattgtggacttgtgacgaagttcatcttagatactgaaatgcacactgaagctacagaagttgtgcaacttgggccccctgagctgcttttcttgctggaagatctctcccagaagctggagagtatgctgacacctcctattgccaggagagtcccctttctcaagaacaaaggaagccggaatattggattctcacatctccaacagagatctgcccaagaaattgttcattgtgtttttcaactgctgaccccaatgtgtaaccacctggagaacattcacaactattttcagtgtttagctgctgagaatcacggtgtagttgatggaccaggagtgaaagttcaggagtaccacataatgtcttcctgctatcagaggctgctgcagatttttcatgggctttttgcttggagtggattttctcaacctgaaaatcagaatttactgtattcagccctccatgtccttagtagccgactgaaacagggagaacacagccagcctttggaggaactactcagccagagcgtccattacttgcagaatttccatcaaagcattcccagtttccagtgtgctctttatctcatcagacttttgatggttattttggagaaatcaacagcttctgctcagaacaaagaaaaaattgcttcccttgccagacaattcctctgtcgggtgtggccaagtggggataaagagaagagcaacatctctaatgaccagctccatgctctgctctgtatctacctggagcacacagagagcattctgaaggccatagaggagattgctggtgttggtgtcccagaactgatcaactctcctaaagatgcatcttcctccacattccctacactgaccagattcatgaagagaaactcctctactggaacatggctgttcgagacttcagtatcctcatcaacttgataaaggtatttgatagtcatcctgttctgcatgtatgtttgaagtatgggcgtctctttgtggaagcatttctgaagcaatgtatgccgctcctagacttcagttttagaaaacaccgggaagatgttctgagcttactggaaaccttccagttggacacaaggctgcttcatcacctgtgtgggcattccaagattcaccaggacacgagactcacccaacatgtgcctctgctcaaaaagaccctggaacttttagtttgcagagtcaaagctatgctcactctcaacaattgtagagaggctttctggctgggcaatctaaaaaaccgggacttgcagggtgaagagattaagtcccaaaattcccaggagagcacagcagatgagagtgaggatgacatgtcatcccaggcctccaagagcaaagccactgaggatggtgaagaagacgaagtaagtgctggagaaaaggagcaagatagtgatgagagttatgatgactctgattagaccccagataaattgttgcctgcttctgtgtctctgccagcctgtgatcattttgtgttagagtttgaaatccgctgtttgcctttcttactggtaggatccttttttgttcctctttttttttttttttttttttttttaaagacggggactcgctgtgtttcccaggctggagtgcagtgctgcaatcttggctcactgcaacctccatctcctaggttcaagcgattctcctgcctcagcctcctgagtagctgggacgacaggcacatgccaccatgcccagctaatttttgtatttttagtagatacggggttttaccatgtcggccagatggtctcaatctcctgaactcatgatccacctgcctcagcctcccaaagtgctgggattacaggcatgagccaccgctcccagccatattttgttcttaaagtggggtctttattaacttgtggacatcatggattgtctaacaccatcacagtccctggctcaggattctaatgtagcattatttattggtttggataaacccagctgtgctacactgcagagtaaaatctctgagtcatgattctggactttgggagctagttttgaaactctgatttattgtagaacttaggcttgtaccaattttacaaataaattctgttctaagttc

SEQ ID NO: 27430 - DNA, 5102 bp, Artificial Sequence
  derived and/or modified sequence
ggcctggcgggaaagtcgaaaactacgggcggcgacggcttctcggaagtaatttaagtgcacaagacattggtcaaaatggtttccaaaagaagactgtcaaaatctgaggataaagagagcctgacagaagatgcctccaaaaccaggaagcaaccactttccaaaaagacaaagaaatctcatattgctaatgaagttgaagaaaatgacagcatctttgtaaagcttcttaagatatcaggaattattcttaaaacgggagagagtcagaatcaactagctgtggatcaaatagctttccaaaagaagctctttcagaccctgaggagacacccttcctatcccaaaataatagaagaatttgttagtggcctggagtcttacattgaggatgaagacagtttcaggaactgccttttgtcttgtgagcgtctgcaggatgaggaagccagtatgggtgcatcttattctaagagtctcatcaaactgcttctggggattgacatactgcagcctgccattatcaaaaccttatttgagaagttgccagaatatttttttgaaaacaagaacagtgatgaaatcaacatacctcgactcattgtcagtcaactaaaatggcttgacagagttgtggatggcaaggacctcaccaccaagatcatgcagctgatcagtattgctccagagaacctgcagcatgacatcatcaccagcctacctgagatcctaggggattcccagcacgctgatgtggggaaagaactcagtgacctactgatagagaatacttcactcactgtcccaatcctggatgtcctttcaagcctccgacttgacccaaacttcctattgaaggttcgccagttggtgatggataagttgtcgtctattagattggaggatttacctgtgataataaagttcattcttcattccgtaacagccatggatacacttgaggtaatttctgagcttcgggagaagttggatctgcagcattgtgttttgccatcacggttacaggcttcccaagtaaagttgaaaagtaaaggacgagcaagttcctcaggaaatcaagaaagcagcggtcagagctgtattattctcctctttgatgtaataaagtcagctattagatatgagaaaaccatttcagaagcctggattaaggcaattgaaaacactgcctcagtatctgaacacaaggtgtttgacctggtgatgcttttcatcatctatagcaccaatactcagacaaagaagtacattgacagggtgctaagaaataagattcgatcaggctgcattcaagaacagctgctccagagtacattctctgttcattacttagttcttaaggatatgtgttcatccattctgtcgctggctcagagtttgcttcactctctagaccagagtataatttcatttggcagtctcctatacaaatatgcatttaagttttttgacacgtactgccagcaggaagtggttggtgccttagtgacccatatctgcagtgggaatgaagctgaagttgatactgccttagatgtccttctagagttggtagtgttaaacccatctgctatgatgatgaatgctgtctttgtaaagggcattttagattatctggataacatatcccctcagcaaatacgaaaactcttctatgttctcagcacactggcatttagcaaacagaatgaagccagcagccacatccaggatgacatgcacttggtgataagaaagcagctctctagcaccgtattcaagtacaagctcattgggattattggtgctgtgaccatggctggcatcatggcggcagacagaagtgaatcacctagtttgacccaagagagagccaacctgagcgatgagcagtgcacacaggtgacctccttgttgcagttggttcattcctgcagtgagcagtctcctcaggcctctgcactttactatgatgaatttgccaacctgatccaacatgaaaagctggatccaaaagccctggaatgggttgggcataccatctgtaatgatttccaggatgccttcgtagtggactcctgtgttgttccggaaggtgactttccatttcctgtgaaagcactgtacggactggaagaatacgacactcaggatgggattgccataaacctcctgccgctgctgttttctcaggactttgcaaaagatgggggtccggtgacctcacaggaatcaggccaaaaattggtgtctccgctgtgcctggctccgtatttccggttactgagactttgtgtggagagacagcataacggaaacttggaggagattgatggtctactagattgtcctatattcctaactgacctggagcctggagagaagttggagtccatgtctgctaaagagcgttcattcatgtgttctctcatatttcttactctcaactggttccgagagattgtaaatgccttctgccaggaaacatcacctgagatgaaggggaaggtgctcactcggttaaagcacattgtagaattgcaaataatcctggaaaagtacttggcagtcaccccagactatgtccctcctcttggaaactttgatgtggaaactttagatataacacctcatactgttactgctatttcagcaaaaatcagaaagaaaggaaaaatagaaaggaaacaaaaaacagatggcagcaagacatcctcctctgacacactttcagaagagaaaaattcagaatgtgaccctacgccatctcatagaggccagctaaacaaggagttcacagggaaggaagaaaagacatcattgttactacataattcccatgcttttttccgagagctggacattgaggtcttctctattctacattgtggacttgtgacgaagttcatcttagatactgaaatgcacactgaagctacagaagttgtgcaacttgggccccctgagctgcttttcttgctggaagatctctcccagaagctggagagtatgctgacacctcctattgccaggagagtcccctttctcaagaacaaaggaagccggaatattggattctcacatctccaacagagatctgcccaagaaattgttcattgtgtttttcaactgctgaccccaatgtgtaaccacctggagaacattcacaactattttcagtgtttagctgctgagaatcacggtgtagttgatggaccaggagtgaaagttcaggagtaccacataatgtcttcctgctatcagaggctgctgcagatttttcatgggctttttgcttggagtggattttctcaacctgaaaatcagaatttactgtattcagccctccatgtccttagtagccgactgaaacagggagaacacagccagcctttggaggaactactcagccagagcgtccattacttgcagaatttccatcaaagcattcccagtttccagtgtgctctttatctcatcagacttttgatggttattttggagaaatcaacagcttctgctcagaacaaagaaaaaattgcttcccttgccagacaattcctctgtcgggtgtggccaagtggggataaagagaagagcaacatctctaatgaccagctccatgctctgctctgtatctacctggagcacacagagagcattctgaaggccatagaggagattgctggtgttggtgtcccagaactgatcaactctcctaaagatgcatcttcctccacattccctacactgaccaggcatacttttgttgttttcttccgtgtgatgatggctgaactagagaagacggtgaaaaaaattgagcctggcacagcagcagactcgcagcagattcatgaagagaaactcctctactggaacatggctgttcgagacttcagtatcctcatcaacttgataaaggtatttgatagtcatcctgttctgcatgtatgtttgaagtatgggcgtctctttgtggaagcatttctgaagcaatgtatgccgctcctagacttcagttttagaaaacaccgggaagatgttctgagcttactggaaaccttccagttggacacaaggctgcttcatcacctgtgtgggcattccaagattcaccaggacacgagactcacccaacatgtgcctctgctcaaaaagaccctggaacttttagtttgcagagtcaaagctatgctcactctcaacaattgtagagaggctttctggctgggcaatctaaaaaaccgggacttgcagggtgaagagattaagtcccaaaattcccaggagagcacagcagatgagagtgaggatgacatgtcatcccaggcctccaagagcaaagccactgaggatggtgaagaagacgaagtaagtgctggagaaaaggagcaagatagtgatgagagttatgatgactctgattagaccccagataaattgttgcctgcttctgtgtctctgccagcctgtgatcattttgtgttagagtttgaaatccgctgtttgcctttcttactggtaggatccttttttgttcctctttttttttttttttttttttttttaaagacggggactcgctgtgtttcccaggctggagtgcagtgctgcaatcttggctcactgcaacctccatctcctaggttcaagcgattctcctgcctcagcctcctgagtagctgggacgacaggcacatgccaccatgcccagctaatttttgtatttttagtagatacggggttttaccatgtcggccagatggtctcaatctcctgaactcatgatccacctgcctcagcctcccaaagtgctgggattacaggcatgagccaccgctcccagccatattttgttcttaaagtggggtctttattaacttgtggacatcatggattgtctaacaccatcacagtccctggctcaggattctaatgtagcattatttattggtttggataaacccagctgtgctacactgcagagtaaaatctctgagtcatgattctggactttgggagctagttttgaaactctgatttattgtagaacttaggcttgtaccaattttacaaataaattctgttctaagttc

SEQ ID NO: 27431 - DNA, 5185 bp, Artificial Sequence
  derived and/or modified sequence
gtctctcgaggccccgctcccctgcggcctaatctctaagtccgggccgcggtcggcgttctcctctggggctccgcgccccgaaccttggcttcctcatctgccctgagatgggataatccccacaggaagtaatttaagtgcacaagacattggtcaaaatggtttccaaaagaagactgtcaaaatctgaggataaagagagcctgacagaagatgcctccaaaaccaggaagcaaccactttccaaaaagacaaagaaatctcatattgctaatgaagttgaagaaaatgacagcatctttgtaaagcttcttaagatatcaggaattattcttaaaacgggagagagtcagaatcaactagctgtggatcaaatagctttccaaaagaagctctttcagaccctgaggagacacccttcctatcccaaaataatagaagaatttgttagtggcctggagtcttacattgaggatgaagacagtttcaggaactgccttttgtcttgtgagcgtctgcaggatgaggaagccagtatgggtgcatcttattctaagagtctcatcaaactgcttctggggattgacatactgcagcctgccattatcaaaaccttatttgagaagttgccagaatatttttttgaaaacaagaacagtgatgaaatcaacatacctcgactcattgtcagtcaactaaaatggcttgacagagttgtggatggcaaggacctcaccaccaagatcatgcagctgatcagtattgctccagagaacctgcagcatgacatcatcaccagcctacctgagatcctaggggattcccagcacgctgatgtggggaaagaactcagtgacctactgatagagaatacttcactcactgtcccaatcctggatgtcctttcaagcctccgacttgacccaaacttcctattgaaggttcgccagttggtgatggataagttgtcgtctattagattggaggatttacctgtgataataaagttcattcttcattccgtaacagccatggatacacttgaggtaatttctgagcttcgggagaagttggatctgcagcattgtgttttgccatcacggttacaggcttcccaagtaaagttgaaaagtaaaggacgagcaagttcctcaggaaatcaagaaagcagcggtcagagctgtattattctcctctttgatgtaataaagtcagctattagatatgagaaaaccatttcagaagcctggattaaggcaattgaaaacactgcctcagtatctgaacacaaggtgtttgacctggtgatgcttttcatcatctatagcaccaatactcagacaaagaagtacattgacagggtgctaagaaataagattcgatcaggctgcattcaagaacagctgctccagagtacattctctgttcattacttagttcttaaggatatgtgttcatccattctgtcgctggctcagagtttgcttcactctctagaccagagtataatttcatttggcagtctcctatacaaatatgcatttaagttttttgacacgtactgccagcaggaagtggttggtgccttagtgacccatatctgcagtgggaatgaagctgaagttgatactgccttagatgtccttctagagttggtagtgttaaacccatctgctatgatgatgaatgctgtctttgtaaagggcattttagattatctggataacatatcccctcagcaaatacgaaaactcttctatgttctcagcacactggcatttagcaaacagaatgaagccagcagccacatccaggatgacatgcacttggtgataagaaagcagctctctagcaccgtattcaagtacaagctcattgggattattggtgctgtgaccatggctggcatcatggcggcagacagaagtgaatcacctagtttgacccaagagagagccaacctgagcgatgagcagtgcacacaggtgacctccttgttgcagttggttcattcctgcagtgagcagtctcctcaggcctctgcactttactatgatgaatttgccaacctgatccaacatgaaaagctggatccaaaagccctggaatgggttgggcataccatctgtaatgatttccaggatgccttcgtagtggactcctgtgttgttccggaaggtgactttccatttcctgtgaaagcactgtacggactggaagaatacgacactcaggatgggattgccataaacctcctgccgctgctgttttctcaggactttgcaaaagatgggggtccggtgacctcacaggaatcaggccaaaaattggtgtctccgctgtgcctggctccgtatttccggttactgagactttgtgtggagagacagcataacggaaacttggaggagattgatggtctactagattgtcctatattcctaactgacctggagcctggagagaagttggagtccatgtctgctaaagagcgttcattcatgtgttctctcatatttcttactctcaactggttccgagagattgtaaatgccttctgccaggaaacatcacctgagatgaaggggaaggtgctcactcggttaaagcacattgtagaattgcaaataatcctggaaaagtacttggcagtcaccccagactatgtccctcctcttggaaactttgatgtggaaactttagatataacacctcatactgttactgctatttcagcaaaaatcagaaagaaaggaaaaatagaaaggaaacaaaaaacagatggcagcaagacatcctcctctgacacactttcagaagagaaaaattcagaatgtgaccctacgccatctcatagaggccagctaaacaaggagttcacagggaaggaagaaaagacatcattgttactacataattcccatgcttttttccgagagctggacattgaggtcttctctattctacattgtggacttgtgacgaagttcatcttagatactgaaatgcacactgaagctacagaagttgtgcaacttgggccccctgagctgcttttcttgctggaagatctctcccagaagctggagagtatgctgacacctcctattgccaggagagtcccctttctcaagaacaaaggaagccggaatattggattctcacatctccaacagagatctgcccaagaaattgttcattgtgtttttcaactgctgaccccaatgtgtaaccacctggagaacattcacaactattttcagtgtttagctgctgagaatcacggtgtagttgatggaccaggagtgaaagttcaggagtaccacataatgtcttcctgctatcagaggctgctgcagatttttcatgggctttttgcttggagtggattttctcaacctgaaaatcagaatttactgtattcagccctccatgtccttagtagccgactgaaacagggagaacacagccagcctttggaggaactactcagccagagcgtccattacttgcagaatttccatcaaagcattcccagtttccagtgtgctctttatctcatcagacttttgatggttattttggagaaatcaacagcttctgctcagaacaaagaaaaaattgcttcccttgccagacaattcctctgtcgggtgtggccaagtggggataaagagaagagcaacatctctaatgaccagctccatgctctgctctgtatctacctggagcacacagagagcattctgaaggccatagaggagattgctggtgttggtgtcccagaactgatcaactctcctaaagatgcatcttcctccacattccctacactgaccaggcatacttttgttgttttcttccgtgtgatgatggctgaactagagaagacggtgaaaaaaattgagcctggcacagcagcagactcgcagcagattcatgaagagaaactcctctactggaacatggctgttcgagacttcagtatcctcatcaacttgataaaggtatttgatagtcatcctgttctgcatgtatgtttgaagtatgggcgtctctttgtggaagcatttctgaagcaatgtatgccgctcctagacttcagttttagaaaacaccgggaagatgttctgagcttactggaaaccttccagttggacacaaggctgcttcatcacctgtgtgggcattccaagattcaccaggacacgagactcacccaacatgtgcctctgctcaaaaagaccctggaacttttagtttgcagagtcaaagctatgctcactctcaacaattgtagagaggctttctggctgggcaatctaaaaaaccgggacttgcagggtgaagagattaagtcccaaaattcccaggagagcacagcagatgagagtgaggatgacatgtcatcccaggcctccaagagcaaagccactgaggatggtgaagaagacgaagtaagtgctggagaaaaggagcaagatagtgatgagagttatgatgactctgattagaccccagataaattgttgcctgcttctgtgtctctgccagcctgtgatcattttgtgttagagtttgaaatccgctgtttgcctttcttactggtaggatccttttttgttcctctttttttttttttttttttttttttaaagacggggactcgctgtgtttcccaggctggagtgcagtgctgcaatcttggctcactgcaacctccatctcctaggttcaagcgattctcctgcctcagcctcctgagtagctgggacgacaggcacatgccaccatgcccagctaatttttgtatttttagtagatacggggttttaccatgtcggccagatggtctcaatctcctgaactcatgatccacctgcctcagcctcccaaagtgctgggattacaggcatgagccaccgctcccagccatattttgttcttaaagtggggtctttattaacttgtggacatcatggattgtctaacaccatcacagtccctggctcaggattctaatgtagcattatttattggtttggataaacccagctgtgctacactgcagagtaaaatctctgagtcatgattctggactttgggagctagttttgaaactctgatttattgtagaacttaggcttgtaccaattttacaaataaattctgttctaagttc

SEQ ID NO: 27432 - DNA, 3750 bp, Artificial Sequence
  derived and/or modified sequence
atggtgtcaaagaggcgcctgtcaaagagcgaggacaaagagtctctaaccgaagatgcctcaaagaccagaaaacagcccctgagtaaaaaaactaaaaaatcccacatcgcaaacgaagtcgaggagaatgattctatcttcgttaaactgcttaaaatcagtgggataatcctgaaaacaggcgagagccagaaccagctcgcagttgaccagatcgcctttcagaagaaactgtttcagaccctgcggcggcatccatcgtacccgaaaataattgaggagttcgttagcggtctggaatcatatatagaagatgaagattcgttccggaattgcttactgagttgcgagagactccaggacgaggaggcgagtatgggagcttcctacagcaagtctcttataaagctcctgctcgggattgatattctgcagcctgctatcatcaagactctgttcgaaaagctgcccgaatacttctttgagaataagaattcagacgaaatcaatattccacgacttatcgtaagccaattaaagtggctagaccgagttgtggatggcaaagacctgaccactaaaattatgcagttgatatccatagcacctgagaatctccagcacgatataatcactagtttacctgagatcttgggggacagccagcatgctgatgtgggaaaggagttatccgatctgctcatcgagaatacaagcctaacagtccccatattggatgtacttagttccttacgccttgaccccaattttctgctaaaggtgcgccaactggtcatggataaacttagctcaataaggctcgaggaccttcccgtcatcatcaaatttattttacactctgtgaccgctatggacactctggaggtgatctccgaactcagagagaagctggacctgcaacattgcgtgttaccatcccgactgcaagccagccaggtcaagctgaagagcaagggtcgtgcctctagtagcggaaatcaggagtcgagcggacaatcctgtatcatactgttgtttgacgtcattaaaagcgctattcggtatgagaagacaatctctgaagcgtggatcaaagccatcgaaaacacggcctccgtgagcgagcacaaagttttcgatctggtaatgctctttattatttattcaacaaatacacagacgaaaaagtacattgaccgagtgctgcgcaacaagattaggagtggttgcattcaggaacagttgctgcagtctaccttctccgtgcattacctcgtactgaaggatatgtgttcctctattctatcactggctcaatctctgctgcactccttggaccagagcattatttccttcggttctctgctgtacaagtacgcttttaagttcttcgacacttattgccaacaggaggtcgtcggggcccttgtcactcacatatgctcagggaatgaagcagaggtggacacggccttagatgtattgctagaattggtcgtgctaaatccatccgccatgatgatgaatgctgtttttgtgaagggaattctagactacctggacaacatttccccccaacaaattcggaagctcttttacgtgctgtccacacttgctttctctaaacaaaacgaggcgtccagccacattcaggatgacatgcacctggtgatccgtaagcagctgtcatccacagtgtttaagtacaaactcattgggataattggggctgtaacaatggcaggaattatggctgccgataggagtgagagcccaagcctaacgcaggagcgcgccaatctctcagacgagcagtgtacacaggtgacctctctcctgcagctcgtgcactcttgttccgaacaatcgccccaggctagcgccttatactatgacgaattcgcaaacttgatccagcacgagaaactggatccaaaggcactggaatgggttgggcacacaatctgtaacgactttcaggacgctttcgttgtggactcatgtgttgtgcccgagggagattttcccttccccgtgaaagcgctgtatggcttagaggaatacgacacacaggacggtatcgccattaacctgctgcccttactcttctcccaggactttgccaaagatggcggaccggtaacgtcccaggaaagcgggcagaagctcgtttcccccctgtgcttggccccctatttccggctactaaggctgtgtgtcgagcgccagcacaatgggaatctggaggaaatagacggcctgctcgattgcccaatattcttaactgacctggaacctggcgagaagctggagtccatgagtgccaaggaaaggagttttatgtgttctctgatctttttgaccctcaactggttcagggaaatcgtcaacgctttttgtcaggaaacaagccctgaaatgaagggtaaagtgctcacccgcttgaagcacatcgtcgagctccagatcatactggagaagtacctagctgtgactcctgattatgtgcccccactgggcaactttgacgtggaaaccttggatatcactccccacactgtgacggctatatctgcgaagattcggaaaaaggggaagatcgagaggaagcaaaaaactgacgggagtaagacctccagttcagacacactctcggaggaaaaaaactctgaatgcgacccgactccttcccatagagggcaactgaacaaggaattcactgggaaggaggaaaagacttccctgctcctccacaatagccacgccttcttccgcgagcttgatatagaggtttttagtattcttcactgtggcttagtgactaagttcatcctcgacaccgaaatgcacactgaggccacagaggttgtccagttaggacctccagaattactgttcttactggaggatttgtcacagaaactggagagcatgttgacccctcccatcgcccggcgcgtgccattcctgaaaaataagggaagtcgaaatataggtttttcgcacttgcagcaacgatcagcacaggagatcgtgcactgtgtgtttcaactgctgacccctatgtgcaaccatctggaaaacattcacaactatttccagtgtctggcagccgagaatcacggtgtcgttgatggtccgggggtgaaggtacaggagtatcatataatgtcaagttgttaccagcgattgctgcaaatttttcacggcttgtttgcatggagtggcttctctcagccagagaatcagaatcttttgtatagtgcactccacgtgctttcatcacggctcaagcaaggggagcacagccagcccctggaggagctcctttctcaatccgtgcactatctgcagaactttcatcaatctattccgagtttccagtgcgctctgtacctcatccgcctgctgatggtgatcttagaaaagtccacagcatccgcccagaacaaggaaaagatagctagcctggcaagacagttcctgtgccgtgtatggccctcaggcgacaaggaaaaaagtaacatttccaacgaccagctgcatgctttactgtgtatttacctggagcacacagagtcaatactcaaggcaatagaggaaatagcaggcgtgggggtacccgaactcatcaacagccctaaagacgccagctccagtacttttcccaccttgactcggtttatgaagcggaatagttcgactggcacctggctttttgaaacatctgtgtcgtccagcacctag

SEQ ID NO: 27433 - DNA, 4356 bp, Artificial Sequence
  derived and/or modified sequence
atggttagcaaacgcaggctcagtaaatcagaggataaggagtctcttacggaggatgcaagcaagacaagaaaacagcctctctccaaaaaaaccaaaaaatcccacattgctaatgaggttgaagagaacgactctatattcgtgaagttacttaaaatttctggcattattctgaaaacaggcgagtcgcagaaccagctggccgtggatcagatcgcattccagaaaaagctgttccaaactctgcgaagacacccatcttatcctaaaatcattgaagaattcgtgtccggactggaatcatatattgaagatgaggactcttttcggaattgtctactgagctgtgagaggctccaagacgaggaggcctcaatgggagcaagctacagcaaatcattgattaaactactgcttggtattgatatcttacagcccgctatcatcaaaaccctgtttgaaaagttgccagaatatttcttcgagaataagaatagtgatgagatcaacataccaaggctcatcgtgtctcagttaaaatggttagatcgcgtggtcgatggaaaggatctgacaaccaaaattatgcagctcattagcattgcccccgaaaatctccaacacgacattataactagccttccagagattcttggcgacagccagcacgccgacgttggaaaggagctgtcagatctcctgatcgagaacacaagcttgacagtacctattctcgacgtgctgtcctccctcaggctggatcctaattttcttttgaaggtcaggcaactggtgatggacaagctttctagcatccggcttgaggatctgcctgtgattatcaagtttatcctccatagcgtgactgccatggacacactagaggtaatcagtgagcttcgcgaaaagctggacctgcaacactgcgtcctcccgtccagactccaagctagccaggtcaagctgaagagcaaaggtcgcgctagttcaagcggtaatcaagagtctagtggccagtcctgtattattcttctatttgatgtgatcaagagcgctatacgctatgagaaaacaatcagtgaagcctggattaaggcaattgagaacacggccagtgtgagtgagcacaaagtgtttgatctggtgatgttgtttatcatctactctaccaacacgcagactaaaaaatacatcgatagggtgttgcgtaacaagatacgtagcgggtgcatccaggaacaattactccagtccacgttctccgtgcactacctcgtgctgaaagacatgtgtagtagcattctctcgcttgctcaatctctgttgcactccctggatcagagcatcattagtttcggctctttgctttacaaatatgcgtttaaattcttcgacacttactgtcagcaggaggtggtgggtgccttggtgactcatatatgctcagggaatgaggccgaagtggacaccgccctcgatgtcctgctggaactggtagtgctcaaccctagtgctatgatgatgaacgctgtgtttgtgaagggtatcctcgactacctggacaatatcagccctcagcaaatcagaaaactgttttatgtcttgagcacccttgcattctccaaacagaatgaggcctcctctcacattcaagacgacatgcatttggtaatccgcaagcagctgtcgagcaccgtttttaaatacaagcttatcggcatcattggcgcggtcaccatggctggtatcatggccgccgacagatccgaatctccttccctaacacaggaacgtgccaatctctcagatgagcagtgcacccaggttactagtctactacaactggtccactcctgctccgaacagtcacctcaggcatccgcactgtattacgatgagttcgcaaatcttatacagcacgaaaaactggaccccaaagcgctggaatgggtcggacataccatctgcaacgattttcaggatgccttcgtggtggacagctgtgtagtccccgagggagattttccgtttcctgtcaaagccttgtatggtttggaggaatatgatacacaggatggaattgctatcaacctgttgccactcctgttttctcaggactttgcaaaagacggcggccccgttacatcccaggagtctggccagaagctggtgtcacccctgtgtctggctccgtactttcggttactgcggctatgcgttgagcgtcagcataatggcaacctggaggagattgatgggctgctcgactgccctatatttctgacagacctggagcctggtgaaaagttggaatctatgagcgccaaggagcgcagctttatgtgctccctgattttcttaactcttaattggtttcgcgaaatcgtcaatgcattttgtcaggaaacctctccagaaatgaaaggcaaggtgttgacccggctcaaacacatagttgagttgcagatcatcctcgaaaaatacctcgcagtcacccctgactatgtcccccccctcggtaactttgatgtggaaacacttgatattacccctcacactgtgacagcgataagcgcgaagattagaaagaaaggtaagatcgaacggaaacagaagacggacgggtccaagactagcagttctgacacgctgtcagaagaaaaaaactctgaatgtgatccgacaccatcacaccggggccagctcaataaagaattcaccggaaaggaggagaagacgtccctcctcctccacaactcacacgctttctttcgagagctggacatcgaggtgttctcaatcctgcattgcggcttagtgaccaaattcattttggatacagaaatgcacaccgaagccacagaggtagtgcaactcggccccccagaactcctgttcttgctggaggatttgagtcaaaagctcgagagtatgctcacccctccaattgctaggcgcgttcctttcttgaaaaacaagggtagtagaaacatcggattcagccacctgcaacagaggtcggcacaagaaattgtgcactgcgtgttccaattgcttaccccgatgtgtaatcatcttgagaacattcataactactttcagtgcctggccgccgagaatcacggggtcgttgatgggcctggcgttaaggtccaagaatatcatatcatgtccagctgttaccaacgcctcctgcagatatttcatggcttatttgcgtggtcaggcttttcccaacccgaaaaccagaatctactttacagtgctttacacgtcctaagtagtcgccttaagcagggggagcattctcagccactagaagagttgctgtcccagagcgttcactatttacaaaatttccatcaatcgatccccagcttccagtgcgccctgtacctaatacgactactaatggtgatcttggagaaaagtactgccagtgctcagaataaggagaagattgccagcctggccagacagtttctgtgccgggtttggccctccggggacaaagaaaaatccaatatttccaatgatcaactgcatgcactgctctgcatttacctagagcataccgagtcgattcttaaagccatcgaagaaatcgcgggtgtgggcgtgcctgagctcataaattctcccaaggatgcgtcctccagtacattcccaacccttacgcgacatacattcgtggtgttcttcagagtgatgatggctgagcttgagaaaaccgtgaagaagatcgagcccggcacggctgccgatagccagcagatccatgaagagaagttgctctactggaacatggccgtaagagacttttctatcttaatcaacctgattaaagtcttcgacagccatccagttttgcacgtgtgcctgaaatatggtaggttgtttgtggaggcattcctgaaacagtgcatgcctctgctggatttttccttcaggaagcaccgtgaggatgttctgtctttactggagacatttcagctggacactcgactgcttcatcacctgtgcggtcattcgaagattcatcaggataccagactgactcagcacgtgcccttactgaaaaaaacattggagttgctcgtctgcagagtgaaggctatgctcaccttgaataattgccgggaggccttctggctaggcaatctcaagaacagagacctccagggggaagagatcaagtctcagaactcccaggagtccaccgcagatgaaagtgaagatgacatgtcaagccaggctagcaagagtaaggcgacagaagatggcgaggaggacgaggtgtccgccggtgagaaggagcaggactcggacgagagctatgacgactccgattag

SEQ ID NO: 27434 - DNA, 4356 bp, Artificial Sequence
  derived and/or modified sequence
atggtgtctaagaggaggttgagcaagagtgaagacaaggaaagcctcactgaggatgcctcaaagactcgtaagcagcctctctctaagaagaccaaaaaaagtcatattgcgaatgaggttgaagaaaatgattccattttcgttaagttgctcaaaatcagcggaattatactcaagactggcgaatcccaaaatcagttggcagtggaccagatcgcttttcaaaaaaagctctttcaaactctgcgtcggcatccctcctacccaaaaatcatcgaggagtttgtatcgggcctggaaagttacatcgaagacgaagattcatttaggaattgcttgttgagctgtgaacgccttcaggacgaagaggccagtatgggcgctagttacagcaagtcactgatcaagctgctgctcggaattgacattctgcagccagcaataatcaagacactgttcgaaaagctccccgaatacttttttgaaaacaagaattctgatgagatcaacattcccagactcatcgtgtcacagctcaagtggcttgaccgggtggtggatgggaaggatcttaccaccaagattatgcagcttatcagtattgcaccggagaatcttcagcacgatatcattacatccctgcctgagatactaggagacagccaacatgcagatgtgggcaaagagttgtcggaccttttaatcgagaataccagtctgacagtcccaattcttgatgtacttagctcgctgcggctcgatcccaattttctgctaaaagtgaggcagttggtaatggacaagctgagctctatccggctggaagatctgcctgtgataatcaaattcattctgcacagcgtgaccgcgatggacactttggaggtgatttcagagctgcgggaaaagctcgatctgcaacactgcgtgctgcctagtagactgcaggcctctcaggttaaacttaagagcaagggtagggcatcgtcttcaggcaatcaggagagcagcggacagagttgcataatcctgttgttcgacgtcatcaagtctgctatcagatatgagaagacaatctcggaggcctggataaaagccatcgaaaacactgcgtctgtgtctgaacataaagtcttcgatttagtgatgctgttcattatatatagtactaatactcagacaaaaaaatacattgaccgtgtactcaggaacaagattcgcagtggctgcattcaagaacagctcttgcagtcaacattcagtgtgcactatctagtcctgaaagatatgtgttcctctatattatctctggcccaatccctgctgcactccctcgaccagagtatcatcagcttcggttctctgctgtacaagtacgctttcaagtttttcgacacttattgtcagcaggaggtggtgggtgctctcgtaacacacatctgttctggcaacgaagctgaggtggacaccgccctcgatgtgctgctcgaactggttgtcctaaacccttccgcaatgatgatgaacgcagtgtttgtaaagggaatcctggactacctggacaacatttcaccccagcaaatacgtaagttgttttacgtgttgagtaccctcgcatttagtaaacagaacgaagccagttcacacatccaggatgatatgcacctcgtcattcgcaagcagctaagcagtacagtttttaaatataagctgatagggatcatcggagccgtgacaatggctggcattatggccgctgatcggagcgaatccccctctctgacccaagagagagcaaacttgagcgatgagcagtgcacgcaggtcacgtcccttctgcagctcgtccattcttgctccgagcagtcaccacaggcatctgccctctattacgatgaatttgccaacctgattcagcatgaaaaactggatccaaaggctttagagtgggttggccacactatctgcaatgatttccaagatgcctttgttgtggactcctgcgtggtccccgagggtgacttccctttccctgtcaaggcactctatggattggaagaatacgacacgcaggacggaatcgcaataaacctgctgcccctgttattttcccaagacttcgccaaagacggcggcccagtgacctctcaggaaagtggccagaaactggtgtcacctctgtgcctcgctccgtatttcagactattgcggctgtgcgtggagaggcagcacaacggcaacttggaagagattgacgggctgctggattgtcctatcttcttgaccgacctggaacccggagagaagctcgagagcatgtctgcgaaagagagatctttcatgtgtagtcttatctttctgacactgaattggttccgggaaattgtgaacgccttctgtcaggaaacctcacctgagatgaaaggaaaggtgctgactagattgaaacatatagtcgagctgcagataatcctagagaagtacctggccgtaacccctgactatgtgcctcccctggggaattttgatgtcgagacccttgacataacgccccacaccgtaacagctattagcgcaaagattcggaaaaaaggaaagattgagcgcaagcagaagactgatggcagcaaaacgtccagcagtgacaccctatcagaggagaaaaattctgagtgcgacccaaccccctcacaccggggtcagctcaataaagaattcacaggcaaggaagagaaaacttcactcctgttgcacaattcacacgcattttttcgagaactggacatcgaggtattcagtatccttcactgcggtcttgttacaaagtttattcttgataccgagatgcacaccgaagctacagaggttgtacagctgggccccccggagctgctttttttgctagaggacctgtcacagaagctggagtccatgttgacacccccaatcgccaggagggtgcccttcttgaaaaacaaaggttcacggaatatcggtttctcccacctgcagcagcgctcagctcaggaaattgtccactgcgtctttcagcttctgacaccaatgtgcaaccaccttgagaacattcacaactatttccaatgcctggctgccgagaaccacggcgtcgtggatggtcccggggttaaagttcaggaatatcatataatgtcgagctgctaccaacgcctgctccagatcttccacgggctgttcgcatggtccggtttctcccagcccgagaaccagaatcttctgtactcagctctgcacgtcctaagtagccgcctgaagcaaggcgagcactcccaacctctggaagaactgctgtctcagagcgtgcattacctgcagaactttcatcagtcaatacctagcttccaatgtgctctatacttaatccggctgctgatggttatactcgaaaaaagtaccgctagtgcacagaacaaggaaaagattgcaagcctggcgaggcagtttctgtgccgggtctggccttccggtgataaagagaaatccaacatctccaatgaccagctacacgccctgctctgtatttatctagaacatacggaaagcattctcaaggccatcgaagaaatagcaggagtgggcgtgccagagctgattaatagtcccaaagacgcctcatcttccaccttcccaactctgacaaggcacacattcgtagttttctttagagtcatgatggcagagcttgagaaaacagttaagaaaatcgagccaggaaccgccgccgattcacaacagatacatgaggagaagctcctctattggaatatggcagttcgagacttctcaattctgatcaatctgatcaaagtgtttgattcacatcctgttctgcacgtgtgcttaaagtatgggaggcttttcgtggaagcctttctgaagcaatgtatgcccttactggatttcagctttcgtaaacacagagaggacgtgctgagcttactggagaccttccagctggataccaggctgttgcatcatctttgcggccattctaagatccaccaggataccaggctgacccagcacgtcccattactgaaaaaaactcttgagctgctggtgtgccgagttaaagcaatgttaaccctcaataattgcagggaggccttttggttgggcaacctgaagaaccgcgatctccagggagaggaaatcaaaagccagaacagccaggaaagcacggccgacgagagcgaagatgacatgtcttctcaggcctccaagagcaaagctaccgaggacggcgaagaggacgaagtatctgctggcgaaaaagagcaggattccgacgagagctacgacgatagtgactag

SEQ ID NO: 27435 - DNA, 3750 bp, Artificial Sequence
  derived and/or modified sequence
atggtgtccaagaggcggctgagcaagtctgaggacaaggagagcctgacagaagatgccagcaagaccaggaagcagcccctgagcaagaagaccaagaagagccacatcgccaatgaggtggaggagaatgacagcatctttgtgaagctgctgaagatcagcggcatcatcctgaagacaggagagagccagaaccagctggccgtggaccagatcgccttccagaagaagctgttccagaccctgcggcggcaccccagctaccccaagatcatcgaggagtttgtgtctggcctggagagctacattgaagatgaagattccttcaggaactgcctgctgagctgtgagcggctgcaggatgaggaggcctccatgggcgccagctacagcaagagcctcatcaagctgctgctgggcatcgacatcctgcagcctgccatcatcaagaccctgtttgagaagctgcctgagtacttctttgagaacaagaacagtgatgagatcaacatccccaggctcatcgtgtcccagctgaagtggctggacagagtggtggatggcaaggacctgaccaccaagatcatgcagctgatcagcatcgcccctgagaacctgcagcacgacatcatcaccagcctgcctgagatcctgggggacagccagcacgcagatgtgggcaaggagctgagtgacctgctgattgagaacaccagcctgactgtgcccatcctggatgtgctgagcagcctgcggctggaccccaacttcctgctgaaggtgcggcagctggtgatggacaagctgagcagcatccggctggaggacctgcctgtgatcatcaagttcatcctgcacagcgtgacagccatggacaccctggaggtgatcagcgagctgcgggagaagctggacctgcagcactgtgtgctgcccagccggctgcaggccagccaggtgaagctgaagagcaagggccgggccagcagcagcggcaaccaggagagcagcggccagagctgcatcatcctgctgtttgatgtgatcaagagcgccatccgctatgagaagaccatcagcgaggcctggatcaaggccattgaaaatacagcctctgtgtctgagcacaaggtgtttgacctggtgatgctgttcatcatctacagcaccaacacccagaccaagaagtacatcgacagagtgctgaggaacaagatccgcagcggctgcatccaggagcagctgctgcagagcaccttctctgtgcactacctggtgctgaaggacatgtgcagcagcatcctgagcctggcccagagcctgctgcacagcctggaccagagcatcatcagctttggcagcctgctgtacaagtatgccttcaagttctttgacacctactgccagcaggaggtggtgggcgccctggtgacccacatctgcagcggaaatgaagctgaggtggacacagccctggatgtgctgctggagctggtggtgctgaaccccagcgccatgatgatgaatgctgtgtttgtgaagggcatcctggactacctggacaacatcagcccccagcagatcaggaagctgttctacgtgctgagcaccctggccttcagcaagcagaatgaggccagcagccacatccaggatgacatgcacctggtgatcaggaagcagctgagcagcaccgtcttcaagtacaagctgattggcatcatcggggctgtgaccatggccggcatcatggctgctgacagaagtgagagccccagcctgacccaggagcgggccaacctgagtgatgagcagtgcacccaggtgaccagcctgctgcagctggtgcacagctgcagcgagcagagcccccaggccagcgccctgtactatgatgaatttgccaacctgatccagcacgagaagctggaccccaaggccctggagtgggtgggccacaccatctgcaatgacttccaggatgcctttgtggtggacagctgtgtggtgcctgagggggacttccccttccctgtgaaggccctgtatggcctggaggagtatgacacccaggacggcatcgccatcaacctgctgcccctgctcttcagccaggactttgccaaggatggcggccctgtgaccagccaggagagcggccagaagctggtgagccccctgtgcctggccccctacttccggctgctgcggctgtgtgtggagcggcagcacaacggcaacctggaggagattgatggcctgctggactgccccatcttcctgacagacctggagcctggagagaagctggagagcatgtctgccaaggagaggagcttcatgtgcagcctcatcttcctgaccctgaactggttccgggagatcgtgaatgccttctgccaggagaccagccctgagatgaagggcaaggtgctgacccggctgaagcacatcgtggagctgcagatcatcctggagaagtacctggccgtgaccccagactatgtgccccccctgggcaactttgatgtggagaccctggacatcaccccccacacagtgacagccatcagcgccaagatcaggaagaagggcaagattgaaaggaagcagaagacagatggcagcaagaccagcagcagtgacaccctgtctgaggagaagaacagtgaatgtgaccccacccccagccaccggggccagctgaacaaggagttcaccgggaaggaggagaagaccagcctgctgctgcacaacagccacgccttcttccgggagctggacatcgaggtgttcagcatcctgcactgcggcctggtgaccaagttcatcctggacacagagatgcacacagaggccacagaggtggtgcagctgggccccccagagctgctcttcctgctggaggacctgagccagaagctggagagcatgctgaccccacccatcgcccggcgggtgcccttcctgaagaacaagggcagcagaaatattggcttcagccacctgcagcagaggtctgcccaggagatcgtgcactgtgtgttccagctgctgacccccatgtgcaaccacctggagaacatccacaactacttccagtgcctggccgctgagaaccacggcgtggtggatggccctggggtgaaggtgcaggagtaccacatcatgagcagctgctaccagaggctgctgcagatcttccacggcctgtttgcctggagcggcttcagccagcctgagaaccagaacctgctgtacagcgccctgcacgtgctgagcagccggctgaagcagggcgagcacagccagcccctggaggagctgctgagccagagcgtgcactacctgcagaacttccaccagagcatccccagcttccagtgtgccctgtacctgatccggctgctgatggtgatcctggagaagagcacagccagcgcccagaacaaggagaagatcgccagcctggcccggcagttcctgtgccgggtgtggcccagcggggacaaggagaagagcaacatcagcaatgaccagctgcacgccctgctgtgcatctacctggagcacacagagagcatcctgaaggccatcgaggagattgctggggtgggcgtgcctgagctgatcaacagccccaaggatgccagcagcagcaccttccccaccctgacccgcttcatgaagaggaacagcagcacaggcacctggctgtttgagacctctgtgagcagcagcacctag

SEQ ID NO: 27436 - DNA, 4356 bp, Artificial Sequence
  derived and/or modified sequence
atggtgtccaagaggcggctgagcaagtctgaggacaaggagagcctgacagaagatgccagcaagaccaggaagcagcccctgagcaagaagaccaagaagagccacatcgccaatgaggtggaggagaatgacagcatctttgtgaagctgctgaagatcagcggcatcatcctgaagacaggagagagccagaaccagctggccgtggaccagatcgccttccagaagaagctgttccagaccctgcggcggcaccccagctaccccaagatcatcgaggagtttgtgtctggcctggagagctacattgaagatgaagattccttcaggaactgcctgctgagctgtgagcggctgcaggatgaggaggcctccatgggcgccagctacagcaagagcctcatcaagctgctgctgggcatcgacatcctgcagcctgccatcatcaagaccctgtttgagaagctgcctgagtacttctttgagaacaagaacagtgatgagatcaacatccccaggctcatcgtgtcccagctgaagtggctggacagagtggtggatggcaaggacctgaccaccaagatcatgcagctgatcagcatcgcccctgagaacctgcagcacgacatcatcaccagcctgcctgagatcctgggggacagccagcacgcagatgtgggcaaggagctgagtgacctgctgattgagaacaccagcctgactgtgcccatcctggatgtgctgagcagcctgcggctggaccccaacttcctgctgaaggtgcggcagctggtgatggacaagctgagcagcatccggctggaggacctgcctgtgatcatcaagttcatcctgcacagcgtgacagccatggacaccctggaggtgatcagcgagctgcgggagaagctggacctgcagcactgtgtgctgcccagccggctgcaggccagccaggtgaagctgaagagcaagggccgggccagcagcagcggcaaccaggagagcagcggccagagctgcatcatcctgctgtttgatgtgatcaagagcgccatccgctatgagaagaccatcagcgaggcctggatcaaggccattgaaaatacagcctctgtgtctgagcacaaggtgtttgacctggtgatgctgttcatcatctacagcaccaacacccagaccaagaagtacatcgacagagtgctgaggaacaagatccgcagcggctgcatccaggagcagctgctgcagagcaccttctctgtgcactacctggtgctgaaggacatgtgcagcagcatcctgagcctggcccagagcctgctgcacagcctggaccagagcatcatcagctttggcagcctgctgtacaagtatgccttcaagttctttgacacctactgccagcaggaggtggtgggcgccctggtgacccacatctgcagcggaaatgaagctgaggtggacacagccctggatgtgctgctggagctggtggtgctgaaccccagcgccatgatgatgaatgctgtgtttgtgaagggcatcctggactacctggacaacatcagcccccagcagatcaggaagctgttctacgtgctgagcaccctggccttcagcaagcagaatgaggccagcagccacatccaggatgacatgcacctggtgatcaggaagcagctgagcagcaccgtcttcaagtacaagctgattggcatcatcggggctgtgaccatggccggcatcatggctgctgacagaagtgagagccccagcctgacccaggagcgggccaacctgagtgatgagcagtgcacccaggtgaccagcctgctgcagctggtgcacagctgcagcgagcagagcccccaggccagcgccctgtactatgatgaatttgccaacctgatccagcacgagaagctggaccccaaggccctggagtgggtgggccacaccatctgcaatgacttccaggatgcctttgtggtggacagctgtgtggtgcctgagggggacttccccttccctgtgaaggccctgtatggcctggaggagtatgacacccaggacggcatcgccatcaacctgctgcccctgctcttcagccaggactttgccaaggatggcggccctgtgaccagccaggagagcggccagaagctggtgagccccctgtgcctggccccctacttccggctgctgcggctgtgtgtggagcggcagcacaacggcaacctggaggagattgatggcctgctggactgccccatcttcctgacagacctggagcctggagagaagctggagagcatgtctgccaaggagaggagcttcatgtgcagcctcatcttcctgaccctgaactggttccgggagatcgtgaatgccttctgccaggagaccagccctgagatgaagggcaaggtgctgacccggctgaagcacatcgtggagctgcagatcatcctggagaagtacctggccgtgaccccagactatgtgccccccctgggcaactttgatgtggagaccctggacatcaccccccacacagtgacagccatcagcgccaagatcaggaagaagggcaagattgaaaggaagcagaagacagatggcagcaagaccagcagcagtgacaccctgtctgaggagaagaacagtgaatgtgaccccacccccagccaccggggccagctgaacaaggagttcaccgggaaggaggagaagaccagcctgctgctgcacaacagccacgccttcttccgggagctggacatcgaggtgttcagcatcctgcactgcggcctggtgaccaagttcatcctggacacagagatgcacacagaggccacagaggtggtgcagctgggccccccagagctgctcttcctgctggaggacctgagccagaagctggagagcatgctgaccccacccatcgcccggcgggtgcccttcctgaagaacaagggcagcagaaatattggcttcagccacctgcagcagaggtctgcccaggagatcgtgcactgtgtgttccagctgctgacccccatgtgcaaccacctggagaacatccacaactacttccagtgcctggccgctgagaaccacggcgtggtggatggccctggggtgaaggtgcaggagtaccacatcatgagcagctgctaccagaggctgctgcagatcttccacggcctgtttgcctggagcggcttcagccagcctgagaaccagaacctgctgtacagcgccctgcacgtgctgagcagccggctgaagcagggcgagcacagccagcccctggaggagctgctgagccagagcgtgcactacctgcagaacttccaccagagcatccccagcttccagtgtgccctgtacctgatccggctgctgatggtgatcctggagaagagcacagccagcgcccagaacaaggagaagatcgccagcctggcccggcagttcctgtgccgggtgtggcccagcggggacaaggagaagagcaacatcagcaatgaccagctgcacgccctgctgtgcatctacctggagcacacagagagcatcctgaaggccatcgaggagattgctggggtgggcgtgcctgagctgatcaacagccccaaggatgccagcagcagcaccttccccaccctgaccaggcacacctttgtggtgttcttccgggtgatgatggccgagctggagaagacagtgaagaagattgagcctggaacagctgctgacagccagcagatccacgaggagaagctgctgtactggaacatggctgtgcgggacttcagcatcctgatcaacctgatcaaggtgtttgacagccaccctgtgctgcacgtgtgcctgaagtatggccgcctgtttgtggaggccttcctgaagcagtgcatgcccctgctggacttctccttcaggaagcaccgggaggatgtgctgagcctgctggagaccttccagctggacacccggctgctgcaccacctgtgtggccacagcaagatccaccaggacacccggctgacccagcacgtgcccctgctgaagaagaccctggagctgctggtgtgccgggtgaaggccatgctgaccctgaacaactgccgggaggccttctggctgggcaacctgaagaacagagacctgcagggcgaggagatcaagagccagaacagccaggagagcacagcagatgaaagtgaagatgacatgagcagccaggccagcaagagcaaggccacagaagatggagaagaagatgaggtgtctgctggggagaaggagcaggacagtgatgagagctatgatgacagcgactag

SEQ ID NO: 27437 - DNA, 3750 bp, Artificial Sequence
  derived and/or modified sequence
atggtgagcaagcggcggctgagcaagagcgaggacaaggagagcctcacagaggatgccagcaagactcgcaaacagcctttaagtaagaagactaaaaagtctcatattgccaatgaggtcgaagagaacgacagcatctttgtcaaattgctgaagatatccggaattatccttaagacgggggagagtcaaaatcagctcgcagtcgaccagatcgcctttcagaagaaattgttccaaactctgaggcggcatccatcttaccctaagattatcgaagaatttgtgtccgggctggagtcctatatcgaagacgaggactcatttaggaactgcctgctgtcttgcgagcgtctgcaggatgaagaagcctcgatgggggcaagttacagtaaaagcctgatcaagctgctgctgggcatagacatcctccagcctgctattattaaaacactgttcgaaaaactgccagagtacttctttgagaataaaaacagtgacgaaattaatatacccagactgattgtaagtcagttaaagtggctggatagagtggtggatggcaaagaccttactacaaaaataatgcaactgatctccattgcccctgagaacttgcagcacgacataatcacatccttgcccgagatactcggcgactcgcaacatgccgacgtgggcaaggaattgtctgacctgctgatcgagaacacttccctcactgtgcctatcctcgacgtgctgtccagtctcagactcgatccaaattttcttcttaaggtccgccagctggtcatggacaagttgagcagcattcggctagaagaccttcctgtgatcatcaagtttattctccattccgtcacagcaatggacactttggaggtgatatccgagttgagagagaaacttgacctgcagcactgcgtcctgccatcccggctgcaggccagtcaggtcaagttgaagagtaagggtagggcgtcttctagcggtaaccaggagagctcaggccagagctgtatcatactcctgtttgacgtaattaagagcgctattagatatgagaagaccatctccgaagcgtggattaaggccattgagaatactgccagcgtttccgagcataaggtgttcgacttggtaatgttgttcataatctactccactaatactcaaactaagaaatacatagaccgtgtgttgcgcaataagatcagatccggttgcatccaggaacagctgttgcaaagcacatttagcgtgcattacttagtgctgaaggatatgtgctcaagcatcttgtcactcgcacagagtctgttacatagcctggatcagagcatcatttcttttggttctctactgtacaagtacgcattcaaattcttcgacacctattgccagcaggaggtggtgggcgccttggttacccatatctgtagtggcaatgaagcagaagtggatacagcccttgacgtgctcctggaattggtcgtccttaacccatctgccatgatgatgaacgccgtttttgtgaaagggattcttgactacctcgataacatctccccacagcagattagaaaactgttctatgttcttagcaccctggccttctcaaagcagaacgaggcctcctcccacatccaagatgacatgcacttagtgatacgtaaacaactatccagcacagttttcaaatacaagctaatcgggataatcggcgccgtgactatggccggcatcatggccgcggaccggagcgagtctccctccctgacccaagagagggctaatctgagcgatgagcaatgcactcaagttaccagtttgctgcagctggtgcactcttgctcagagcagtcaccccaggcatctgcattatattacgatgaattcgccaacctgatacagcacgagaaactggaccccaaagctcttgagtgggtcggacatacaatttgtaatgatttccaagatgcctttgttgtggacagctgcgtggtccccgaaggtgatttcccttttcccgtgaaggctctctacggacttgaggagtatgatacgcaggacggaatagcaattaacctgttgccgctgctgttttcccaggatttcgcaaaggatggtggcccagtaacaagtcaggagtccggtcagaagctggtctcccctctttgtctcgccccctactttcgacttttgaggttgtgcgtggaacggcagcataacgggaacttagaggagatcgacgggctcctggattgtccaatcttcctcaccgatctcgaacctggagagaagctggagtcaatgtccgcgaaggagaggagctttatgtgcagtctgattttcctgactctgaattggtttcgtgaaatcgtgaacgccttctgtcaggaaacatctccggagatgaagggtaaagtgttgacccgccttaagcatatagtggaactgcaaataatccttgagaagtacttagccgtgacacccgactacgtgcctcccttgggaaatttcgacgtcgagaccttggatattaccccacatactgtgaccgctatctcagcaaagattcggaaaaaggggaaaattgaaaggaagcagaaaacggatggcagcaaaacaagcagttctgatacactgtccgaagagaaaaactccgagtgtgaccctacaccaagtcaccgaggccaactgaacaaggagttcacggggaaggaagaaaaaacttccctacttctccacaactctcacgcgttttttagagaattggatatcgaggtattttccatactgcactgcggactcgtgacaaaattcatcttggatacagagatgcacaccgaggccaccgaagtggtccaactcgggccgcctgagttgctgttcttactcgaggaccttagtcagaagctcgagagcatgctaaccccccccatcgcccgaagggtccctttcctgaagaacaaaggctccagaaatatcggctttagtcacctgcagcagcgcagcgctcaagagatcgtgcattgcgtctttcaactcctcacaccaatgtgtaaccacctagaaaacattcacaactacttccaatgcttagcagctgaaaaccatggcgtggttgatggaccaggtgtcaaggttcaagagtatcacattatgagtagttgctaccagcggttgttacagatctttcacggcctattcgcctggtctgggttttcacaacctgagaaccaaaatctgctctactcagcattgcacgttttgtctagccgactcaaacaaggtgagcactcccaacctctggaggagctgcttagccagagtgtccattaccttcagaacttccatcaatccatcccaagcttccagtgcgctctgtacctgattcgattattaatggtcatcttggagaagagtaccgcatccgcacaaaataaggagaagatcgcatctctcgcccggcaatttctgtgtagggtctggcccagtggcgacaaggagaaatccaacatatctaacgatcagctacatgctttgctgtgcatttacctagagcacaccgagagcattctcaaggctattgaggaaattgccggggtgggcgtccccgaactgataaattcaccaaaggacgctagctccagcacattcccaaccctcaccaggtttatgaaacgcaatagctctaccggaacttggctgttcgaaactagcgtgtctagtagtacatag

SEQ ID NO: 27438 - DNA, 4356 bp, Artificial Sequence
  derived and/or modified sequence
atggtgagcaagcggcggctgagcaagagcgaggacaaggagagccttaccgaagatgcgtcaaagacgaggaagcagccattatccaaaaaaaccaagaagtcccacatcgccaatgaggttgaggagaatgattccatatttgtcaaattacttaagatctccggaatcatactgaaaactggagaatcccagaaccaactggctgtggaccaaattgcatttcagaagaaactcttccagaccctgcggagacacccgtcttaccccaaaatcatagaggagtttgtgagcggcctggaatcttacatcgaggacgaggattcctttaggaattgtctactgtcatgtgaacggttgcaggacgaggaggcaagcatgggcgcatcgtacagcaaatccctgatcaaactcctgctcggcatcgatatcttgcagcccgctatcattaagacactgttcgagaagcttcccgaatactttttcgagaacaaaaactcggatgagatcaatattcctcgtcttatagtctctcagcttaaatggctggaccgcgtggtagacggcaaggacctgacaacaaagattatgcaactgatctctatcgcaccagagaaccttcagcacgatattatcacgagcctgccggagatcttgggtgactcccaacatgcagatgtgggtaaagagttaagtgatctcctgattgaaaataccagtctcacagtgcctattctggatgtactctcaagcctccggttggaccccaatttcctgttgaaggtccggcagctggtgatggacaaactgtctagcatcagactcgaagacctgccggtgatcatcaaattcatactccactcggtgacagctatggataccctggaggtcatcagcgaacttcgtgaaaagctggacctgcagcactgcgtgctgccatcacggttacaggcgtctcaggtaaagctcaaatctaaaggtagagcgtcatctagcggtaaccaagaatcatctggacagtcatgcataatactgctttttgacgtcatcaagagcgcgattcgttacgagaaaaccatttcagaagcctggataaaagccattgaaaacaccgcatctgtcagtgaacacaaggtattcgatctggtgatgttgttcatcatctactccacaaatacacagacaaagaagtacatcgatcgggtgctgaggaacaagattcgatcgggctgcatccaagagcagctgctgcaatcaaccttctctgtccattatctcgtcctgaaagatatgtgctctagcatccttagcctcgctcagagtttgctccatagtctcgaccagagtatcattagtttcggctcacttttgtacaaatatgccttcaaattctttgacacctattgccaacaagaggtcgtgggggcacttgttacacatatctgctccggaaatgaggctgaggttgacacagccctcgacgtcttgcttgaactggttgttttgaatccttccgccatgatgatgaacgccgtatttgtgaaagggatcctggattaccttgacaatatcagtccgcagcaaattcgcaagctcttctacgttctgagcaccctagccttctccaagcagaacgaggcttcatctcacattcaggatgatatgcatctcgtgattagaaagcagctcagctcaaccgtgtttaagtataaactgattggcataattggggcagtaaccatggccgggataatggcagccgaccgctccgaaagtccaagcttgacacaagagcgcgcaaacttatccgacgaacagtgcactcaggtgacatctctacttcagttggttcattcatgtagtgagcagtcccctcaagccagtgccctgtattatgacgagttcgcaaaccttattcagcatgaaaaattagatcccaaggcactcgagtgggtgggtcacacaatctgtaatgacttccaggacgccttcgtcgtcgactcttgtgtggtgccggagggagacttcccattccccgtgaaggctctgtacggactggaggagtatgatacccaggatgggatagcaattaacctgctgcccctactgttcagtcaggattttgctaaggatggaggacccgttactagtcaggaaagcggtcagaagctggtaagtcctctgtgcctggcaccgtattttagactcttgcgcttatgcgtggagcgtcagcataacggtaacttagaggaaattgatggcctcctagattgtccgatattcttaacggatttagagcctggggaaaagctcgaatctatgagtgctaaggaacgctctttcatgtgctccctgattttccttaccctcaactggtttcgcgagatcgtcaacgcattttgtcaggaaaccagccccgagatgaagggcaaggttttgacaagactcaagcatatagtcgagcttcaaatcatcctggaaaaatatctcgcagtcactccagattatgtgccaccccttgggaactttgatgtcgaaacactggatataaccccccatacggtcaccgccataagtgccaagatccggaaaaagggcaaaattgaaagaaaacagaagactgacggctccaagacttcctcatctgacactctctccgaagagaagaacagcgagtgcgacccaactccgtcccaccgcgggcagctgaacaaagagtttactgggaaggaagaaaagacctccctcctactccacaactcgcacgcttttttcagagagttagatatcgaagtcttctcaattcttcactgcggcctggtgacaaagttcatcctggacaccgagatgcacaccgaggctactgaggtggtgcaacttggtcctccagaactgctctttctcttggaggatttatctcagaaactcgaaagcatgctgaccccaccgatcgctaggagggtccccttcttaaagaataagggctctcgaaatattggtttcagccacttgcaacagcggtccgcacaggaaatcgtgcactgcgtattccagcttttgacacctatgtgcaatcaccttgagaatatccacaactatttccaatgcctggcggccgagaatcacggagtcgtggacgggcctggggtgaaagtccaggaataccacattatgagcagctgttaccagcggctcctgcagatattccatggcctttttgcttggtccggcttctcacaacccgagaaccagaacctgctgtattcagcccttcatgtgctctctagcaggctcaagcagggagagcactcacagccccttgaagagttactgtcccagtcagtgcactatctgcagaattttcaccagtccatcccgtctttccagtgtgctctctaccttataaggttgctcatggtaatactcgagaagagcaccgcctctgcacagaacaaagaaaagatagccagtctggcccgtcagtttctatgccgagtttggccctccggcgataaagagaaaagtaacatctctaatgatcagctccatgccctcctgtgcatatatctggaacatacagaaagtatcctgaaagctatagaagagatagcgggggtaggggtccccgagctaataaactcccccaaagatgcctcttcgagcacgttcccaacactgactcgccataccttcgtcgtcttctttagggtaatgatggccgaattagagaaaactgttaagaagattgagccggggactgctgccgactcacagcagattcatgaagagaaactgctgtactggaatatggccgtgcgcgatttttcaatactgatcaacctcatcaaagttttcgattctcacccggtgctgcacgtctgcctcaagtatggtaggttatttgtagaagcttttctgaagcaatgcatgccactgctcgacttctcctttcggaagcatcgagaggatgtcctgagcctgttggaaactttccagctggatactcgcttgctacatcacttatgcggccactcgaaaattcatcaagatactaggctgacccagcacgtgccactgctgaaaaaaaccctagagctcctcgtttgcagggtgaaggcgatgcttaccctgaataactgccgcgaagctttctggctgggaaacttgaagaatcgcgacctgcagggcgaggaaattaagtcacagaatagccaagagagtacagccgatgagtcagaggacgatatgagttctcaggccagcaagtccaaagccaccgaggacggtgaggaggatgaagtctctgccggagagaaggagcaagattccgacgaatcttacgatgactccgactag

SEQ ID NO: 27439 - DNA, 4356 bp, Artificial Sequence
  derived and/or modified sequence
atggtgagcaagcggcggctgagcaagagcgaggacaaggagagccttaccgaggacgcctctaagacaaggaaacagccccttagcaagaagacgaagaaatcacacatagccaatgaggtcgaggagaatgactcgatcttcgtcaagctcttgaagatttccggaatcattctgaagactggagagtctcagaatcagctggcagtggaccagatcgcctttcaaaagaaactgttccaaactttacggcgccacccaagctatcccaagatcattgaggaatttgtttcgggcctcgagtcatacatcgaagatgaggatagtttccgcaactgtctcctatcctgtgagaggcttcaggacgaggaggcttcaatgggtgcctcctatagcaaatccttgatcaaactgctgctgggaattgatatccttcagcctgcaattattaagacgctgtttgagaagctaccagagtacttcttcgagaataaaaacagcgacgagataaatatccctagacttattgttagtcagttgaaatggcttgatcgggtggttgacggcaaggacctgacaactaaaataatgcagcttatcagcatcgcccccgagaatttgcaacacgacattataacgagcctccctgagatcctcggggactcccaacatgccgatgtaggtaaggaactcagtgatctgctgattgaaaatactagcctaaccgtgcccattctcgacgtcctttcgtcacttcggcttgatccgaactttctattaaaagtgcgccaactagtgatggacaaactgagtagcatcagactggaagatcttccagtcatcattaagttcattttgcacagcgtcaccgcaatggacacgctggaagtcatctccgaactccgcgaaaagttggacctacagcattgtgtgctgcctagtagacttcaggccagccaggtgaagctgaaatccaagggtcgagctagtagctctggcaaccaggaaagttctggacagtcttgtatcattctgctgtttgatgtcataaagtctgccatcagatatgagaagactatttccgaggcctggatcaaggcaatcgaaaacacagcttcggtatccgaacacaaagtattcgatctcgttatgctctttatcatctattctaccaacacccagacaaagaaatacatcgaccgggtgctgaggaacaaaatcaggtcaggctgcattcaagaacagctgctgcagtccaccttttccgtccactacctggtccttaaggacatgtgttcttccatcttgagcttagcccagagccttcttcactccctggaccagtctatcatttcctttggtagtctcttatacaagtatgcatttaagttctttgacacgtactgccagcaggaggttgtgggcgccttggtgacccacatctgctccggcaacgaagctgaggtggacactgccctggacgtgctcctagagctagttgttctgaaccccagtgcaatgatgatgaacgcagtttttgttaaaggcatccttgattacctggataacattagcccacagcaaatccggaagttgttctatgtgttatccacccttgctttttccaaacagaatgaggcctcaagccacatccaggatgacatgcacctggtgatacggaagcaattaagtagtactgtgtttaaatataagctgatcgggattatcggggctgttactatggccggtatcatggcagccgatagatccgagtctccctctctcacccaggaaagagcaaacctttcagacgagcagtgcactcaggtgacctcccttctgcagctggttcattcttgctctgagcagtcaccccaggccagtgctttgtactacgacgaatttgcaaacttaattcagcatgaaaagttggaccctaaggccctcgagtgggtgggccacaccatctgcaacgactttcaggacgcctttgtcgtcgactcatgtgtggttccagagggagactttccgttccctgtcaaagccttgtacgggctggaagagtatgacacacaggatggcattgccattaacctcctaccacttcttttttcccaagacttcgctaaagatggcgggccagtcacaagccaagaatccgggcaaaaactggtttctcctctctgtctggccccgtatttccgcctcctccgattgtgcgtggagaggcaacacaacggcaacctggaagaaatcgacgggcttctcgattgtcctatctttttaacagacctggagcctggtgagaagcttgagtcaatgtcagccaaggagcgaagcttcatgtgttcactgatattcctgaccctaaattggttcagagagattgtgaatgccttctgccaggagacaagtcccgaaatgaaggggaaagtcctgacacgacttaagcacattgtcgaacttcagataatattagaaaagtatctggccgtcactcccgactatgtgccccccttaggcaattttgatgtggaaacactcgacattaccccccatacggtaacagcgatctccgcaaagattcggaaaaaggggaagatcgagcgcaaacagaaaacagatggtagcaagaccagttcctcagataccctgtctgaagagaagaattccgagtgcgacccaaccccatcccacagagggcaactaaataaagagttcactggcaaagaggagaagacaagcctcctgctgcataacagtcacgcgttttttcgtgagcttgatattgaagtgttttccattctgcactgtgggctggtgacgaagttcattctcgacacagagatgcatacagaagctacagaggtcgtgcagctcgggcctcctgaattgctgttccttctggaagatctaagccagaaacttgagtctatgctgacacctccaatagctcgccgtgtcccatttctcaagaataaggggtcacgaaacattggattttcccatttgcagcagcggagtgctcaggagattgtgcactgtgtgttccaactgttaacacctatgtgtaatcatcttgaaaacattcacaactatttccagtgccttgccgctgagaaccacggcgtcgttgatggccctggagtaaaggttcaagaatatcatatcatgagcagctgctaccagaggctcctccagatattccacggtttattcgcctggtcaggattctctcagcccgagaatcagaatctcctgtactcagcattacacgtgctgtcgagtagattgaaacagggagagcactcgcaaccattggaggaactgctcagccaaagcgtgcactacctgcagaattttcatcagagcattccgtcctttcagtgcgcactctacttaatacgcttgctgatggttattctggagaagtccacagccagcgcgcagaataaagagaagattgctagtcttgctcgacagtttctgtgcagggtgtggccatcaggggacaaagagaaaagcaatatctcaaacgaccagctccacgccctcttgtgtatatatctcgaacataccgagagtatccttaaggcgatcgaagagatcgctggcgtaggggtaccagaactgattaatagcccaaaggacgcaagctcttccacttttcctaccctcactagacacacgtttgtggtgtttttccgtgtaatgatggcagaacttgagaagacagtcaagaagatcgaaccaggcaccgcagctgatagccaacagatccacgaagagaagctcctgtactggaacatggccgttcgagactttagcattctgataaacctgattaaggtatttgactcccacccagtgctccatgtttgtctaaagtacggtagactctttgtggaagctttcttgaagcagtgtatgcctctgcttgacttcagtttccgtaagcatcgggaagatgtcctctctctactcgagaccttccaacttgacacacgtctgctccatcatttgtgtggccacagcaaaattcaccaggacaccagactcacccagcacgtgcccctactgaagaagaccctggagcttttagtgtgcagggttaaagccatgctgaccctcaataactgccgggaggctttctggttgggcaatctgaagaacagagatctccagggggaggaaatcaagtcccagaacagccaggagtccacagccgacgaatccgaagacgatatgagcagtcaagcatcaaaatccaaagctaccgaagacggcgaagaagacgaggtgagcgccggcgagaaggagcaagactctgatgaaagctatgatgattccgactag

SEQ ID NO: 27440 - DNA, 3750 bp, Artificial Sequence
  derived and/or modified sequence
atggtgtctaagcgaaggctgtccaagagtgaggacaaggaaagtctgacagaagatgcttccaaaactaggaaacagccactgagtaaaaagactaagaaatcccatatcgccaacgaggttgaagaaaatgacagcattttcgtgaagttacttaagatatctgggattatccttaaaactggcgagagccagaaccagttagcggtagatcaaatcgcattccagaagaagctgttccagacacttcgtcgccacccatcatacccaaagatcatcgaggaatttgtctcgggtctggagtcttacatcgaggatgaagattcttttagaaactgcctcctgagctgtgagcgtttgcaggatgaggaagcctcaatgggtgcatcctattccaaatctctgatcaaactgctactggggatcgatatactccagcccgctataatcaagaccctgtttgagaaattgcccgaatacttcttcgagaacaagaactccgacgaaattaatataccaaggttaatcgtatctcagttgaaatggctggatcgcgtcgtagacggcaaagacctaaccaccaaaatcatgcagctgatcagcatagcgccagaaaacctccaacatgacattatcacttcgctgccagaaattctcggcgattctcagcacgccgatgttggcaaagaactctccgacttgctgatcgagaacacttccctgactgttcctattctggatgtgctgtctagcctcaggcttgacccaaatttcctcctcaaagtgcgccagctcgtgatggataaactttcctccatccgactggaggatctcccggtaataatcaagtttatactccatagcgtgactgccatggacactcttgaagtgatcagcgagctgcgggagaagttggacctgcagcactgcgtgttacccagcagactgcaagcgtcacaggtcaaattgaagagtaagggccgagcaagctctagcggaaaccaggaaagctcaggacagtcgtgcataatattgctcttcgacgttataaagtccgccattaggtatgaaaaaactatttcagaggcttggattaaggcaattgaaaacacggcaagcgtgagtgagcacaaggtcttcgacctggtgatgctgtttatcatatactcaacgaatactcagacaaaaaaatatatcgaccgagtgttaagaaacaaaatccgaagtgggtgcatacaagagcagttgttgcaatcaacattctcagtccattatctggtgctgaaggacatgtgttcaagcatcctaagtctggcccagagccttctgcattcgctcgaccagagcatcatttctttcggttcactgctatataaatacgcttttaagttttttgacacatattgccaacaggaagttgtgggagcgctggtgacccatatatgctctggtaacgaggccgaggtagataccgctctggacgttttgcttgaattggtggtgctgaatccaagcgctatgatgatgaacgcagtgttcgtgaaggggattctggattacctggataacatatccccccagcagattcgcaaactgttttatgtgctgagtacattagcattttctaaacaaaacgaagcgtcctctcacatccaggacgatatgcacctggtaattaggaaacagctgagtagcaccgtttttaagtataaacttatcggtataatcggagctgtcaccatggcgggaatcatggcggcagacaggagtgaatctccaagtttaacacaggagcgcgcaaacctgagcgacgagcagtgcacgcaggtcaccagtctactgcaattggtccacagctgttcagagcagagcccccaagcttctgccctgtactatgatgagttcgcaaacctaatccagcatgaaaagctggatccaaaggcactcgaatgggtgggccacaccatctgcaatgactttcaggacgccttcgtggtcgactcctgcgtggtgccagaaggcgatttcccatttcctgtcaaagcgttatatgggttggaggagtatgacacccaggatggtatagctatcaatctgttacctcttctgttctcgcaggacttcgctaaggacgggggtcctgtcacatcacaggagagtggccagaagttggtgagccctctgtgtcttgccccatacttcaggttgttgcgtctgtgcgtggagcggcagcacaacggtaatctagaggaaatagatgggctcctggactgtcccatctttctgacagacttagagcccggagagaagttagaaagcatgtccgctaaggagcgttccttcatgtgctctctgatttttctcaccttgaactggttccgggagatcgtgaacgcgttttgtcaggagaccagtcccgaaatgaaaggaaaagttctcacccgattgaagcacattgtcgaactgcagataattctcgagaagtacctcgccgtgactccagattatgttccccctctcggtaacttcgacgtggagactctggatattactccccataccgtgacggccattagcgctaagattaggaagaagggtaagatcgaacgtaaacagaagactgacgggagcaagacctcctcatccgacacactgtccgaggagaagaattcggaatgtgacccaacaccttcacatcgcggtcagctgaacaaggagtttacaggcaaggaagagaagacaagtctcctgctgcacaattcccacgctttcttcagagagctcgacatagaagtgttctccatcctgcattgtggattggtaactaagtttatactcgatacagagatgcacacagaggccacggaagtagtgcagctggggcctcctgaattgctttttttgctcgaggacctttcccagaaacttgagagcatgttgacaccaccgatcgcgcgacgagtcccatttcttaagaacaagggttctcgcaacatcgggtttagccacctccagcagcgcagcgcccaagaaatcgtccactgcgtgttccagctgctaaccccgatgtgtaaccatctggagaacatccacaattattttcagtgcctggctgctgaaaaccacggagtggtggatggcccaggggtaaaggttcaggaataccacattatgtcaagctgttaccagagactactgcagatctttcacggcttattcgcctggagcggattctcccagccagagaatcagaatctcctctactccgctttgcatgtgctgtccagtcggctgaaacagggagagcacagccagcccttggaggagctattaagtcagagtgtgcattatctgcagaactttcatcagagcataccctcattccaatgtgccttgtatctgattaggttattaatggtgattttagagaagtcgacagccagcgcccagaacaaagaaaagattgccagccttgctagacagttcctatgtcgcgtttggccctccggggataaagagaaatccaacatttccaatgaccaactgcatgccttgttgtgcatttatctggagcacactgagagcatcctgaaagccattgaggaaattgctggtgtgggcgtgcctgaactcatcaatagccccaaggatgcatcctcaagtacattccctacactgactagatttatgaagcgtaactcaagtacagggacctggctgttcgagacatccgtgtccagcagtacatag

SEQ ID NO: 27441 - DNA, 4356 bp, Artificial Sequence
  derived and/or modified sequence
atggtgtctaagcggcgtctgagtaagagtgaagacaaagaaagcctaacagaagacgccagcaagacacggaagcaacccctctctaaaaagactaagaagtcgcatattgctaacgaggtcgaggagaatgactccattttcgtgaagctgttaaaaatttcagggatcattttgaagaccggggagagtcagaatcagttggctgtggatcaaatcgctttccagaaaaaactgtttcagacactgagacgtcatccgagttatcccaagatcattgaggagttcgtgtcaggactggagtcgtacatcgaagatgaagattctttcagaaactgtctgctaagctgcgagcgcctgcaggatgaagaggcatctatgggcgctagctactccaagagtctgattaagctcctgctgggtattgacattctgcagccagcgattatcaagaccctgttcgaaaaactgcccgaatactttttcgagaacaagaattccgacgaaattaatatcccccgtttgatagtgagtcagctgaagtggcttgaccgagtggtcgatggaaaagacctcactacaaagatcatgcagctgatttcaatcgcgcctgagaaccttcaacacgatataattacctccctcccagaaattttaggcgactctcagcatgcagatgtggggaaagagctgtctgatctactcattgagaacacttccctaaccgtgcctatcctggatgtgctctccagcctgcgactggaccctaattttctccttaaggtacgacagctggtgatggataaactcagctccatccgcctggaggatctgccggtcatcatcaaattcatcttacattctgttaccgcaatggacaccttggaagttatctctgagcttagggagaagttggacctgcagcactgtgttttgcccagtcggctccaggcgtcccaagttaaactcaaaagtaaagggagagcgtcatcttcaggtaaccaggagtcaagcgggcaaagctgcatcatactgctcttcgatgttatcaaaagcgctatccgctatgaaaaaaccatctcagaagcctggataaaggccattgaaaacacagcctccgtctctgagcacaaggtgttcgacttggttatgctgttcatcatttatagcaccaatacgcagacaaaaaagtatatcgacagggtgctgagaaacaagatccggtccggctgtattcaggagcagctccttcagagtactttctctgtccactacctggtcctgaaagacatgtgtagctctatcctgtctttggctcagtcactcctccacagcttggatcagtctatcatttcgttcgggtcactgctgtacaagtacgcgtttaaatttttcgacacatattgccaacaggaagtggtgggagcactggttacacacatctgttcagggaacgaagcggaggttgatactgctctggatgtgctcttggaattggtggtgcttaacccaagcgccatgatgatgaatgccgtctttgtgaagggaatcttagattacttggacaatatcagcccacagcaaattcgcaagttgttttatgtcctgtcaactttggccttctccaagcaaaacgaagctagctcacatatccaagacgacatgcacctggtgatacgcaagcagctgtcttcgacagtgtttaaatacaagctgattggtatcattggggcagtcacaatggcaggaatcatggctgctgatcgctccgaatctcctagcctaacacaagaacgagctaacctgtcagatgaacagtgcactcaggtcacctcactgcttcagttggtacacagctgttctgaacagtcgccacaggccagtgccttatattatgatgagttcgcaaatctgattcaacacgaaaagctggatcccaaagctctcgaatgggtcggccacacaatctgcaatgacttccaggacgctttcgtggtggactcttgtgtcgtacccgaaggggatttcccttttcccgtgaaggccctctacggcctagaagagtatgacactcaggatgggattgctatcaacttacttcccctgctgttttctcaggatttcgctaaggacgggggacccgttacctctcaggagtccggtcagaagctagtgtcacctctgtgtcttgccccatactttcgccttctgaggttgtgcgttgagaggcagcacaacggcaatctcgaggagatcgatggcctgctcgactgcccgatttttctcaccgacctggaaccaggcgagaagctggagagtatgtcagcgaaggaacggtcgttcatgtgctctttaattttccttactctgaactggtttagggagatcgtgaatgccttctgccaggaaacatcccccgagatgaagggtaaagtgttgactagattaaagcatatcgtggaactgcagattattctggaaaagtacctggctgtgacaccagattacgtcccccctctggggaacttcgatgtcgagacactcgatataacccctcacaccgtgacagccatctcagccaaaattcggaaaaagggcaagattgaaagaaaacagaagactgatggttccaagacatcctcttcagacacactcagcgaggagaaaaattctgaatgcgatccaaccccttctcaccgaggacagctgaataaagagtttacgggcaaagaggaaaaaacttccctgctgctgcacaatagccacgccttcttcagagaactggatatcgaggtgtttagcattctccactgtggactggtgaccaaatttattctcgataccgagatgcatactgaagctaccgaggttgtgcaactcggacccccagaactactgttcctcctcgaagatctgagccagaagttggagagtatgcttacccccccaatcgcgaggcgggtgccgttcctgaagaacaaggggagcaggaatatcgggttttctcatctccagcagcgctccgcacaagagattgttcactgcgtgttccaacttcttacccccatgtgcaaccacctggagaacatccacaactacttccagtgtctggcagcagagaatcacggggtcgttgatggccctggcgtcaaggtgcaggagtatcacattatgagctcctgctatcagaggctcctgcagattttccacggcttgtttgcctggtctgggttctcccaacccgagaatcagaacctgctgtattccgccctgcatgtcctgtcaagcaggctgaagcagggggaacattcacaacccctcgaagagctactctcacagtccgtgcactatctgcaaaatttccatcagtcaatccccagctttcaatgtgccctgtacctgatccgccttctgatggtgatcttggaaaagagtacagcatccgcgcagaataaagaaaagatcgctagccttgctagacagttcctgtgccgcgtctggccatcaggggataaggaaaaatcgaatatatcgaatgaccaactacacgccctgctgtgtatctatcttgagcacaccgaaagcatcctgaaggcgattgaggaaattgcaggagtcggcgtccctgagctcatcaatagccccaaagatgcaagctccagtactttccccacgctgactaggcacacattcgttgtctttttcagagtgatgatggctgagttagagaagaccgtgaagaagatcgagcctggcactgcggctgatagtcaacagattcatgaggagaagctgctttattggaacatggctgtgcgtgatttcagtatcctaatcaatctgattaaagtctttgactctcacccagtgctacacgtgtgcttgaagtacggtcgcctgttcgtcgaggcctttctgaaacagtgtatgcccttattggatttcagctttagaaagcatcgggaggacgtactgtcactgcttgaaacattccagctggacacaaggctccttcaccacttgtgtggacacagtaaaattcaccaggatacaaggctgacacagcacgtgcctctgttgaagaagacgttggagctgctcgtgtgcagagtcaaggcaatgctgactttgaacaactgccgggaagctttctggttaggaaacctgaagaacagggatctccagggagaggagataaagtcccagaactctcaggagagcacggcagatgagagtgaggacgatatgtcttctcaagctagtaagtccaaagcaaccgaagacggtgaagaggacgaagtgtccgccggagagaaagaacaggactcggatgagtcatacgatgactccgattag

SEQ ID NO: 27442 - DNA, 4356 bp, Artificial Sequence
  derived and/or modified sequence
atggtatctaagaggaggctctctaagtcggaggataaggaatctctgaccgaagacgcgtcaaaaactaggaagcagcctctcagcaaaaagacaaagaaatcacacatcgccaacgaagtcgaggaaaatgacagtatatttgttaaactcctgaaaatatctggtattattctgaaaacaggagagtcccaaaaccagctagcggtagatcagatcgcttttcaaaagaagctatttcaaaccctgagacggcacccatcttacccaaagatcattgaggaattcgtttcaggtctggagagctacattgaagacgaggactcctttaggaattgtctgctgagctgtgagagactgcaggacgaggaggcatctatgggcgcatcctactcgaaaagcctgattaagctattactcggtatagatatcctccaaccagccattataaagactctgttcgagaagctccccgagtacttcttcgagaacaagaattcagatgagattaatattcccagacttattgtctcccagctgaagtggctcgatagggtggtggatgggaaagacttgactactaaaatcatgcagctaatcagtatagcgccagaaaacttgcaacacgatattatcacttccctgccagagatactgggcgactcccagcacgctgatgtggggaaggagctatccgacctcctgattgagaacacatccctgaccgttcccattctggatgtactgtcatccctgaggctggaccccaactttctgcttaaggttagacaattagtgatggacaagcttagctccattcgactggaagatctccctgtgatcataaagttcatcttgcactccgtcactgcgatggatactttggaggtgattagcgaactacgcgagaagttggacctccagcactgcgtgttaccttctagactccaggcatcccaggtcaaacttaagtccaaagggagagcctcaagctctgggaaccaagagtcctccggccagtcctgcataatattgctgtttgatgtgatcaaatcagcaatccggtacgagaaaacaatatccgaggcgtggatcaaggccattgagaataccgcctctgtgagcgagcataaggtctttgacctcgtcatgctcttcatcatctacagtacgaatacgcagacgaaaaaatacattgaccgcgtgctgcggaataaaattcggagcggttgtatccaggagcagctcttgcagtccaccttttccgtgcactacttggtcctgaaagacatgtgctcaagtatcctatccctggcccagagcctgctgcactcactcgatcagtcaatcatctcatttggctctctgctgtacaaatatgcattcaagttctttgatacatattgtcaacaggaagtggtcggcgcacttgtgacacatatctgcagtggaaatgaggcagaagtcgacaccgcgctcgacgtgctgttggagctagtggtgttaaacccaagtgcaatgatgatgaacgcggtgtttgttaagggcatcctagactatctggacaatatctctcctcagcagatccggaagctgttctacgtgttaagtacactcgccttctctaaacagaacgaagcttcaagccatattcaagatgacatgcacctggtgattagaaaacagttatcttcaaccgtgtttaaatataaattaattggaattatcggagctgttactatggccggtatcatggccgcagaccgcagcgaatcaccctccttgacccaggaacgggcaaacctgtcagacgaacagtgtacccaggtcaccagcctgctacagctagtgcattcttgttctgagcagtccccacaggcaagtgccttatactacgatgagttcgcaaaccttattcagcatgagaagctcgaccccaaggctttggaatgggtcgggcataccatttgtaatgatttccaagacgctttcgtcgttgatagctgtgtggtgcctgagggagacttcccattcccagtgaaggccctgtacgggctggaggaatacgacacccaggatggaattgccattaacttactcccccttctattttcccaagattttgctaaggatgggggacccgtgactagtcaggagtccgggcagaagctcgttagcccgttgtgcttggccccatacttcagacttctacgcttgtgcgttgaaagacagcataacggcaatctcgaagagatcgacgggctgctggattgtccgatcttcctgaccgacctcgagcccggagaaaaattggagtccatgtccgccaaggagaggtcctttatgtgtagtctcatcttcctgacgttgaattggttccgcgaaatcgtgaacgctttttgtcaggagacatcacccgagatgaagggaaaagtgttaaccagactgaaacatatcgtggaactgcagattatactcgaaaagtacctcgctgtgacacctgactacgtcccccctctgggtaacttcgatgtggagacattggacatcacaccgcatactgttacagctatcagcgctaaaatacgaaagaagggcaagattgaaaggaaacagaagactgatggttcaaaaacctctagcagcgacaccctaagcgaggagaagaactcagagtgcgaccccacaccgtctcatagaggacagcttaataaggaatttactggaaaagaggaaaagacatctctgctcctgcacaactcccacgcatttttccgggagctggatatcgaagtgttcagcatactgcattgcgggctcgtgacgaagtttattcttgacacagaaatgcacactgaggctaccgaagtggtgcagctaggacccccagagctgctttttctgctggaggacctgagccagaagcttgaaagtatgttgacccctcctattgccagacgcgtgccatttctcaaaaataagggcagcagaaacatcggcttttcccacctccaacaacgctccgcccaggaaattgtccactgcgttttccagctgctaacccccatgtgcaatcatctggagaatattcataattatttccaatgcctggctgccgagaaccatggcgttgtagacggcccaggggtcaaggtgcaagaataccacattatgtctagttgttaccagcgtttactgcagattttccacggcctatttgcctggagcggatttagccagccagaaaatcagaatctgctctacagcgcactgcatgtgctgtcgtcaagactcaaacagggtgaacatagtcagccactggaagagctgctttcacagagcgttcactatctgcaaaacttccaccaatctattccatcctttcagtgcgctctgtacctaatccggctgctcatggtgatattggagaagtccaccgccagtgctcagaacaaggagaaaatcgccagcttagctagacagtttctgtgtcgtgtgtggccgagtggcgacaaagagaagtccaacatatcaaacgatcagctacatgctctactgtgtatctacttagaacacacagagtccatactgaaagccattgaagaaattgctggtgtcggtgtgccggaactgattaatagtccaaaggatgccagttccagtacttttcccaccctcacgcgtcacacttttgtcgtattctttcgtgtgatgatggcagaactggagaagaccgtgaagaagatcgagccagggacagccgctgactcacagcaaattcacgaggagaagctcctgtactggaacatggccgtccgtgacttttccatacttattaatctgataaaagtcttcgacagtcaccctgtgttacatgtatgtctgaaatacggccgtctatttgttgaagcgtttctcaaacagtgtatgccgctactggatttcagttttagaaagcatagggaggatgtcctatcactgttggagacatttcagctggatacacggctcttgcaccacctctgtgggcattcaaagattcaccaagatactcgcctgactcagcatgtgccactattaaaaaagaccctggagttgctggtgtgtcgggtgaaagccatgctgacccttaacaattgccgggaggctttttggctaggaaacttgaagaatcgcgacctacaaggcgaagagatcaaatcccaaaactctcaggaaagcactgccgatgagtccgaggatgacatgtcatcccaagcatctaagtctaaagcaacagaggacggtgaggaggacgaagtttccgccggagaaaaggagcaggacagtgacgaaagttacgatgatagtgattag

SEQ ID NO: 27443 - DNA, 3750 bp, Artificial Sequence
  derived and/or modified sequence
atggtgagcaagagaagactgagcaagagcgaggacaaggagagcctgaccgaggacgccagcaagaccagaaagcagcccctgagcaagaagaccaagaagagccacatcgccaacgaggtggaggagaacgacagcatcttcgtgaagctgctgaagatcagcggcatcatcctgaagaccggcgagagccagaaccagctggccgtggaccagatcgccttccagaagaagctgttccagaccctgagaagacaccccagctaccccaagatcatcgaggagttcgtgagcggcctggagagctacatcgaggacgaggacagcttcagaaactgcctgctgagctgcgagagactgcaggacgaggaggccagcatgggcgccagctacagcaagagcctgatcaagctgctgctgggcatcgacatcctgcagcccgccatcatcaagaccctgttcgagaagctgcccgagtacttcttcgagaacaagaacagcgacgagatcaacatccccagactgatcgtgagccagctgaagtggctggacagagtggtggacggcaaggacctgaccaccaagatcatgcagctgatcagcatcgcccccgagaacctgcagcacgacatcatcaccagcctgcccgagatcctgggcgacagccagcacgccgacgtgggcaaggagctgagcgacctgctgatcgagaacaccagcctgaccgtgcccatcctggacgtgctgagcagcctgagactggaccccaacttcctgctgaaggtgagacagctggtgatggacaagctgagcagcatcagactggaggacctgcccgtgatcatcaagttcatcctgcacagcgtgaccgccatggacaccctggaggtgatcagcgagctgagagagaagctggacctgcagcactgcgtgctgcccagcagactgcaggccagccaggtgaagctgaagagcaagggcagagccagcagcagcggcaaccaggagagcagcggccagagctgcatcatcctgctgttcgacgtgatcaagagcgccatcagatacgagaagaccatcagcgaggcctggatcaaggccatcgagaacaccgccagcgtgagcgagcacaaggtgttcgacctggtgatgctgttcatcatctacagcaccaacacccagaccaagaagtacatcgacagagtgctgagaaacaagatcagaagcggctgcatccaggagcagctgctgcagagcaccttcagcgtgcactacctggtgctgaaggacatgtgcagcagcatcctgagcctggcccagagcctgctgcacagcctggaccagagcatcatcagcttcggcagcctgctgtacaagtacgccttcaagttcttcgacacctactgccagcaggaggtggtgggcgccctggtgacccacatctgcagcggcaacgaggccgaggtggacaccgccctggacgtgctgctggagctggtggtgctgaaccccagcgccatgatgatgaacgccgtgttcgtgaagggcatcctggactacctggacaacatcagcccccagcagatcagaaagctgttctacgtgctgagcaccctggccttcagcaagcagaacgaggccagcagccacatccaggacgacatgcacctggtgatcagaaagcagctgagcagcaccgtgttcaagtacaagctgatcggcatcatcggcgccgtgaccatggccggcatcatggccgccgacagaagcgagagccccagcctgacccaggagagagccaacctgagcgacgagcagtgcacccaggtgaccagcctgctgcagctggtgcacagctgcagcgagcagagcccccaggccagcgccctgtactacgacgagttcgccaacctgatccagcacgagaagctggaccccaaggccctggagtgggtgggccacaccatctgcaacgacttccaggacgccttcgtggtggacagctgcgtggtgcccgagggcgacttccccttccccgtgaaggccctgtacggcctggaggagtacgacacccaggacggcatcgccatcaacctgctgcccctgctgttcagccaggacttcgccaaggacggcggccccgtgaccagccaggagagcggccagaagctggtgagccccctgtgcctggccccctacttcagactgctgagactgtgcgtggagagacagcacaacggcaacctggaggagatcgacggcctgctggactgccccatcttcctgaccgacctggagcccggcgagaagctggagagcatgagcgccaaggagagaagcttcatgtgcagcctgatcttcctgaccctgaactggttcagagagatcgtgaacgccttctgccaggagaccagccccgagatgaagggcaaggtgctgaccagactgaagcacatcgtggagctgcagatcatcctggagaagtacctggccgtgacccccgactacgtgccccccctgggcaacttcgacgtggagaccctggacatcaccccccacaccgtgaccgccatcagcgccaagatcagaaagaagggcaagatcgagagaaagcagaagaccgacggcagcaagaccagcagcagcgacaccctgagcgaggagaagaacagcgagtgcgaccccacccccagccacagaggccagctgaacaaggagttcaccggcaaggaggagaagaccagcctgctgctgcacaacagccacgccttcttcagagagctggacatcgaggtgttcagcatcctgcactgcggcctggtgaccaagttcatcctggacaccgagatgcacaccgaggccaccgaggtggtgcagctgggcccccccgagctgctgttcctgctggaggacctgagccagaagctggagagcatgctgaccccccccatcgccagaagagtgcccttcctgaagaacaagggcagcagaaacatcggcttcagccacctgcagcagagaagcgcccaggagatcgtgcactgcgtgttccagctgctgacccccatgtgcaaccacctggagaacatccacaactacttccagtgcctggccgccgagaaccacggcgtggtggacggccccggcgtgaaggtgcaggagtaccacatcatgagcagctgctaccagagactgctgcagatcttccacggcctgttcgcctggagcggcttcagccagcccgagaaccagaacctgctgtacagcgccctgcacgtgctgagcagcagactgaagcagggcgagcacagccagcccctggaggagctgctgagccagagcgtgcactacctgcagaacttccaccagagcatccccagcttccagtgcgccctgtacctgatcagactgctgatggtgatcctggagaagagcaccgccagcgcccagaacaaggagaagatcgccagcctggccagacagttcctgtgcagagtgtggcccagcggcgacaaggagaagagcaacatcagcaacgaccagctgcacgccctgctgtgcatctacctggagcacaccgagagcatcctgaaggccatcgaggagatcgccggcgtgggcgtgcccgagctgatcaacagccccaaggacgccagcagcagcaccttccccaccctgaccagattcatgaagagaaacagcagcaccggcacctggctgttcgagaccagcgtgagcagcagcacctag

SEQ ID NO: 27444 - DNA, 4356 bp, Artificial Sequence
  derived and/or modified sequence
atggtgagcaagagaagactgagcaagagcgaggacaaggagagcctgaccgaggacgccagcaagaccagaaagcagcccctgagcaagaagaccaagaagagccacatcgccaacgaggtggaggagaacgacagcatcttcgtgaagctgctgaagatcagcggcatcatcctgaagaccggcgagagccagaaccagctggccgtggaccagatcgccttccagaagaagctgttccagaccctgagaagacaccccagctaccccaagatcatcgaggagttcgtgagcggcctggagagctacatcgaggacgaggacagcttcagaaactgcctgctgagctgcgagagactgcaggacgaggaggccagcatgggcgccagctacagcaagagcctgatcaagctgctgctgggcatcgacatcctgcagcccgccatcatcaagaccctgttcgagaagctgcccgagtacttcttcgagaacaagaacagcgacgagatcaacatccccagactgatcgtgagccagctgaagtggctggacagagtggtggacggcaaggacctgaccaccaagatcatgcagctgatcagcatcgcccccgagaacctgcagcacgacatcatcaccagcctgcccgagatcctgggcgacagccagcacgccgacgtgggcaaggagctgagcgacctgctgatcgagaacaccagcctgaccgtgcccatcctggacgtgctgagcagcctgagactggaccccaacttcctgctgaaggtgagacagctggtgatggacaagctgagcagcatcagactggaggacctgcccgtgatcatcaagttcatcctgcacagcgtgaccgccatggacaccctggaggtgatcagcgagctgagagagaagctggacctgcagcactgcgtgctgcccagcagactgcaggccagccaggtgaagctgaagagcaagggcagagccagcagcagcggcaaccaggagagcagcggccagagctgcatcatcctgctgttcgacgtgatcaagagcgccatcagatacgagaagaccatcagcgaggcctggatcaaggccatcgagaacaccgccagcgtgagcgagcacaaggtgttcgacctggtgatgctgttcatcatctacagcaccaacacccagaccaagaagtacatcgacagagtgctgagaaacaagatcagaagcggctgcatccaggagcagctgctgcagagcaccttcagcgtgcactacctggtgctgaaggacatgtgcagcagcatcctgagcctggcccagagcctgctgcacagcctggaccagagcatcatcagcttcggcagcctgctgtacaagtacgccttcaagttcttcgacacctactgccagcaggaggtggtgggcgccctggtgacccacatctgcagcggcaacgaggccgaggtggacaccgccctggacgtgctgctggagctggtggtgctgaaccccagcgccatgatgatgaacgccgtgttcgtgaagggcatcctggactacctggacaacatcagcccccagcagatcagaaagctgttctacgtgctgagcaccctggccttcagcaagcagaacgaggccagcagccacatccaggacgacatgcacctggtgatcagaaagcagctgagcagcaccgtgttcaagtacaagctgatcggcatcatcggcgccgtgaccatggccggcatcatggccgccgacagaagcgagagccccagcctgacccaggagagagccaacctgagcgacgagcagtgcacccaggtgaccagcctgctgcagctggtgcacagctgcagcgagcagagcccccaggccagcgccctgtactacgacgagttcgccaacctgatccagcacgagaagctggaccccaaggccctggagtgggtgggccacaccatctgcaacgacttccaggacgccttcgtggtggacagctgcgtggtgcccgagggcgacttccccttccccgtgaaggccctgtacggcctggaggagtacgacacccaggacggcatcgccatcaacctgctgcccctgctgttcagccaggacttcgccaaggacggcggccccgtgaccagccaggagagcggccagaagctggtgagccccctgtgcctggccccctacttcagactgctgagactgtgcgtggagagacagcacaacggcaacctggaggagatcgacggcctgctggactgccccatcttcctgaccgacctggagcccggcgagaagctggagagcatgagcgccaaggagagaagcttcatgtgcagcctgatcttcctgaccctgaactggttcagagagatcgtgaacgccttctgccaggagaccagccccgagatgaagggcaaggtgctgaccagactgaagcacatcgtggagctgcagatcatcctggagaagtacctggccgtgacccccgactacgtgccccccctgggcaacttcgacgtggagaccctggacatcaccccccacaccgtgaccgccatcagcgccaagatcagaaagaagggcaagatcgagagaaagcagaagaccgacggcagcaagaccagcagcagcgacaccctgagcgaggagaagaacagcgagtgcgaccccacccccagccacagaggccagctgaacaaggagttcaccggcaaggaggagaagaccagcctgctgctgcacaacagccacgccttcttcagagagctggacatcgaggtgttcagcatcctgcactgcggcctggtgaccaagttcatcctggacaccgagatgcacaccgaggccaccgaggtggtgcagctgggcccccccgagctgctgttcctgctggaggacctgagccagaagctggagagcatgctgaccccccccatcgccagaagagtgcccttcctgaagaacaagggcagcagaaacatcggcttcagccacctgcagcagagaagcgcccaggagatcgtgcactgcgtgttccagctgctgacccccatgtgcaaccacctggagaacatccacaactacttccagtgcctggccgccgagaaccacggcgtggtggacggccccggcgtgaaggtgcaggagtaccacatcatgagcagctgctaccagagactgctgcagatcttccacggcctgttcgcctggagcggcttcagccagcccgagaaccagaacctgctgtacagcgccctgcacgtgctgagcagcagactgaagcagggcgagcacagccagcccctggaggagctgctgagccagagcgtgcactacctgcagaacttccaccagagcatccccagcttccagtgcgccctgtacctgatcagactgctgatggtgatcctggagaagagcaccgccagcgcccagaacaaggagaagatcgccagcctggccagacagttcctgtgcagagtgtggcccagcggcgacaaggagaagagcaacatcagcaacgaccagctgcacgccctgctgtgcatctacctggagcacaccgagagcatcctgaaggccatcgaggagatcgccggcgtgggcgtgcccgagctgatcaacagccccaaggacgccagcagcagcaccttccccaccctgaccagacacaccttcgtggtgttcttcagagtgatgatggccgagctggagaagaccgtgaagaagatcgagcccggcaccgccgccgacagccagcagatccacgaggagaagctgctgtactggaacatggccgtgagagacttcagcatcctgatcaacctgatcaaggtgttcgacagccaccccgtgctgcacgtgtgcctgaagtacggcagactgttcgtggaggccttcctgaagcagtgcatgcccctgctggacttcagcttcagaaagcacagagaggacgtgctgagcctgctggagaccttccagctggacaccagactgctgcaccacctgtgcggccacagcaagatccaccaggacaccagactgacccagcacgtgcccctgctgaagaagaccctggagctgctggtgtgcagagtgaaggccatgctgaccctgaacaactgcagagaggccttctggctgggcaacctgaagaacagagacctgcagggcgaggagatcaagagccagaacagccaggagagcaccgccgacgagagcgaggacgacatgagcagccaggccagcaagagcaaggccaccgaggacggcgaggaggacgaggtgagcgccggcgagaaggagcaggacagcgacgagagctacgacgacagcgactag

SEQ ID NO: 27445 - protein, 364 aa, Artificial Sequence
  derived and/or modified sequence
MEHNGSASNADKIHQNRLSSVTEDEDQDAALTIVTVLDKVASIVDSVQASQKRIEERHREMENAIKSVQIDLLKLSQSHSNTGHIINKLFEKTRKVSAHIKDVKARVEKQQIHVKKVEVKQEEIMKKNKFRVVIFQEKFRCPTSLSVVKDRNLTENQEEDDDDIFDPPVDLSSDEEYYVEESRSARLRKSGKEHIDNIKKAFSKENMQKTRQNLDKKVNRIRTRIVTPERRERLRQSGERLRQSGERLRQSGERFKKSISNAAPSKEAFKMRSLRKGKDRTVAEGEECAREMGVDIIARSESLGPISELYSDELSEPEHEAARPVYPPHEGREIPTPEPLKVTFKSQVKVEDDESLLLDLKHSS

SEQ ID NO: 27446 - DNA, 1095 bp, Artificial Sequence
  derived and/or modified sequence
atggagcacaacggttcagcaagtaacgcagataagatccaccagaataggcttagcagtgtgacagaagatgaagatcaggacgccgccctcacaattgtgactgtcctggataaagtagcctcgatcgtggatagtgtacaggcatcacagaaaaggatcgaggagcgacaccgtgaaatggaaaatgcaatcaagtccgtgcagatcgacctcctgaagttgtcacagtcccactctaacaccggacatattattaataaattattcgaaaaaacacgcaaagtgtcagcccatatcaaggatgtgaaagccagggttgaaaagcaacagatccacgttaagaaggtcgaggtgaagcaggaagaaatcatgaagaagaataaatttcgagtcgtcatctttcaggagaagtttcgctgccccacatcattgtcagtggtgaaggatcgtaatttaacagagaatcaggaagaggacgacgatgatattttcgatccacctgtggatctgtctagcgatgaagagtattatgtggaggagtcgcggtccgccagactgcgcaagagtgggaaggagcacatcgataacattaagaaggccttttcaaaagagaatatgcagaagacaaggcagaacttggataaaaaggtcaatcgtattaggaccaggattgtgaccccagagaggagagaaaggttgaggcaatccggggagcgcctgagacaatcaggggagagactgcgccagtccggcgagcggtttaaaaagagtatatctaacgcggccccttccaaagaggcattcaagatgcggagccttcgaaaaggtaaggatcgtactgtcgcagagggagaagagtgcgctcgggaaatgggtgtggatataatcgcaaggtccgagtctctgggacctatcagcgagctgtacagcgatgagttgtccgagcccgaacatgaagccgcacggcccgtgtacccgcctcatgaaggtagagaaatccccacacctgagcccctgaaggttacatttaagtcccaagtgaaggtcgaagacgatgagtcactgctcctggacctgaagcattctagctag

SEQ ID NO: 27447 - DNA, 1095 bp, Artificial Sequence
  derived and/or modified sequence
atggagcacaacggcagcgccagcaatgctgacaagatccaccagaaccggctgagctctgtgacagaagatgaggaccaggatgctgccctgaccatcgtgacagtgctggacaaggtggccagcatcgtggacagcgtgcaggccagccagaagagaattgaggagcggcaccgggagatggagaatgccatcaagtctgtgcagattgacctgctgaagctgagccagagccacagcaacacaggccacatcatcaacaagctgtttgagaagaccaggaaggtgtctgcccacatcaaggatgtgaaggcccgggtggagaagcagcagatccacgtgaagaaggtggaggtgaagcaggaggagatcatgaagaagaacaagttccgggtggtgatcttccaggagaagttccgctgccccaccagcctgtctgtggtgaaggacaggaacctgacagagaaccaggaggaggatgatgatgacatctttgatcctcctgtggacctgagcagtgatgaggagtactacgtggaggagagccgcagcgcccggctgaggaagagcggcaaggagcacatcgacaacatcaagaaggccttcagcaaagaaaacatgcagaagacccggcagaacctggacaagaaggtgaaccgcatccgcaccagaattgtgaccccagagcggcgggagcggctgcggcagagcggggagcggctgcggcagagcggggagcggctgcggcagagcggggagcgcttcaagaagagcatcagcaatgctgcccccagcaaggaggccttcaagatgaggagcctgaggaagggcaaggacagaacagtggccgagggggaggagtgtgcccgggagatgggcgtggacatcatcgcccggtctgagagcctgggccccatcagcgagctgtacagtgatgagctgtctgagcctgagcatgaagctgcccggcctgtgtacccacctcatgagggccgggagatccccaccccagagcccctgaaggtgaccttcaagagccaggtgaaggtggaggatgatgagagcctgctgctggacctgaagcacagcagctag

SEQ ID NO: 27448 - DNA, 1095 bp, Artificial Sequence
  derived and/or modified sequence
atggagcacaacggcagcgccagcaacgccgacaagatccaccagaaccgcctgagcagtgtgacagaagatgaagaccaggatgccgcattaacgatagtgaccgtgttggacaaagtcgcctccattgttgacagtgtacaggctagtcagaaacgcattgaagagagacaccgagagatggaaaacgccattaaatctgtgcagattgacctactgaagctcagtcaaagccacagtaacactggccatatcataaacaagctcttcgagaaaactcgaaaagtaagcgctcatatcaaggatgtcaaggcaagggtcgagaaacagcaaattcacgtcaagaaagtggaagtcaagcaggaagagataatgaaaaaaaataagtttagggttgttatattccaggaaaagtttcgatgcccaaccagtctgagcgtggttaaagataggaatttaactgagaaccaagaggaggatgacgatgatatcttcgatccccctgtggatctctccagcgatgaggaatattacgtcgaggagagccggtccgctcgcctgagaaaatcagggaaagaacacatagacaacatcaaaaaggcattcagcaaggaaaatatgcagaagacaagacaaaacctggacaaaaaggtgaaccgcatcagaacgcgaattgtaactccagagcggcgggaacgcctgaggcaatccggagaaaggctgagacagtccggtgagagactcagacagtcaggggaacggttcaagaaaagcatctctaacgctgctccatctaaggaagctttcaaaatgcggtccctccgcaagggaaaggatcggaccgtcgctgaaggggaagaatgcgctcgggagatgggcgtggacattatagcccgatctgaaagcctcggtccgatatccgagttatactccgatgaactgtctgaaccagaacatgaagctgcccggcccgtgtaccccccccacgagggccgggagataccaacccccgaaccccttaaagtgacttttaaatcccaagtcaaggttgaggatgatgagtcactcctcttagatctgaagcactctagctag

SEQ ID NO: 27449 - DNA, 1095 bp, Artificial Sequence
  derived and/or modified sequence
atggagcacaatgggtccgcaagcaacgccgataagatccaccagaacagactgtcaagcgtgactgaggacgaggatcaggatgccgctctcacaatcgttaccgtacttgataaagtggcaagcatagtggattctgttcaggcgagtcagaaaaggatcgaagagagacatcgggagatggagaacgctatcaaaagcgtgcagattgacctactgaagctcagccaatcccattctaataccgggcatatcatcaataaattgttcgagaagacccggaaggttagcgcccatataaaagacgtgaaggctcgggtggagaaacagcaaattcacgtaaaaaaggtcgaggtcaaacaggaggaaatcatgaagaaaaataagtttcgtgttgtcatctttcaggaaaaatttcgttgtccaactagcctttctgttgtcaaggatcggaacttaactgaaaatcaggaggaggacgacgacgatatcttcgatcccccagtggatctgtcctcagacgaggaatattatgtggaggagtctagaagtgcgaggttgcgcaagagcgggaaggagcacattgacaacatcaagaaggccttttcaaaggagaatatgcagaaaactaggcaaaacttagacaagaaagttaacagaatccggaccaggatcgtcactccagagcggagagagcgccttagacagagcggcgagcgccttagacagtctggggagagattacgtcagtccggagagcgctttaagaagtccatttccaatgccgctccctcaaaagaggcatttaaaatgcgctccctgcgtaaaggcaaagatcgcaccgtggctgaaggagaagaatgtgctagagagatgggagtggatatcattgccaggagtgagtctctgggccctataagtgagctttactcagacgaattatctgaaccagagcatgaagccgctcggccagtatacccccctcacgaaggccgagagattcccacgcccgagcctctgaaagtcaccttcaaatctcaagtgaaagtggaggatgatgaaagtctgctgctcgatttgaagcactcaagttag

SEQ ID NO: 27450 - DNA, 2615 bp, Artificial Sequence
  derived and/or modified sequence
gactttttgctccaagtgccagaattgattgtggttaggacatcttacgctgagaaataaataaaatggaacataatgggtctgcttcaaatgctgataaaatccaccagaatcgcctgtcgagtgttacagaagatgaagaccaagacgctgctcttaccattgtgactgtgctggacaaagtagcctccatcgtggacagtgtgcaggcaagccagaagagaatagaagagagacacagggaaatggaaaatgccataaaatccgtccagattgacctgttgaagctttcacagtcgcatagcaatacagggcatatcattaacaaattgtttgagaaaacccgaaaagttagtgctcacattaaagatgtgaaagcccgggtggagaagcaacaaattcatgttaaaaaagttgaagtcaagcaagaggaaataatgaagaaaaacaaattccgcgtggtaatattccaggagaagtttcggtgtccgacatccctgtctgttgttaaagacagaaacctaactgagaaccaagaagaggatgatgatgatatctttgatcccccagtagatctgtcttcggatgaagaatattatgttgaagaaagcagatctgccaggcttaggaagtcaggcaaggagcacattgataatatcaagaaggcattttccaaagaaaacatgcagaagacacggcagaatcttgacaagaaagtgaacagaattagaactagaatagtgaccccggagaggagagagaggctaaggcagtcaggagagaggctgagacagtcaggggagaggctgagacagtcaggggagaggtttaagaaatctatttctaatgcagctccctcaaaggaagcttttaagatgcgcagcctcaggaaaggtaaggaccgaacagtggctgaaggtgaggaatgtgccagggagatgggtgtggacatcattgccaggagcgagtctctgggccccatcagtgagctctactctgatgagctcagtgaaccagaacacgaggcagccaggccggtgtatcctccccatgaaggaagggaaatccccacccccgagcctttaaaagttacttttaaatctcaggtgaaagtagaggatgatgaatctcttttgttagatttaaagcactcatcgtaaagaggaattaagtatatcctaaatatgaatctcctaatcatgcagttttagtttgaatagtgtagtcgtctacatttctgtgccatgtaggaaaacataaatgtattttttttcttatatttaaaatcttgaagataatataaatattattatcactctttctcatggcagctgtggattttttagttcctttctcttgtccaccagaaaaatagtttcctaggttgggccagttacgtgtttggtaagggcaactttgcggccgtcatttgcaggagaactctaaatattggttaggattaatattgtggccagcctcaaaggggaataactcatgtgtgggttatatcgtccagatgttcagatcaacagatttgttagtaaattagcagtcacaccccttttttgatgctttcacattaaaaaattgaagttttggacttgagcatttggctctagtatcatagctttacttataagaaaaccctgggcaagtcatctgcttattctcatcagtaaaaatggagagggttggcctctgctgcctgcctcagaggactgttgtgatgatcaaaggaaatggtacacattctgggggaacaagaagcacacccagagaaaacaagcctcatcagttcctccaaaacagaatggaaagagttacaccttctgaaaaagccctcagcaccaatcaataaggtcctaggttggagagaaactaaagctggtcttcagaagccttttcacagaatcaagagtgaaaaataagtaaatgtttgggtgaccactttttcatcagactaactatatcttgggttttagttgggtctcaaaatgttccccagccagaccctttctaatttccttttgattaagatctttggtggactatagcactaaatttgtttaagcagtatgaggcataaaattgtgactatgtttctaaagtcggccctgatgcattgggtttggaaatgaccacaaatattcctgttttcctgagtgtacccttcagggtccagctgtccaaaacagtgttgataggagttcatcatagctgctttgggaggaagccagattctccttatcttttagctttagatcgtggaatccaggaagtagaacaatgtctattgttgctaaagaaagaaagaaatgggccgggtgtggtggctcacggggagtaatcccagcactttgcgaggccgaggtgggtgaatcacctgaggtcagaagttcacgaccagcctgaccaacatggcgaaaccctgactctactgaaaatacaaaaattagctgggcatggtggcatgcgcctgtcccagctactcaggaggctgagacaggagaattgcctgaacccaggaggcggaggttgcagtgagccgagattgtgccactgcactcaagcctgggcaaaagagccagactctgtttcaaaaaaaaagaaaaaaa

SEQ ID NO: 27451 - DNA, 1095 bp, Artificial Sequence
  derived and/or modified sequence
atggagcacaacggcagcgccagcaacgccgacaagatccaccagaacagactgagcagcgtgaccgaggacgaggaccaggacgccgccctgaccatcgtgaccgtgctggacaaggtggccagcatcgtggacagcgtgcaggccagccagaagagaatcgaggagagacacagagagatggagaacgccatcaagagcgtgcagatcgacctgctgaagctgagccagagccacagcaacaccggccacatcatcaacaagctgttcgagaagaccagaaaggtgagcgcccacatcaaggacgtgaaggccagagtggagaagcagcagatccacgtgaagaaggtggaggtgaagcaggaggagatcatgaagaagaacaagttcagagtggtgatcttccaggagaagttcagatgccccaccagcctgagcgtggtgaaggacagaaacctgaccgagaaccaggaggaggacgacgacgacatcttcgacccccccgtggacctgagcagcgacgaggagtactacgtggaggagagcagaagcgccagactgagaaagagcggcaaggagcacatcgacaacatcaagaaggccttcagcaaggagaacatgcagaagaccagacagaacctggacaagaaggtgaacagaatcagaaccagaatcgtgacccccgagagaagagagagactgagacagagcggcgagagactgagacagagcggcgagagactgagacagagcggcgagagattcaagaagagcatcagcaacgccgcccccagcaaggaggccttcaagatgagaagcctgagaaagggcaaggacagaaccgtggccgagggcgaggagtgcgccagagagatgggcgtggacatcatcgccagaagcgagagcctgggccccatcagcgagctgtacagcgacgagctgagcgagcccgagcacgaggccgccagacccgtgtaccccccccacgagggcagagagatccccacccccgagcccctgaaggtgaccttcaagagccaggtgaaggtggaggacgacgagagcctgctgctggacctgaagcacagcagctag

SEQ ID NO: 27452 - protein, 267 aa, Artificial Sequence
  derived and/or modified sequence
MANCERTFIAIKPDGVQRGLVGEIIKRFEQKGFRLVGLKFMQASEDLLKEHYVDLKDRPFFAGLVKYMHSGPVVAMVWEGLNVVKTGRVMLGETNPADSKPGTIRGDFCIQVGRTMANLERTFIAIKPDGVQRGLVGEIIKRFEQKGFRLVAMKFLRASEEHLKQHYIDLKDRPFFPGLVKYMNSGPVVAMVWEGLNVVKTGRVMLGETNPADSKPGTIRGDFCIQVGRNIIHGSDSVKSAEKEISLWFKPEELVDYKSCAHDWVYE

SEQ ID NO: 27453 - protein, 292 aa, Artificial Sequence
  derived and/or modified sequence
MVLLSTLGIVFQGEGPPISSCDTGTMANCERTFIAIKPDGVQRGLVGEIIKRFEQKGFRLVGLKFMQASEDLLKEHYVDLKDRPFFAGLVKYMHSGPVVAMVWEGLNVVKTGRVMLGETNPADSKPGTIRGDFCIQVGRTMANLERTFIAIKPDGVQRGLVGEIIKRFEQKGFRLVAMKFLRASEEHLKQHYIDLKDRPFFPGLVKYMNSGPVVAMVWEGLNVVKTGRVMLGETNPADSKPGTIRGDFCIQVGRNIIHGSDSVKSAEKEISLWFKPEELVDYKSCAHDWVYE

SEQ ID NO: 27454 - protein, 77 aa, Artificial Sequence [sequence omitted]

SEQ ID NO: 27455 - protein, 152 aa, Artificial Sequence
  derived and/or modified sequence
MANLERTFIAIKPDGVQRGLVGEIIKRFEQKGFRLVAMKFLRASEEHLKQHYIDLKDRPFFPGLVKYMNSGPVVAMVWEGLNVVKTGRVMLGETNPADSKPGTIRGDFCIQVGRNIIHGSDSVKSAEKEISLWFKPEELVDYKSCAHDWVYE

SEQ ID NO: 27456 - DNA, 804 bp, Artificial Sequence
  derived and/or modified sequence
atggccaactgcgagagaaccttcatcgccatcaagcccgacggcgtgcagagaggcctggtgggcgagatcatcaagagattcgagcagaagggcttcagactggtgggcctgaagttcatgcaggccagcgaggacctgctgaaggagcactacgtggacctgaaggacagacccttcttcgccggcctggtgaagtacatgcacagcggccccgtggtggccatggtgtgggagggcctgaacgtggtgaagaccggcagagtgatgctgggcgagaccaaccccgccgacagcaagcccggcaccatcagaggcgacttctgcatccaggtgggcagaaccatggccaacctggagagaaccttcatcgccatcaagcccgacggcgtgcagagaggcctggtgggcgagatcatcaagagattcgagcagaagggcttcagactggtggccatgaagttcctgagagccagcgaggagcacctgaagcagcactacatcgacctgaaggacagacccttcttccccggcctggtgaagtacatgaacagcggccccgtggtggccatggtgtgggagggcctgaacgtggtgaagaccggcagagtgatgctgggcgagaccaaccccgccgacagcaagcccggcaccatcagaggcgacttctgcatccaggtgggcagaaacatcatccacggcagcgacagcgtgaagagcgccgagaaggagatcagcctgtggttcaagcccgaggagctggtggactacaagagctgcgcccacgactgggtgtacgagtag

SEQ ID NO: 27457 - DNA, 879 bp, Artificial Sequence
  derived and/or modified sequence
atggtgctgctgagcaccctgggcatcgtgttccagggcgagggcccccccatcagcagctgcgacaccggcaccatggccaactgcgagagaaccttcatcgccatcaagcccgacggcgtgcagagaggcctggtgggcgagatcatcaagagattcgagcagaagggcttcagactggtgggcctgaagttcatgcaggccagcgaggacctgctgaaggagcactacgtggacctgaaggacagacccttcttcgccggcctggtgaagtacatgcacagcggccccgtggtggccatggtgtgggagggcctgaacgtggtgaagaccggcagagtgatgctgggcgagaccaaccccgccgacagcaagcccggcaccatcagaggcgacttctgcatccaggtgggcagaaccatggccaacctggagagaaccttcatcgccatcaagcccgacggcgtgcagagaggcctggtgggcgagatcatcaagagattcgagcagaagggcttcagactggtggccatgaagttcctgagagccagcgaggagcacctgaagcagcactacatcgacctgaaggacagacccttcttccccggcctggtgaagtacatgaacagcggccccgtggtggccatggtgtgggagggcctgaacgtggtgaagaccggcagagtgatgctgggcgagaccaaccccgccgacagcaagcccggcaccatcagaggcgacttctgcatccaggtgggcagaaacatcatccacggcagcgacagcgtgaagagcgccgagaaggagatcagcctgtggttcaagcccgaggagctggtggactacaagagctgcgcccacgactgggtgtacgagtag

SEQ ID NO: 27458 - DNA, 804 bp, Artificial Sequence
  derived and/or modified sequence
atggcaaactgcgagcgcacgttcattgccattaagccagatggggtacagaggggattggtgggcgagataatcaagcggtttgaacaaaaagggtttcggctcgtgggactgaagttcatgcaggctagcgaggatctgctgaaggagcattatgttgaccttaaggaccgtcccttcttcgccgggcttgtaaaatacatgcattctgggcccgtagtggccatggtctgggagggacttaatgttgtcaaaactggcagagtcatgctcggagagacaaacccagctgactcgaaacctggaactattcggggggacttctgtattcaggtcggtcggaccatggcaaatctggagcgcacatttatcgccattaagccggatggggtgcagcgaggtctggttggggaaatcattaagcgcttcgagcagaaaggttttagactggtcgcaatgaaattccttcgcgcctcagaagaacacttaaaacagcattacatcgacctgaaggacagaccatttttccccggactggttaaatatatgaattccggtcctgtcgtggcaatggtgtgggagggactgaatgtggtgaaaacggggcgagtgatgctcggcgagactaaccccgccgattccaagccaggtaccatcagaggggacttttgcatacaagtagggcgaaatatcattcacggctctgactctgtgaagtcagcagagaaagagatatccttgtggttcaagccagaggaactggtggactataagtcatgcgctcacgactgggtctacgagtag

SEQ ID NO: 27459 - DNA, 879 bp, Artificial Sequence
  derived and/or modified sequence
atggtcctcctttcgaccctgggcattgtcttccagggcgagggccctcctatttccagctgtgatactggcaccatggctaattgtgagcgtacatttatagcaattaaacctgatggcgtccaaagaggactagtgggggaaataattaagcgatttgagcagaagggatttagattggtgggcctgaagtttatgcaggccagcgaggatctgctcaaggaacattacgtcgacctaaaggatagacccttcttcgctgggttggtgaaatacatgcatagcggcccggtggttgccatggtatgggaaggactgaatgtcgtcaagaccggacgtgttatgctcggagagaccaacccagccgactcaaagcccggcacaatcagaggggatttctgcattcaggtgggccgcaccatggccaacctagagcgtaccttcatcgctatcaagcctgacggcgtccagagggggctggtcggcgagatcattaagcgcttcgaacagaaagggttcagactcgtcgcaatgaagttccttagagcatcagaagagcacctgaagcagcattacattgacttgaaggacagacccttcttcccgggcctggtgaagtacatgaattccggcccagtggtcgctatggtgtgggagggactgaacgtcgtgaagacaggacgcgtcatgctgggcgagaccaatcccgccgattctaaacctggcaccatccgcggtgatttctgcatccaggtgggccggaacatcatccacggcagcgacagcgtcaagagcgccgagaaagaaataagtctgtggttcaaacctgaggagcttgttgattataaatcttgtgcccatgactgggtgtatgagtag

SEQ ID NO: 27460 - DNA, 804 bp, Artificial Sequence
  derived and/or modified sequence
atggccaactgtgagaggaccttcatcgccatcaagccagatggagtgcagaggggcctggtgggggagatcatcaagagatttgagcagaagggcttccggctggtgggcctgaagttcatgcaggccagcgaggacctgctgaaggagcactacgtggacctgaaggaccggcccttctttgctggcctggtgaagtacatgcacagcggccctgtggtggccatggtgtgggagggcctgaatgtggtgaagacaggccgggtgatgctgggggagaccaacccagctgacagcaagccaggcaccatccggggggacttctgcatccaggtgggccgcaccatggccaacctggagaggaccttcatcgccatcaagccagatggagtgcagaggggcctggtgggggagatcatcaagagatttgagcagaagggcttccggctggtggccatgaagttcctgcgggccagcgaggagcacctgaagcagcactacatcgacctgaaggaccggcccttcttccctggcctggtgaagtacatgaacagcggccctgtggtggccatggtgtgggagggcctgaatgtggtgaagacaggccgggtgatgctgggggagaccaacccagctgacagcaagccaggcaccatccggggggacttctgcatccaggtgggcaggaacatcatccacggcagtgacagcgtgaagtctgctgagaaggagatcagcctgtggttcaagccagaggagctggtggactacaagagctgtgcccatgactgggtgtatgaatag

SEQ ID NO: 27461 - DNA, 879 bp, Artificial Sequence
  derived and/or modified sequence
atggtgctgctgagcaccctgggcatcgtgttccagggcgagggcccccccatcagcagctgtgacaccggcaccatggccaactgtgagaggaccttcatcgccatcaagccagatggagtgcagaggggcctggtgggggagatcatcaagagatttgagcagaagggcttccggctggtgggcctgaagttcatgcaggccagcgaggacctgctgaaggagcactacgtggacctgaaggaccggcccttctttgctggcctggtgaagtacatgcacagcggccctgtggtggccatggtgtgggagggcctgaatgtggtgaagacaggccgggtgatgctgggggagaccaacccagctgacagcaagccaggcaccatccggggggacttctgcatccaggtgggccgcaccatggccaacctggagaggaccttcatcgccatcaagccagatggagtgcagaggggcctggtgggggagatcatcaagagatttgagcagaagggcttccggctggtggccatgaagttcctgcgggccagcgaggagcacctgaagcagcactacatcgacctgaaggaccggcccttcttccctggcctggtgaagtacatgaacagcggccctgtggtggccatggtgtgggagggcctgaatgtggtgaagacaggccgggtgatgctgggggagaccaacccagctgacagcaagccaggcaccatccggggggacttctgcatccaggtgggcaggaacatcatccacggcagtgacagcgtgaagtctgctgagaaggagatcagcctgtggttcaagccagaggagctggtggactacaagagctgtgcccatgactgggtgtatgaatag

SEQ ID NO: 27462 - DNA, 1021 bp, Artificial Sequence
  derived and/or modified sequence
aaccacgtgggtcccgggcgcgtttcgggtgctggcggctgcagccggagttcaaacctaagcagctggaaggaaccatggccaactgtgagcgtaccttcattgcgatcaaaccagatggggtccagcggggtcttgtgggagagattatcaagcgttttgagcagaaaggattccgccttgttggtctgaaattcatgcaagcttccgaagatcttctcaaggaacactacgttgacctgaaggaccgtccattctttgccggcctggtgaaatacatgcactcagggccggtagttgccatggtctgggaggggctgaatgtggtgaagacgggccgagtcatgctcggggagaccaaccctgcagactccaagcctgggaccatccgtggagacttctgcatacaagttggcaggaccatggccaacctggagcgcaccttcatcgccatcaagccggacggcgtgcagcgcggcctggtgggcgagatcatcaagcgcttcgagcagaagggattccgcctcgtggccatgaagttcctccgggcctctgaagaacacctgaagcagcactacattgacctgaaagaccgaccattcttccctgggctggtgaagtacatgaactcagggccggttgtggccatggtctgggaggggctgaacgtggtgaagacaggccgagtgatgcttggggagaccaatccagcagattcaaagccaggcaccattcgtggggacttctgcattcaggttggcaggaacatcattcatggcagtgattcagtaaaaagtgctgaaaaagaaatcagcctatggtttaagcctgaagaactggttgactacaagtcttgtgctcatgactgggtctatgaataagaggtggacacaacagcagtctccttcagcacggcgtggtgtgtccctggacacagctcttcattccattgacttagaggcaacaggattgatcattcttttatagagcatatttgccaataaagcttttggaagccgga

SEQ ID NO: 27463 - DNA, 1193 bp, Artificial Sequence
  derived and/or modified sequence
ggagttcaaacctaagcagctggaagggccctgtggctaggtaccatagagtctctacacaggactaagtcagcctggtgtgcaggggaggcagacacacaaacagaaaattggactacagtgctaagatgctgtaagaagaggttaactaaaggacaggaagatggggccaagagatggtgctactgtctactttagggatcgtctttcaaggcgaggggcctcctatctcaagctgtgatacaggaaccatggccaactgtgagcgtaccttcattgcgatcaaaccagatggggtccagcggggtcttgtgggagagattatcaagcgttttgagcagaaaggattccgccttgttggtctgaaattcatgcaagcttccgaagatcttctcaaggaacactacgttgacctgaaggaccgtccattctttgccggcctggtgaaatacatgcactcagggccggtagttgccatggtctgggaggggctgaatgtggtgaagacgggccgagtcatgctcggggagaccaaccctgcagactccaagcctgggaccatccgtggagacttctgcatacaagttggcaggaccatggccaacctggagcgcaccttcatcgccatcaagccggacggcgtgcagcgcggcctggtgggcgagatcatcaagcgcttcgagcagaagggattccgcctcgtggccatgaagttcctccgggcctctgaagaacacctgaagcagcactacattgacctgaaagaccgaccattcttccctgggctggtgaagtacatgaactcagggccggttgtggccatggtctgggaggggctgaacgtggtgaagacaggccgagtgatgcttggggagaccaatccagcagattcaaagccaggcaccattcgtggggacttctgcattcaggttggcaggaacatcattcatggcagtgattcagtaaaaagtgctgaaaaagaaatcagcctatggtttaagcctgaagaactggttgactacaagtcttgtgctcatgactgggtctatgaataagaggtggacacaacagcagtctccttcagcacggcgtggtgtgtccctggacacagctcttcattccattgacttagaggcaacaggattgatcattcttttatagagcatatttgccaataaagcttttggaagccg

SEQ ID NO: 27464 - DNA, 804 bp, Artificial Sequence
  derived and/or modified sequence
atggccaactgcgagcggaccttcatcgccatcaagcccgacggcgttcagcgcggtcttgtgggtgagatcatcaagagatttgagcagaagggcttcagacttgtcgggttaaagttcatgcaggcttcggaggacctcctgaaagagcactacgtggacctcaaggaccgcccttttttcgcaggtctcgtaaaatacatgcacagtggcccggtggtggccatggtttgggaggggctcaatgtggtgaagacggggagggtcatgctgggcgagactaatcctgcagattccaagcccggtaccatcagaggtgacttctgtattcaagtagggcgcactatggccaacctcgaacggaccttcatagccatcaagccagacggagtccagcggggacttgtaggcgaaatcatcaaacgattcgaacagaagggatttcggctggtcgctatgaagttcctgcgggcttcagaagagcacctgaaacagcactatatcgatctcaaggatcgcccattcttccctggcctcgtaaaatatatgaactcaggcccagtcgtcgcaatggtctgggagggcctgaatgttgtgaagactgggagagttatgttgggggaaactaatcctgctgactccaaacccggtaccattcggggggatttctgtatccaggtgggccggaacatcattcacgggagtgatagtgtaaagtccgcagagaaggagatttccctttggtttaagcccgaggagctggtggactacaagagctgtgcccacgactgggtttacgagtag

SEQ ID NO: 27465 - DNA, 879 bp, Artificial Sequence
  derived and/or modified sequence
atggtgctgctgagcaccctgggcatcgtgttccagggcgagggcccccccatctcatcctgcgacaccggaaccatggctaattgcgagagaacatttattgcaatcaaaccggacggagtgcagcgcggcctcgtgggtgagatcattaaaagattcgaacagaaggggtttaggctagtaggtcttaagttcatgcaggcaagtgaggatctgctgaaggagcattatgtcgacttaaaagaccgaccattctttgcgggtctcgtgaagtacatgcattccggccccgtagtcgccatggtgtgggaaggcctgaacgtggtcaagaccgggagagtgatgttgggtgagacaaatccagccgatagcaagccgggaaccattcgaggagacttttgcatccaagtcggaaggaccatggcaaacctggagaggacatttatagcaatcaagcccgatggggtccagaggggtttggttggagaaattatcaaacgcttcgaacagaagggatttcggctagtggccatgaaatttctgagggcttctgaagagcatttgaagcaacactacattgaccttaaggaccgtccctttttccccggactggttaaatacatgaactctggccccgtcgtggccatggtgtgggaaggcttgaatgtggtgaagactggaagagtgatgctgggcgaaaccaaccctgctgacagcaaacccggaaccatcagaggcgacttttgtatccaggtggggagaaacattattcatggctcagactcagtgaaaagcgctgaaaaagaaatatccctttggttcaagccagaggagctggtcgactataagagctgtgcacatgactgggtgtacgagtag

SEQ ID NO: 27466 - DNA, 804 bp, Artificial Sequence
  derived and/or modified sequence
atggccaattgcgagcgcacatttatcgccattaagcccgacggagtacagagaggcctggtgggagaaattatcaagcggtttgaacagaaggggttcagactcgtgggattaaagttcatgcaggcttccgaagatcttctcaaggagcattacgtggatttgaaagatcgacctttcttcgcgggactggtcaagtatatgcatagcggccctgtcgtggctatggtgtgggaaggactgaatgtcgtaaagacaggccgagtcatgctgggcgagaccaatcctgccgacagcaagcccggaacaatccgcggtgatttctgtatccaagtggggagaacaatggctaatctggagcgcacctttatcgctattaaaccggacggagtccaaagaggactggtaggagagataattaaacggtttgagcagaagggattcagacttgtggctatgaagtttctgagagcaagtgaagagcatctgaagcagcattacatcgacctgaaagaccgcccattcttcccaggcctggtcaaatatatgaactcaggaccagtagtcgccatggtttgggaaggcttaaacgtagtgaagaccggtagggtgatgctcggggagactaaccctgctgatagcaagcccggtactatccgaggtgacttctgcatacaggtgggaaggaatatcattcatggttcggactctgtcaagtcggcagaaaaggagatttccctgtggttcaagcctgaagaattggtggattataagagctgcgcccatgactgggtgtacgagtag

SEQ ID NO: 27467 - DNA, 879 bp, Artificial Sequence
  derived and/or modified sequence
atggtgctcctttccacactgggaatagtgttccaaggggaaggtcctcccatatcttcttgcgacacaggcacaatggcaaactgcgaacgtaccttcatcgccattaaaccggatggcgtgcaaagagggctcgtgggagagattatcaaacgattcgagcagaagggcttcaggttagtaggcttgaaattcatgcaggccagtgaagacctccttaaggaacattatgtggatttaaaggacaggccttttttcgccggactggttaaatatatgcactccggacctgtagtcgccatggtgtgggagggtttgaatgtggtcaaaacggggagggtgatgctgggcgagactaatcctgcggattccaaacccggaacgattcggggagacttttgcattcaggtcggtcgaacaatggctaacctcgagagaacgttcattgccatcaaacctgacggtgtccagaggggtcttgtgggggagatcattaagaggttcgagcaaaagggctttcggctcgtcgccatgaaattcctacgagccagtgaagagcacctcaagcagcattatattgatctgaaggaccgaccattcttccctggcttggtcaagtatatgaactccgggcctgtggtcgccatggtgtgggaagggctgaatgtcgtgaaaaccgggagagtgatgctcggcgagaccaaccccgctgattccaaaccaggcactattcgaggcgacttttgtatccaggtgggcaggaatattattcacggctcagattcagtcaagtccgctgaaaaggagatttccctctggtttaagccagaggagctggtggactacaaatcctgcgcccatgactgggtatatgaatag

SEQ ID NO: 27468 - DNA, 804 bp, Artificial Sequence
  derived and/or modified sequence
atggctaattgtgagaggaccttcatcgcgatcaaaccagacggcgttcaacggggccttgttggagaaattatcaaaaggtttgaacagaagggtttcaggttggtgggcctcaagttcatgcaggcttctgaggatctgctgaaagagcattatgtggatttaaaggaccgaccattctttgccgggcttgtgaaatacatgcacagtggcccagtggtggctatggtgtgggagggcctaaatgtggtgaaaactggacgtgtgatgctaggagaaactaacccagccgattccaagcccggtaccattcggggcgacttttgcattcaggtggggagaaccatggccaacttagaacgcacatttattgccatcaagcccgacggagttcagcggggacttgtgggtgagatcattaagaggtttgaacagaaagggttccgcttagtggctatgaagtttctgcgcgcgagtgaggaacatcttaagcaacattacattgatttaaaagatcgcccatttttccctggcttggtgaaatacatgaatagtggtccagtggtagccatggtttgggagggccttaacgttgtcaagaccgggagggtgatgctgggggagacaaaccccgctgactccaaacctggaaccatcagaggcgacttttgtatccaggttgggcgcaacattatccacggatccgacagcgttaagtcagcagagaaggagatcagcctttggttcaagccagaagaactggtggactacaagtcctgcgcgcacgactgggtgtatgagtag

SEQ ID NO: 27469 - DNA, 879 bp, Artificial Sequence
  derived and/or modified sequence
atggtgttgctctcgaccttaggtatcgtgttccagggcgagggccctcctataagctcttgtgacaccgggacaatggccaactgcgagagaacctttatcgccattaaacccgatggggtgcagcgggggctggtgggtgagattatcaaaaggttcgaacagaagggctttcgactggttggtctgaagttcatgcaagcctctgaggacctcctgaaagaacattatgtcgaccttaaggatagacccttttttgcaggactggtgaagtacatgcacagcggcccagtagtggcaatggtgtgggagggactcaacgtggtcaagaccggcagagttatgctaggggagactaaccctgcagatagtaaacctggaactattcgcggcgacttttgtatacaagtggggcggaccatggccaacctcgagcgcacattcattgctatcaagcctgatggtgtgcagaggggactggtcggagaaatcatcaaaaggtttgaacaaaaggggtttcgcttagtggccatgaagttcttaagagcctccgaggagcacttgaaacagcattacattgacctgaaagaccgcccctttttccccggattggtgaagtatatgaattctggccctgtggtggcaatggtatgggaagggctgaacgttgtgaagacaggccgggtcatgctaggcgaaacgaatcctgctgatagtaagcccggaacaattaggggcgatttctgtatccaggttggaagaaatatcatccatggctccgactctgtgaagagtgccgaaaaggaaatatctttatggttcaaacccgaagaacttgttgactataagtcttgtgcacacgactgggtatacgagtag

SEQ ID NO: 27470 - DNA, 804 bp, Artificial Sequence
  derived and/or modified sequence
atggccaactgcgagcggaccttcatcgccatcaagcccgacggcgtgcagagaggcctcgtcggagaaatcattaagcggtttgagcagaaaggatttagactcgtcggccttaagtttatgcaggcttccgaggatctgctgaaagagcactacgtcgatttaaaggaccgccccttcttcgccggcctcgttaagtatatgcattccggccctgtcgtggccatggtgtgggagggccttaacgttgtcaaaactggcagagtgatgctgggagaaacaaatccagccgacagtaagcccggcaccatccgtggtgatttttgcattcaggtaggacgaactatggcaaatctcgagcgcacattcattgccatcaaacctgacggcgtccagcggggtctggtaggggagataattaaacggttcgagcaaaaaggattccgactggtcgctatgaaattcttacgcgcatcagaggagcacctgaaacagcactacatcgatttgaaagacagaccgttctttcccggcttagtgaagtacatgaactccggaccagtcgttgctatggtgtgggagggacttaacgtggtcaagacaggcagagtgatgcttggcgagaccaacccggccgacagtaaacctggcactatccgaggagacttctgtattcaagtggggaggaacataattcatggaagcgacagcgtgaagtcagctgaaaaagaaatttctctgtggttcaaacctgaagaactggttgactacaaatcatgcgctcacgattgggtctacgaatag

SEQ ID NO: 27471 - DNA, 879 bp, Artificial Sequence
  derived and/or modified sequence
atggtgctgctgagcaccctgggcatcgtgttccagggcgagggcccccccatttctagttgtgatacaggcacaatggctaactgcgagagaacgtttattgcgatcaagccggatggtgtgcagagagggctggtgggggagatcattaagagatttgagcaaaaaggatttagattggtagggctgaagtttatgcaagcctctgaggatcttctcaaggaacactatgtggatttaaaggatcgtccattcttcgcaggccttgtgaagtacatgcatagcgggccagtcgtggctatggtttgggaaggcctcaatgtggtcaaaaccggaagggtaatgttaggagaaaccaatcctgcggactcaaaaccaggcacgatacgcggagatttttgtatccaagtgggcaggacaatggctaatctcgagcggacattcatcgcgattaagccagatggggttcagagagggctggttggagaaattataaaacgtttcgagcagaagggctttcgcctcgtggccatgaagtttctgagggcctccgaagagcatctgaaacaacactacatcgatcttaaggatagaccattctttcccgggcttgttaaatacatgaactccggcccagtagtcgcaatggtgtgggaaggcttaaacgtggtgaagactggacgggtcatgttgggtgaaaccaatcccgccgacagcaagccaggcactatcaggggtgacttttgtatacaggtcgggcggaacatcattcatggcagcgacagcgtaaaaagtgccgagaaggaaatcagtctgtggttcaagccggaagaattagtagattacaagtcttgcgcacacgattgggtttatgaatag

SEQ ID NO: 27472 - DNA, 1051 bp, Artificial Sequence
  derived and/or modified sequence
gcagaagcgttccgtgcgtgcaagtgctgcgaaccacgtgggtcccgggcgcgtttcgggtgctggcggctgcagccggagttcaaacctaagcagctggaaggaaccatggccaactgtgagcgtaccttcattgcgatcaaaccagatggggtccagcggggtcttgtgggagagattatcaagcgttttgagcagaaaggattccgccttgttggtctgaaattcatgcaagcttccgaagatcttctcaaggaacactacgttgacctgaaggaccgtccattctttgccggcctggtgaaatacatgcactcagggccggtagttgccatggtctgggaggggctgaatgtggtgaagacgggccgagtcatgctcggggagaccaaccctgcagactccaagcctgggaccatccgtggagacttctgcatacaagttggcaggaccatggccaacctggagcgcaccttcatcgccatcaagccggacggcgtgcagcgcggcctggtgggcgagatcatcaagcgcttcgagcagaagggattccgcctcgtggccatgaagttcctccgggcctctgaagaacacctgaagcagcactacattgacctgaaagaccgaccattcttccctgggctggtgaagtacatgaactcagggccggttgtggccatggtctgggaggggctgaacgtggtgaagacaggccgagtgatgcttggggagaccaatccagcagattcaaagccaggcaccattcgtggggacttctgcattcaggttggcaggaacatcattcatggcagtgattcagtaaaaagtgctgaaaaagaaatcagcctatggtttaagcctgaagaactggttgactacaagtcttgtgctcatgactgggtctatgaataagaggtggacacaacagcagtctccttcagcacggcgtggtgtgtccctggacacagctcttcattccattgacttagaggcaacaggattgatcattcttttatagagcatatttgccaataaagcttttggaagccgg

SEQ ID NO: 27473 - DNA, 804 bp, Artificial Sequence
  derived and/or modified sequence
atggcaaattgcgaaaggacattcattgccatcaagcccgacggcgtccagaggggactagtaggcgaaatcatcaagagatttgaacagaagggcttcaggcttgtggggctgaaattcatgcaggcctcagaggatctcttgaaagaacactatgtcgatctaaaggaccggccattcttcgccggtctggtgaaatacatgcactccggccctgtcgtggcgatggtctgggaagggttgaatgtagtcaaaaccggaagagtgatgttgggggaaaccaatccagccgactcaaagcccggtacgattcgaggtgatttctgtattcaggtaggccgtaccatggctaacttggagagaaccttcatcgcaatcaagcctgatggagtacagagagggctcgtgggagaaatcatcaagaggttcgaacagaagggattccgcctggtggctatgaaatttctgagagcgtccgaggagcacctgaaacagcactacatcgatctgaaggatcggccattttttccaggactggtaaaatacatgaacagcggcccagtggtcgctatggtgtgggagggccttaacgtcgtcaaaacagggagggtcatgctgggtgaaacaaatcctgccgattcaaaacccggaacaatcagaggcgacttctgcattcaggttgggcgaaacatcatccatgggtccgactccgtcaaaagtgcagagaaagagatctcactgtggttcaaacccgaggagctcgtcgactataagagctgtgcacacgattgggtgtatgagtag

SEQ ID NO: 27474 - DNA, 879 bp, Artificial Sequence
  derived and/or modified sequence
atggtcctgctctcaacattaggcatagtttttcagggcgagggaccaccaatcagtagttgtgataccgggacgatggccaactgcgagcgaacctttatcgctattaaacctgatggcgtgcaacgaggtcttgtaggagagatcattaagaggtttgagcagaaaggattccgcctggtgggtctgaagtttatgcaggctagcgaagatctgctcaaagagcactatgtggacctgaaagaccggccattctttgcagggttggtgaagtacatgcactcaggaccagtggtggcgatggtgtgggaaggcctcaacgtggtaaaaacagggcgtgtcatgctgggagaaacaaatcccgcagatagcaagcccggtactataagaggggatttttgcatccaggtcggcagaacaatggctaatcttgagaggactttcattgccataaaaccggacggcgtccagagggggctcgtcggagagataataaagcgatttgagcagaagggcttccgtttagttgccatgaaattcttgagagcttccgaggaacacctcaaacagcattacatcgacttgaaggacaggccatttttccccggtctggtgaagtatatgaactcagggccagtggtggccatggtgtgggagggactcaacgtcgtgaagacaggcagggtgatgctcggcgagactaaccctgcagacagcaaaccgggaacgatccgcggtgatttttgtatccaggtgggcaggaacatcatccacggttcagattccgtgaagtctgccgaaaaggagatttccctgtggttcaagcctgaggagctcgtagattacaaatcctgtgcccatgactgggtgtacgagtag

SEQ ID NO: 27475 - DNA, 234 bp, Artificial Sequence
  derived and/or modified sequence
atggtatgggaagggttaaatgtagtgaaaaccggccgggtgatgctgggagaaaccaatccggcggactctaagcccggaacaatccggggcgatttctgtattcaggttgggcggaatattatacacggcagtgattcagtcaagtccgccgagaaagagatttcgttgtggttcaaacccgaggagctggtcgactataaatcttgcgctcatgactgggtgtacgagtag

SEQ ID NO: 27476 - DNA, 234 bp, Artificial Sequence
  derived and/or modified sequence
atggtttgggaaggactgaacgtagtcaaaactggacgcgttatgctgggcgaaaccaatccagcggactctaagcccgggaccattaggggcgacttctgtatccaggtgggacgaaatattatccacgggagtgatagcgtgaagtcagccgagaaggaaatctcactgtggtttaagccagaagaattggtcgactataagtcctgtgcgcatgattgggtctacgagtag

SEQ ID NO: 27477 - DNA, 459 bp, Artificial Sequence
  derived and/or modified sequence
atggccaatctcgagcgaacattcatcgccattaagccagacggggttcaacgcggactcgtgggagaaatcatcaagcggtttgagcagaaggggttccgactcgttgccatgaaattcctgcgggccagtgaagagcaccttaagcagcattacatcgatctgaaagaccggcccttttttcccgggttggtgaaatacatgaattccggcccagtggtagctatggtttgggagggcttaaacgtcgttaaaactggaagggtgatgctgggagagactaacccggccgacagcaagccaggaacaatcagaggggatttctgtatacaggtcgggaggaacattatccatggctctgacagcgtaaagtctgccgaaaaagagattagcttgtggtttaaacccgaggagttggtagactacaagtcctgcgctcacgactgggtatacgaatag

SEQ ID NO: 27478 - DNA, 459 bp, Artificial Sequence
  derived and/or modified sequence
atggcaaacttggagcgcacattcatcgcgatcaagccggacggcgtgcaacgaggcttggtgggagaaattatcaagagattcgagcagaaggggtttcgcctggtggccatgaaattcctgcgcgcttctgaagagcacctcaagcaacactacattgacctcaaggacagacctttctttcccggcttagtgaagtatatgaactcaggaccagttgtggccatggtgtgggagggtctgaatgtcgtgaagaccgggcgggttatgctgggtgagacgaacccagctgacagcaagcccggtacgatacggggcgacttctgcattcaggtcggacgaaacattatccacggctccgattctgtgaaatccgctgagaaggaaatcagtctatggtttaagcccgaagagcttgtggattacaagtcatgcgcccatgactgggtttacgaatag

SEQ ID NO: 27479 - DNA, 459 bp, Artificial Sequence
  derived and/or modified sequence
atggcaaacttggagcgcaccttcatcgctattaagcccgatggcgtgcagcggggattagtgggcgagattataaaaagattcgagcagaaaggctttagattggttgccatgaaattcctgagggcctctgaagagcatctgaagcagcattatatcgacctgaaagatcgccccttctttcctggactggtcaaatatatgaattcaggtcccgtggtcgccatggtgtgggagggcctcaacgtggtcaagaccggcagggtgatgctcggagagactaatccagccgattcaaagcccggtacgatacggggtgatttctgcatacaagttggccgcaacataattcatggctctgactctgtgaaatccgctgagaaagagattagtctgtggttcaaaccggaggagctcgtagattataagtcttgtgcccatgactgggtgtacgagtag

SEQ ID NO: 27480 - DNA, 459 bp, Artificial Sequence
  derived and/or modified sequence
atggcaaacctagaacggacctttattgcaattaaaccggatggcgtgcaaagaggattggtaggggagataattaagagattcgagcagaagggctttaggctagtggccatgaaatttcttcgtgcctcggaggagcatcttaaacagcattatattgacttgaaggatcggcccttctttccagggctggtaaaatatatgaactctggcccagttgttgctatggtatgggagggcctgaacgtggtgaagacaggacgagttatgctgggagaaactaacccagccgattcaaaacctgggaccatccggggcgacttttgcatccaggtcgggaggaatatcatccatgggagcgactccgtcaagtctgctgagaaagagatctccctctggttcaagccagaagagctcgtcgattacaaatcttgcgcccacgactgggtatatgagtag

SEQ ID NO: 27481 - DNA, 459 bp, Artificial Sequence
  derived and/or modified sequence
atggcaaatttggaacggacattcatagctatcaaacctgatggggtccagcgcggactagtgggcgagataattaagagatttgagcagaaaggcttccgcctggtggcaatgaagttcctgcgcgcgtctgaggagcatcttaaacagcactacatcgatctgaaggaccgtccgtttttccccggtctggtgaagtacatgaattctggccccgtggtggccatggtctgggagggactgaacgtggtgaagacagggagggttatgctgggggaaaccaatcccgccgactccaaacctggcaccatacgaggcgatttttgcattcaggtggggcgaaatatcatccatggtagcgactctgtgaaatctgcggaaaaagaaatatccttatggttcaaacccgaagagctggtggactataagtcctgcgcccacgactgggtgtatgagtag

SEQ ID NO: 27482 - DNA, 234 bp, Artificial Sequence
  derived and/or modified sequence
atggtgtgggagggcctgaatgtggtgaagacaggccgggtgatgctgggggagaccaacccagctgacagcaagccaggcaccatccggggggacttctgcatccaggtgggcaggaacatcatccacggcagtgacagcgtgaagtctgctgagaaggagatcagcctgtggttcaagccagaggagctggtggactacaagagctgtgcccatgactgggtgtatgaatag

SEQ ID NO: 27483 - DNA, 459 bp, Artificial Sequence
  derived and/or modified sequence
atggccaacctggagaggaccttcatcgccatcaagccagatggagtgcagaggggcctggtgggggagatcatcaagagatttgagcagaagggcttccggctggtggccatgaagttcctgcgggccagcgaggagcacctgaagcagcactacatcgacctgaaggaccggcccttcttccctggcctggtgaagtacatgaacagcggccctgtggtggccatggtgtgggagggcctgaatgtggtgaagacaggccgggtgatgctgggggagaccaacccagctgacagcaagccaggcaccatccggggggacttctgcatccaggtgggcaggaacatcatccacggcagtgacagcgtgaagtctgctgagaaggagatcagcctgtggttcaagccagaggagctggtggactacaagagctgtgcccatgactgggtgtatgaatag

SEQ ID NO: 27484 - DNA, 234 bp, Artificial Sequence
  derived and/or modified sequence
atggtgtgggagggcctgaacgtggtgaagaccggccgggtgatgctgggggagacaaacccggccgatagtaagcccggtactatccggggcgatttctgcattcaggtgggaagaaacattatccacggcagcgactccgtgaaaagtgctgaaaaggagatatccctgtggttcaaaccagaagaactggtcgattacaaatcttgtgcacacgactgggtttatgaatag

SEQ ID NO: 27485 - DNA, 234 bp, Artificial Sequence
  derived and/or modified sequence
atggtgtgggagggcctgaacgtggtgaagaccggccgggtgatgctgggggagactaacccagcggacagcaagccaggcacaattaggggcgatttttgtattcaggtcggtcgcaacattatacacggctccgactcagtgaaatccgccgagaaggagatctcactttggttcaagcccgaggaactggtcgactataagagttgcgctcacgattgggtatacgaatag

SEQ ID NO: 27486 - DNA, 459 bp, Artificial Sequence
  derived and/or modified sequence
atggccaacctggagcggaccttcatcgccatcaagcccgacggcgtacaaaggggccttgtgggtgagattatcaagcggttcgaacagaaaggtttccggttagtagctatgaagtttctgcgggcgagtgaggagcacctcaagcagcactatatcgaccttaaggatagacctttctttcccggtcttgtgaaatatatgaactctgggcccgtcgttgcaatggtgtgggaagggcttaacgtggtgaaaacaggccgggtgatgcttggagaaacgaatccggcggattccaaacccgggaccatccgaggtgatttctgtatccaggttggtaggaatatcatacatgggagtgactccgtgaagagtgctgagaaggaaatttctttatggtttaaacccgaggaattagttgactacaaatcttgtgcccacgactgggtgtacgagtag

SEQ ID NO: 27487 - DNA, 459 bp, Artificial Sequence
  derived and/or modified sequence
atggccaacctggagcggaccttcatcgccatcaagcccgacggcgtgcaaagggggttagttggagagataattaagcggttcgagcagaagggatttcgactggtcgccatgaagttcctgagagcctccgaggaacacctgaaacagcactacatcgaccttaaggaccgcccatttttcccggggcttgtgaagtacatgaattcgggtccagtcgttgccatggtctgggagggactgaacgtagtgaagacaggcagagttatgctgggggaaactaatcccgccgattcaaaacctggaaccatccggggcgatttctgtatccaagtaggacgcaacatcattcacggcagcgatagtgtgaaaagcgcggagaaagagatcagtttatggtttaaacccgaggaacttgtggactacaagtcctgtgcacacgactgggtctacgagtag

SEQ ID NO: 27488 - DNA, 459 bp, Artificial Sequence
  derived and/or modified sequence
atggccaacctggagcggaccttcatcgccatcaagcccgacggcgtacagagggggctcgtcggggagatcatcaagcgctttgagcagaaaggattcaggttggtagctatgaaatttttacgagcaagcgaggaacaccttaaacaacactatatcgatctaaaagacaggcccttttttcccggtttagtcaagtatatgaattctggcccagtggttgccatggtatgggaaggactaaatgtggtcaaaacaggaagagtgatgctgggggagaccaatcctgctgactccaaacccggaacgattagaggcgacttctgtatccaagtgggacgcaacattatccatggctccgattcagtcaaatccgccgaaaaagagatctctttatggttcaaacccgaagagctagttgactacaagtcctgcgcacacgactgggtctatgaatag

SEQ ID NO: 27489 - DNA, 459 bp, Artificial Sequence
  derived and/or modified sequence
atggccaacctggagcggaccttcatcgccatcaagcccgacggcgtgcagcggggattggttggcgagatcattaagcgcttcgaacagaaaggtttcagactggttgctatgaagtttctgagggcatcagaggaacacttgaaacagcattatatcgatcttaaggaccggccattctttcctgggcttgtcaaatatatgaactcagggcctgtcgttgctatggtgtgggaagggcttaacgtggtgaaaacagggcgggtaatgctgggggaaaccaaccccgccgactcgaaaccaggcactattagaggtgatttttgcatccaggtggggcggaacatcattcacggttcagacagcgtgaagtccgcagagaaagagatttccctttggtttaagccagaggagctagtggattacaaaagctgtgctcacgactgggtgtacgaatag

SEQ ID NO: 27490 - DNA, 459 bp, Artificial Sequence
  derived and/or modified sequence
atggccaacctggagcggaccttcatcgccatcaagcccgacggcgtccagcgggggttagtgggcgaaattattaaaagattcgaacaaaaggggttccggttggttgcgatgaagttcctcagggccagtgaggagcatctgaagcagcactatatcgacctgaaggacagaccgttctttccgggcctagtaaagtacatgaacagcggtccagtcgtcgcgatggtatgggaagggctgaatgtcgtgaagactggccgtgtgatgctgggtgagacgaatccagccgatagtaaacctgggacaatccgcggcgacttctgcatccaagtaggccggaacattatccacggtagcgattctgttaaaagtgccgaaaaagagatctccttgtggttcaagcccgaagagctggtggactataagtcatgtgcgcatgactgggtgtacgagtag

SEQ ID NO: 27491 - DNA, 646 bp, Artificial Sequence
  derived and/or modified sequence
cctggcgactcctcccgttccctcttccgcttgcgctgccgcaggaccatggccaacctggagcgcaccttcatcgccatcaagccggacggcgtgcagcgcggcctggtgggcgagatcatcaagcgcttcgagcagaagggattccgcctcgtggccatgaagttcctccgggcctctgaagaacacctgaagcagcactacattgacctgaaagaccgaccattcttccctgggctggtgaagtacatgaactcagggccggttgtggccatggtctgggaggggctgaacgtggtgaagacaggccgagtgatgcttggggagaccaatccagcagattcaaagccaggcaccattcgtggggacttctgcattcaggttggcaggaacatcattcatggcagtgattcagtaaaaagtgctgaaaaagaaatcagcctatggtttaagcctgaagaactggttgactacaagtcttgtgctcatgactgggtctatgaataagaggtggacacaacagcagtctccttcagcacggcgtggtgtgtccctggacacagctcttcattccattgacttagaggcaacaggattgatcattcttttatagagcatatttgccaataaagcttttggaagccgg

SEQ ID NO: 27492 - DNA, 754 bp, Artificial Sequence
  derived and/or modified sequence
caaagggagcttgtttgccagggacactgcaagtaggaagtgtctacaggtcgatgacaggcctaatctctatgacagggtctagactttcctcagggtccaggggcgcacctcagggtgaactggaaaactcgaccgcactttagtgccaggaccatggccaacctggagcgcaccttcatcgccatcaagccggacggcgtgcagcgcggcctggtgggcgagatcatcaagcgcttcgagcagaagggattccgcctcgtggccatgaagttcctccgggcctctgaagaacacctgaagcagcactacattgacctgaaagaccgaccattcttccctgggctggtgaagtacatgaactcagggccggttgtggccatggtctgggaggggctgaacgtggtgaagacaggccgagtgatgcttggggagaccaatccagcagattcaaagccaggcaccattcgtggggacttctgcattcaggttggcaggaacatcattcatggcagtgattcagtaaaaagtgctgaaaaagaaatcagcctatggtttaagcctgaagaactggttgactacaagtcttgtgctcatgactgggtctatgaataagaggtggacacaacagcagtctccttcagcacggcgtggtgtgtccctggacacagctcttcattccattgacttagaggcaacaggattgatcattcttttatagagcatatttgccaataaagcttttggaagccgg

SEQ ID NO: 27493 - DNA, 866 bp, Artificial Sequence
  derived and/or modified sequence
gtgggcccggtctgtgggcgccccccgatttcccgcaggtcccgcgcggcgtcggagcgggagattcccttgcagcttgcgccccgcgggccttcgggctccgcagagggacgccggccctgcgcggggcggaagcggccgggaagccacgtgtccccgcggccgcgcgtggtgggggaggagggaccggcggcgcccacgtggcctccgcgggccccgccagagcctgcgcccgggccctgaccgcacctctcgccccgcaggaccatggccaacctggagcgcaccttcatcgccatcaagccggacggcgtgcagcgcggcctggtgggcgagatcatcaagcgcttcgagcagaagggattccgcctcgtggccatgaagttcctccgggcctctgaagaacacctgaagcagcactacattgacctgaaagaccgaccattcttccctgggctggtgaagtacatgaactcagggccggttgtggccatggtctgggaggggctgaacgtggtgaagacaggccgagtgatgcttggggagaccaatccagcagattcaaagccaggcaccattcgtggggacttctgcattcaggttggcaggaacatcattcatggcagtgattcagtaaaaagtgctgaaaaagaaatcagcctatggtttaagcctgaagaactggttgactacaagtcttgtgctcatgactgggtctatgaataagaggtggacacaacagcagtctccttcagcacggcgtggtgtgtccctggacacagctcttcattccattgacttagaggcaacaggattgatcattcttttatagagcatatttgccaataaagcttttggaagccgga

SEQ ID NO: 27494 - DNA, 749 bp, Artificial Sequence
  derived and/or modified sequence
gccggctcccgggtgtggtggtcgcaccagctctctgctctcccagcgcagcgccgccgcccggcccctccagcttcccggtaaggcggtgggggcgcatcccctggcgactcctcccgttccctcttccgcttgcgctgccgcaggaccatggccaacctggagcgcaccttcatcgccatcaagccggacggcgtgcagcgcggcctggtgggcgagatcatcaagcgcttcgagcagaagggattccgcctcgtggccatgaagttcctccgggcctctgaagaacacctgaagcagcactacattgacctgaaagaccgaccattcttccctgggctggtgaagtacatgaactcagggccggttgtggccatggtctgggaggggctgaacgtggtgaagacaggccgagtgatgcttggggagaccaatccagcagattcaaagccaggcaccattcgtggggacttctgcattcaggttggcaggaacatcattcatggcagtgattcagtaaaaagtgctgaaaaagaaatcagcctatggtttaagcctgaagaactggttgactacaagtcttgtgctcatgactgggtctatgaataagaggtggacacaacagcagtctccttcagcacggcgtggtgtgtccctggacacagctcttcattccattgacttagaggcaacaggattgatcattcttttatagagcatatttgccaataaagcttttggaagccgga

SEQ ID NO: 27495 - DNA, 826 bp, Artificial Sequence
  derived and/or modified sequence
gcgagggcgcgccccggctgggcgtggacactgttctccggccgcgtcgggccgggcgggtggggcgttcctgcgggttgggcggctgggccctccggggtgtggccaccccgcgctccgccctgcgcccctcctccgccgccggctcccgggtgtggtggtcgcaccagctctctgctctcccagcgcagcgccgccgcccggcccctccagcttcccggaccatggccaacctggagcgcaccttcatcgccatcaagccggacggcgtgcagcgcggcctggtgggcgagatcatcaagcgcttcgagcagaagggattccgcctcgtggccatgaagttcctccgggcctctgaagaacacctgaagcagcactacattgacctgaaagaccgaccattcttccctgggctggtgaagtacatgaactcagggccggttgtggccatggtctgggaggggctgaacgtggtgaagacaggccgagtgatgcttggggagaccaatccagcagattcaaagccaggcaccattcgtggggacttctgcattcaggttggcaggaacatcattcatggcagtgattcagtaaaaagtgctgaaaaagaaatcagcctatggtttaagcctgaagaactggttgactacaagtcttgtgctcatgactgggtctatgaataagaggtggacacaacagcagtctccttcagcacggcgtggtgtgtccctggacacagctcttcattccattgacttagaggcaacaggattgatcattcttttatagagcatatttgccaataaagcttttggaagccggacac

SEQ ID NO: 27496 - DNA, 692 bp, Artificial Sequence
  derived and/or modified sequence
ctgtaggcgggggagtcatcaaggcagggcagaggcaggaccagatggccgtttgaggtgctgagcaaagctcccggtttgcgcggagaggaccatggccaacctggagcgcaccttcatcgccatcaagccggacggcgtgcagcgcggcctggtgggcgagatcatcaagcgcttcgagcagaagggattccgcctcgtggccatgaagttcctccgggcctctgaagaacacctgaagcagcactacattgacctgaaagaccgaccattcttccctgggctggtgaagtacatgaactcagggccggttgtggccatggtctgggaggggctgaacgtggtgaagacaggccgagtgatgcttggggagaccaatccagcagattcaaagccaggcaccattcgtggggacttctgcattcaggttggcaggaacatcattcatggcagtgattcagtaaaaagtgctgaaaaagaaatcagcctatggtttaagcctgaagaactggttgactacaagtcttgtgctcatgactgggtctatgaataagaggtggacacaacagcagtctccttcagcacggcgtggtgtgtccctggacacagctcttcattccattgacttagaggcaacaggattgatcattcttttatagagcatatttgccaataaagcttttggaagccgg

SEQ ID NO: 27497 - DNA, 773 bp, Artificial Sequence
  derived and/or modified sequence
atctcagggcagtaccactgctgtgcggctgtcagtcagtgctgcaggcgccgagaggaggggcttgtgaccgccccagggaagctgggcatcaccaaagggagcttgtttgccagggacactgcaagtaggaagtgtctacaggtcgatgacaggcctaatctctatgacagggtctagactttcctcagggtccaggggcgcacctcagggtgaactggaaaactcgaccgcactttagtgccaggaccatggccaacctggagcgcaccttcatcgccatcaagccggacggcgtgcagcgcggcctggtgggcgagatcatcaagcgcttcgagcagaagggattccgcctcgtggccatgaagttcctccgggcctctgaagaacacctgaagcagcactacattgacctgaaagaccgaccattcttccctgggctggtgaagtacatgaactcagggccggttgtggccatggtctgggaggggctgaacgtggtgaagacaggccgagtgatgcttggggagaccaatccagcagattcaaagccaggcaccattcgtggggacttctgcattcaggttggcaggaacatcattcatggcagtgattcagtaaaaagtgctgaaaaagaaatcagcctatggtttaagcctgaagaactggttgactacaagtcttgtgctcatgactgggtctatgaataagaggtggacacaacagcagtctccttcagcacggcgtggtgtgtccctggacacagctcttca

SEQ ID NO: 27498 - DNA, 234 bp, Artificial Sequence
  derived and/or modified sequence
atggtatgggagggtctgaacgtcgtgaaaaccggaagggttatgcttggggagactaatcctgctgactctaagcccggaacaatcagaggggacttctgcattcaggtgggcaggaacatcatccacgggtcggattctgttaaatcagcggaaaaggagatcagtctgtggtttaaacccgaggaactggtcgactacaagagctgtgcacacgattgggtctacgaatag

SEQ ID NO: 27499 - DNA, 234 bp, Artificial Sequence
  derived and/or modified sequence
atggtgtgggagggactgaatgtggtgaagactggccgagtcatgctgggtgagacaaatcccgcagactcaaagccaggtacaattcgcggagatttctgcatacaagtaggtagaaatatcattcatgggtcagattctgttaaaagtgccgagaaagaaatttcactgtggttcaagccagaggaacttgtcgactataaatcttgcgcacatgactgggtctatgagtag

SEQ ID NO: 27500 - DNA, 459 bp, Artificial Sequence
  derived and/or modified sequence
atggcaaatctggagaggaccttcattgccattaaaccagatggcgtccagcgaggattagtgggcgaaatcattaaaagattcgaacagaaaggcttcaggctggtggctatgaagttccttagagcttccgaagaacacctgaaacagcactatattgatttgaaggacagacctttctttcctgggctcgtgaagtatatgaatagcgggccagtggtcgcaatggtgtgggaaggcctgaatgtggtaaaaactggcagagttatgctgggggaaaccaaccccgcagatagcaagccgggaacaattcgaggagacttctgtatccaagttgggcgtaacatcatccacggcagcgactcagtgaaatctgccgaaaaggaaatcagcctgtggttcaaaccagaggaactggtggattataaaagctgcgcacatgactgggtgtatgagtag

SEQ ID NO: 27501 - DNA, 459 bp, Artificial Sequence
  derived and/or modified sequence
atggcaaacttagaaaggacctttatcgcaatcaagcccgacggtgtgcagagggggctggtgggcgagatcattaagaggttcgagcaaaagggcttccgactcgtggcaatgaagtttctgcgtgctagcgaggaacacctgaagcagcactatatcgacctcaaggacagacccttcttccccggtctggtcaaatatatgaacagcggacccgtagtagctatggtgtgggagggtctaaacgtggtaaagacaggcagagttatgctgggcgagactaatccagccgacagcaaaccgggtacaatccgcggtgatttttgcatccaagtggggcgaaatatcattcatggatcagactcggtgaagagcgcggagaaagagatcagtctttggtttaagcccgaggagctcgtggattataaatcctgtgcgcacgattgggtgtatgaatag

SEQ ID NO: 27502 - DNA, 459 bp, Artificial Sequence
  derived and/or modified sequence
atggccaacctcgagaggacttttatagctattaaacccgacggtgtacagagaggtctcgtaggagaaattatcaagcgcttcgagcaaaaagggttcaggctggtggctatgaagtttcttcgcgcaagcgaggaacaccttaaacagcactatatcgacctaaaggacaggcctttctttccaggacttgtcaaatatatgaattccggcccagtagtagcaatggtgtgggaagggctgaatgtggttaaaactggcagggtgatgctcggcgagaccaaccccgctgactctaagccgggaaccatacggggagatttctgtattcaggtcggcagaaacattattcacgggagcgactccgtgaaaagtgccgaaaaggaaatctctttatggtttaagcctgaagagttagtggattacaagagttgtgctcacgattgggtatacgaatag

SEQ ID NO: 27503 - DNA, 459 bp, Artificial Sequence
  derived and/or modified sequence
atggccaacttggaacgcacattcatcgctattaaaccggacggagtgcagcgcggtcttgttggcgagatcatcaaacgctttgagcaaaaaggcttccggctcgtcgcaatgaaatttctcagggcatcggaagaacatctaaagcagcactatattgatctcaaagatcggccatttttccccggtctcgtcaagtacatgaattccggcccagtcgtcgccatggtgtgggaaggtcttaacgtcgtgaaaacagggagagtgatgctcggagagacaaaccctgccgatagcaaacccggtacaatccggggagatttctgtattcaggtggggaggaatatcattcatggcagtgactctgtgaaaagcgcagaaaaggagatatcattatggttcaagcccgaggaactcgtggattacaagtcctgtgcacacgactgggtatatgaatag

SEQ ID NO: 27504 - DNA, 459 bp, Artificial Sequence
  derived and/or modified sequence
atggctaatcttgagcgtacattcatcgccattaaacccgatggggtgcagcggggactagtcggcgaaatcattaaaaggttcgagcaaaaaggattccgcctagtagctatgaaattccttcgggcatctgaggaacaccttaaacaacattatatcgacttgaaggatcgtcccttctttcctggccttgttaagtatatgaactccggcccagtcgtggccatggtatgggaaggtctgaatgtagtcaagactgggcgagtgatgctgggtgagacaaaccccgcagattcaaagccagggaccattcggggagacttctgcatacaggtgggacgtaatataatccacgggagcgatagcgtgaagtcagccgagaaagagataagcctttggttcaaacccgaggaactggtggactataaatcatgcgcccatgactgggtctatgagtag

SEQ ID NO: 27505 - DNA, 234 bp, Artificial Sequence
  derived and/or modified sequence
atggtgtgggagggcctgaacgtggtgaagaccggcagagtgatgctgggcgagaccaaccccgccgacagcaagcccggcaccatcagaggcgacttctgcatccaggtgggcagaaacatcatccacggcagcgacagcgtgaagagcgccgagaaggagatcagcctgtggttcaagcccgaggagctggtggactacaagagctgcgcccacgactgggtgtacgagtag

SEQ ID NO: 27506 - DNA, 459 bp, Artificial Sequence
  derived and/or modified sequence
atggccaacctggagagaaccttcatcgccatcaagcccgacggcgtgcagagaggcctggtgggcgagatcatcaagagattcgagcagaagggcttcagactggtggccatgaagttcctgagagccagcgaggagcacctgaagcagcactacatcgacctgaaggacagacccttcttccccggcctggtgaagtacatgaacagcggccccgtggtggccatggtgtgggagggcctgaacgtggtgaagaccggcagagtgatgctgggcgagaccaaccccgccgacagcaagcccggcaccatcagaggcgacttctgcatccaggtgggcagaaacatcatccacggcagcgacagcgtgaagagcgccgagaaggagatcagcctgtggttcaagcccgaggagctggtggactacaagagctgcgcccacgactgggtgtacgagtag

SEQ ID NO: 27507 - protein, 528 aa, Artificial Sequence
  derived and/or modified sequence
MDAQQTKTNEARLWGDHGQEALESAHVCLINATATGTEILKNLVLPGIGSFTIIDGNQVSGEDAGNNFFLQRSSIGKNRAEAAMEFLQELNSDVSGSFVEESPENLLDNDPSFFCRFTVVVATQLPESTSLRLADVLWNSQIPLLICRTYGLVGYMRIIIKEHPVIESHPDNALEDLRLDKPFPELREHFQSYDLDHMEKKDHSHTPWIVIIAKYLAQWYSETNGRIPKTYKEKEDFRDLIRQGILKNENGAPEDEENFEEAIKNVNTALNTTQIPSSIEDIFNDDRCINITKQTPSFWILARALKEFVAKEGQGNLPVRGTIPDMIADSGKYIKLQNVYREKAKKDAAAVGNHVAKLLQSIGQAPESISEKELKLLCSNSAFLRVVRCRSLAEEYGLDTINKDEIISSMDNPDNEIVLYLMLRAVDRFHKQQGRYPGVSNYQVEEDIGKLKSCLTGFLQEYGLSVMVKDDYVHEFCRYGAAEPHTIAAFLGGAAAQEVIKIITKQFVIFNNTYIYSGMSQTSATFQL

SEQ ID NO: 27508 - protein, 445 aa, Artificial Sequence
  derived and/or modified sequence
MEFLQELNSDVSGSFVEESPENLLDNDPSFFCRFTVVVATQLPESTSLRLADVLWNSQIPLLICRTYGLVGYMRIIIKEHPVIESHPDNALEDLRLDKPFPELREHFQSYDLDHMEKKDHSHTPWIVIIAKYLAQWYSETNGRIPKTYKEKEDFRDLIRQGILKNENGAPEDEENFEEAIKNVNTALNTTQIPSSIEDIFNDDRCINITKQTPSFWILARALKEFVAKEGQGNLPVRGTIPDMIADSGKYIKLQNVYREKAKKDAAAVGNHVAKLLQSIGQAPESISEKELKLLCSNSAFLRVVRCRSLAEEYGLDTINKDEIISSMDNPDNEIVLYLMLRAVDRFHKQQGRYPGVSNYQVEEDIGKLKSCLTGFLQEYGLSVMVKDDYVHEFCRYGAAEPHTIAAFLGGAAAQEVIKIITKQFVIFNNTYIYSGMSQTSATFQL

SEQ ID NO: 27509 - DNA, 1587 bp, Artificial Sequence
  derived and/or modified sequence
atggatgctcagcagactaagacaaatgaagcgcggttgtggggagatcacggtcaggaggccctggagtccgcccacgtgtgtcttatcaatgcaacagccactggaacagaaattcttaagaaccttgtgttacccgggattgggtcctttactatcatcgacgggaatcaagtatctggcgaagatgccggtaataacttctttctgcagagatcatcaatcgggaagaatagagcggaggctgccatggagtttcttcaggaactgaattcagacgtgagcgggtccttcgtcgaggagtcccctgagaacctgttggataatgaccctagtttcttctgtaggtttactgtagtcgtcgccactcagctgcccgaatctacaagtcttcggctcgccgacgttctctggaacagccagattcctttactgatatgtagaacttacgggctggtgggctatatgagaatcattatcaaagagcatcccgtgatcgaaagtcatccagacaatgccttagaggacctgcgattagataagccctttccggaacttcgagaacattttcagagctatgacttggatcacatggagaaaaaagatcacagtcataccccatggattgttatcattgccaagtacctggctcagtggtactccgagactaacggcagaattcctaaaacctataaggagaaagaggattttagggatctcatccggcaggggatcctgaaaaacgaaaacggagcgcccgaagatgaggagaatttcgaagaagcaatcaaaaacgtcaatacagctcttaatacgactcagattccatcttcaatcgaagacatattcaacgatgaccgctgtatcaacatcacaaaacagacccctagtttctggatccttgcccgtgcactaaaggagttcgtcgctaaggaggggcagggcaacttacctgtgagagggactataccagacatgatagcagactctggcaagtatatcaagcttcaaaacgtctaccgggagaaggccaagaaggatgccgccgctgttggaaatcacgtcgcaaagcttctccagagcattggacaggcgccagagtctatatctgagaaggaactaaagctattgtgctcaaactctgccttcttacgagtggtcagatgcagaagcttagccgaggaatacggccttgacaccataaataaggatgagataataagctcaatggataaccctgataatgagatcgttctttacttgatgttacgcgctgtggatcggtttcacaagcagcaggggaggtatcccggtgtgtccaactatcaagtcgaggaggacatcgggaaacttaaaagctgcttgactgggtttttgcaggagtatggactcagcgtgatggttaaggacgactatgttcacgagttctgccgctatggcgcagccgagcctcacacaattgccgcattcctcggtggggccgcggctcaagaagtgattaaaatcatcaccaaacagttcgtgatatttaacaatacctacatatattccggtatgtctcagacctctgctaccttccagctttag

SEQ ID NO: 27510 - DNA, 1587 bp, Artificial Sequence
  derived and/or modified sequence
atggatgcccagcagaccaagaccaatgaggcccggctgtggggagaccacggccaggaggccctggagagcgcccacgtgtgcctgatcaatgccacagccactggaacagagatcctgaagaacctggtgctgcccggcatcggcagcttcaccatcattgatggcaaccaggtgtctggagaagatgctggcaacaacttcttcctgcagaggagcagcatcggcaagaacagagctgaggccgccatggagttcctgcaggagctgaacagtgatgtgtctggcagctttgtggaggagagccctgagaacctgctggacaatgaccccagcttcttctgccgcttcaccgtggtggtggccacccagctgcctgagagcaccagcctgcggctggctgatgtgctgtggaacagccagatccccctgctgatctgcaggacctacggcctggtgggctacatgaggatcatcatcaaggagcaccctgtgattgagagccacccagacaatgccctggaggacctgcggctggacaagcccttccctgagctgcgggagcacttccagagctatgacctggaccacatggagaagaaggaccacagccacaccccctggatcgtcatcatcgccaagtacctggcccagtggtacagcgagaccaacggccgcatccccaagacctacaaggagaaggaggacttccgggacctgatccggcagggcatcctgaagaatgaaaatggagccccagaagatgaagaaaattttgaggaggccatcaagaatgtgaacacagccctgaacaccacccagatccccagcagcattgaggacatcttcaatgatgaccgctgcatcaacatcaccaagcagacccccagcttctggatcctggcccgggccctgaaggagtttgtggccaaggagggccagggcaacctgcctgtgcggggcaccatcccagacatgattgctgacagcggcaagtacatcaagctgcagaatgtgtaccgggagaaggccaagaaggatgctgctgctgtgggcaaccacgtggccaagctgctgcagagcatcggccaggcccctgagagcatcagcgagaaggagctgaagctgctgtgcagcaacagcgccttcctgcgggtggtgcgctgccgcagcctggccgaggagtatggcctggacaccatcaacaaggatgagatcatcagctccatggacaacccagacaatgaaattgtgctgtacctgatgctgcgggctgtggaccgcttccacaagcagcagggccgctacccaggagtgagcaactaccaggtggaggaggacatcggcaagctgaagagctgcctgaccggcttcctgcaggagtatggcctgtctgtgatggtgaaggatgattatgtgcatgagttctgccgctatggagctgctgagccccacaccatcgccgccttcctgggcggcgctgctgcccaggaggtgatcaagatcatcaccaagcagtttgtgatcttcaacaacacctacatctacagcggcatgagccagaccagcgccaccttccagctgtag

SEQ ID NO: 27511 - DNA, 1587 bp, Artificial Sequence
  derived and/or modified sequence
atggacgcccagcagaccaagaccaacgaggcccggctgtggggcgatcacggccaggaggccctcgaatctgcccatgtgtgcctcatcaatgccacagccaccggaaccgaaatcttaaagaatttagtactgcccggcatcggcagcttcactatcattgacgggaatcaggtttcaggcgaagacgccggcaacaacttttttttgcagcgtagtagcatcggcaaaaatcgagcagaagccgccatggagtttctgcaggagttaaattcagacgtctctggatcgttcgtggaggaatcccctgagaatcttcttgataacgatccttcctttttctgcaggtttactgttgttgtggccacacagctccccgagtctacttcccttcgactggcggacgtgctttggaatagtcagattcctctcctgatctgccgcacttacggattagtggggtatatgcggatcatcataaaagagcaccccgtgattgaaagtcatcccgacaatgcgctggaggacttgcgcctggacaagccgttcccagagctgagagaacatttccagagctacgatttggaccacatggaaaaaaaagatcacagccatacaccctggatagtgattatcgctaaatacctggctcaatggtactccgagaccaatggccgcatccccaaaacatacaaggagaaagaggatttccgagatttgatacggcaggggatactgaaaaatgagaatggagctcccgaagacgaagagaactttgaggaggcaatcaagaacgtgaatactgcccttaacacaacgcagatcccgtctagtattgaggacatctttaacgacgataggtgcattaacattacgaaacaaacccctagcttctggattctggcccgagccttgaaggaatttgtcgccaaggaaggacaggggaatcttcccgtgcggggtacgattcctgacatgatcgctgatagtggcaagtacatcaaactccagaacgtgtaccgcgaaaaggcaaagaaagatgctgccgcagtaggcaatcatgtcgcgaagctcctgcagagcattggacaagctcctgaatcgatctccgagaaggaacttaagctcctgtgttcaaattctgcatttctgcgcgtggtcaggtgcagatcactagctgaggaatacggactggataccatcaacaaggacgaaatcatctcaagtatggataatcccgacaacgaaattgtgctgtatctgatgctccgagctgtggaccgattccacaaacagcagggtcgctaccctggagtctccaactaccaggtcgaagaagatatcggaaagctcaagagttgtctgacgggctttctccaggaatacggtttgtcagtcatggtgaaggatgattacgtacacgaattctgtcggtatggggcggccgaacctcacaccattgccgctttcctgggaggcgccgcagcccaggaagttattaagatcatcactaagcagtttgtcattttcaacaatacctatatctacagtggtatgagccagacgagcgcaacattccagctgtag

SEQ ID NO: 27512 - DNA, 1909 bp, Artificial Sequence
  derived and/or modified sequence
agtgcgcctgcgcgcttgtggagctggtggcggcgctccgcaggggctcggctgttttccgcgcggcaggcgcggccatggcgcagctgggaaagctgctcaaggagcagaagtacgaccggcagctgaggcgattcctccatacatttgacagctgtctgggcccttatggagcatacagtggagtggaaagatggatgctcagcaaacaaaaacaaatgaagccaggttgtggggtgatcatgggcaagaggctttagaatctgctcatgtttgcctaataaatgcaacagccacaggaactgaaattcttaaaaacttggtactaccaggtattggttcgtttacaattattgatggaaatcaggtcagcggagaagatgctggaaacaatttcttccttcaaagaagcagtatcggcaagaaccgagctgaagctgccatggaattcttacaagaattaaatagcgatgtctctggaagttttgtggaagagagtccagaaaaccttctagacaatgatccctcatttttctgtaggtttactgttgtagttgcaactcagcttcctgaaagcacttcactacgcttagcagatgtcctctggaattcccagattcctcttttgatctgtaggacatatggactagttggttatatgaggatcattataaaagaacatccagtaatagaatctcatccagataatgcattagaggatctacgactagataagccatttcctgaactgagagaacattttcagtcctatgatttggatcatatggaaaaaaaggaccacagtcatactccatggattgtgatcatagctaaatatttagcacagtggtatagtgaaacaaatggacgaatacctaaaacgtataaagaaaaagaggacttcagagatttgattagacaaggaattctaaaaaatgaaaatggggctccagaagatgaagagaattttgaagaagctattaaaaatgtgaacacagcactaaatacaactcagatcccaagcagtattgaagatatatttaatgatgatcgctgcataaatatcaccaaacagactccatcattttggattttagctcgtgccttaaaggaatttgtggccaaagagggtcaaggaaatttacctgttcgaggcacaattcctgatatgattgcagattcaggcaaatatataaaactgcaaaacgtttaccgtgaaaaagcaaagaaagatgctgccgctgtgggtaatcatgttgccaaattgctgcagtccattggccaggcaccagagtccatttcagagaaagaattaaaattactctgcagcaattctgcatttcttcgagtggtaagatgtcgatccttagctgaagaatatggtttggatacaattaacaaggatgaaattatttctagcatggacaatccagataatgaaatagtgttgtacttaatgttacgggctgttgatagatttcataaacaacagggtagatatccaggagtatctaactatcaagttgaagaagatataggaaagttgaagtcttgtctcactggcttccttcaggaatatggtttatctgtaatggtgaaagatgattatgtccacgaattttgccgatatggagctgctgagccacataccattgctgcattcttggggggagctgctgctcaagaggtcatcaaaataatcaccaaacaatttgtaatttttaataatacttacatttacagtggcatgtcacaaacttcagcaactttccagttgtagagtaagcaagcaccttaagtagtgtgttaatgattgaaactgtaattgccttcgggttgtgctttagtctgtaaaattctaaaggagagctgctaaattgttttcttaataaacatttttctcatttgt

SEQ ID NO: 27513 - DNA, 1587 bp, Artificial Sequence
  derived and/or modified sequence
atggatgctcagcagactaagactaatgaggctaggctgtggggtgatcacggtcaggaggcattagaaagcgcccatgtgtgtctgattaatgcaactgccacgggaacggagatactgaaaaacctggttttgccagggatcggatcattcacaattatcgatggcaaccaggtatctggggaagatgccggaaacaatttctttctgcagaggagctccattggaaagaacagagcagaggccgctatggagtttctccaggaactgaattccgacgtttccggcagttttgtagaggaaagccccgagaacctgcttgataatgaccccagctttttctgccgattcacggtcgtggtggctacgcaacttcctgagagtacatctctaagattagcagacgtcctttggaactcccagataccactcctcatctgccgcacctacggactcgttggatacatgcggatcatcatcaaggagcaccccgtaattgaaagccatcctgacaacgcccttgaggatctgcggctagataagccatttccggagctcagggaacacttccaaagctatgacttagaccatatggagaaaaaggaccactcccataccccatggatagtgattatcgccaagtacctggctcaatggtatagcgagaccaatggacgcattccaaagacatataaagaaaaggaagatttccgcgacctgatccgccagggcatattgaagaacgagaacggggctccagaggacgaagagaatttcgaggaggccatcaaaaacgtgaatactgcattgaatactacccaaatcccttcctccattgaggacatcttcaatgacgaccgttgtattaacatcactaagcagactcccagcttctggatcctcgctcgggcattgaaggaattcgtggcgaaagaagggcagggaaacctgccagtgaggggaactataccagatatgattgccgactccggcaaatacatcaagctgcaaaatgtgtaccgcgagaaagccaagaaggatgcggctgccgtcggcaaccacgtcgccaaactgctgcaatctattggccaagcccctgaaagcattagcgaaaaggaactgaaacttctctgctccaacagcgctttcctcagagtcgtgagatgccggtcacttgcagaggagtacggattagatacaatcaataaggatgagataatcagtagtatggacaaccccgacaacgagattgtgttatatcttatgttgcgggctgtagatcgcttccacaaacagcagggtaggtaccctggcgtaagcaactatcaggtggaagaggacatcggcaagttaaagtcttgtctgactggatttcttcaggagtacggactttctgttatggtcaaagatgattatgtccacgagttctgcaggtacggagccgcagagcctcatacgattgcggctttcttgggcggagctgcagcccaggaagtgatcaaaattattaccaagcaatttgtgatttttaataatacctacatttattcaggcatgtctcagacaagcgccacattccagctttag

SEQ ID NO: 27514 - DNA, 1587 bp, Artificial Sequence
  derived and/or modified sequence
atggacgcccagcagaccaagaccaacgaggccagactgtggggcgaccacggccaggaggccctggagagcgcccacgtgtgcctgatcaacgccaccgccaccggcaccgagatcctgaagaacctggtgctgcccggcatcggcagcttcaccatcatcgacggcaaccaggtgagcggcgaggacgccggcaacaacttcttcctgcagagaagcagcatcggcaagaacagagccgaggccgccatggagttcctgcaggagctgaacagcgacgtgagcggcagcttcgtggaggagagccccgagaacctgctggacaacgaccccagcttcttctgcagattcaccgtggtggtggccacccagctgcccgagagcaccagcctgagactggccgacgtgctgtggaacagccagatccccctgctgatctgcagaacctacggcctggtgggctacatgagaatcatcatcaaggagcaccccgtgatcgagagccaccccgacaacgccctggaggacctgagactggacaagcccttccccgagctgagagagcacttccagagctacgacctggaccacatggagaagaaggaccacagccacaccccctggatcgtgatcatcgccaagtacctggcccagtggtacagcgagaccaacggcagaatccccaagacctacaaggagaaggaggacttcagagacctgatcagacagggcatcctgaagaacgagaacggcgcccccgaggacgaggagaacttcgaggaggccatcaagaacgtgaacaccgccctgaacaccacccagatccccagcagcatcgaggacatcttcaacgacgacagatgcatcaacatcaccaagcagacccccagcttctggatcctggccagagccctgaaggagttcgtggccaaggagggccagggcaacctgcccgtgagaggcaccatccccgacatgatcgccgacagcggcaagtacatcaagctgcagaacgtgtacagagagaaggccaagaaggacgccgccgccgtgggcaaccacgtggccaagctgctgcagagcatcggccaggcccccgagagcatcagcgagaaggagctgaagctgctgtgcagcaacagcgccttcctgagagtggtgagatgcagaagcctggccgaggagtacggcctggacaccatcaacaaggacgagatcatcagcagcatggacaaccccgacaacgagatcgtgctgtacctgatgctgagagccgtggacagattccacaagcagcagggcagataccccggcgtgagcaactaccaggtggaggaggacatcggcaagctgaagagctgcctgaccggcttcctgcaggagtacggcctgagcgtgatggtgaaggacgactacgtgcacgagttctgcagatacggcgccgccgagccccacaccatcgccgccttcctgggcggcgccgccgcccaggaggtgatcaagatcatcaccaagcagttcgtgatcttcaacaacacctacatctacagcggcatgagccagaccagcgccaccttccagctgtag

SEQ ID NO: 27515 - protein, 342 aa, Artificial Sequence
  derived and/or modified sequence
MGRLVAVGLLGIALALLGERLLALRNRLKASREVESVDLPHCHLIKGIEAGSEDIDILPNGLAFFSVGLKFPGLHSFAPDKPGGILMMDLKEEKPRARELRISRGFDLASFNPHGISTFIDNEFKNTVEIFKFEEAENSLLHLKTVKHELLPSVNDITAVGPAHFYATNDHYFSDPFLKYLETYLNLHWANVVYYSPNEVKVVAEGFDSANGINISPDDKYIYVADILAHEIHVLEKHTNMNLTQLKVLELDTLVDNLSIDPSSGDIWVGCHPNGQKLFVYDPNNPPSSEVLRIQNILSEKPTVTTVYANNGSVLQGSSVASVYDGKLLIGTLYHRALYCEL

SEQ ID NO: 27516 - DNA, 1029 bp, Artificial Sequence
  derived and/or modified sequence
atgggcagactggtggccgtcggcctgctggggattgcattagccttactgggcgaaaggcttctggccttacggaacagactcaaagcctctcgcgaagtcgagtcggtggacttaccgcactgccatctcatcaaaggtattgaggccgggagtgaggacattgatatcctgcctaatggactcgccttcttctccgtcgggctgaagttccccggacttcacagtttcgcccccgataagcccggcggcattttgatgatggatctgaaggaggagaaacctcgagcccgagagctgcgcatctcgcgaggcttcgatttggcgtccttcaacccacacggtatcagcactttcattgacaacgaattcaagaataccgttgaaattttcaagtttgaagaagcagaaaatagtttactgcaccttaagacagttaagcatgagctgctcccctccgttaatgatattaccgctgttggccctgctcacttttatgcgacgaacgatcactacttttccgacccatttctcaagtatctggaaacatatttgaaccttcactgggctaacgtggtgtactattcccctaatgaagtcaaggttgtcgccgaggggtttgactccgcgaatgggatcaacatttcccccgatgacaagtatatttatgtggcggatatcctcgctcatgagattcacgttctcgagaagcacactaacatgaatctgacccaactgaaagtgttagaacttgacaccctagtggataacctttctattgatccttcaagcggtgacatctgggtggggtgtcatcccaacggccaaaagctcttcgtgtatgacccaaacaatcccccttccagcgaagtcctgcggattcagaacatactatctgagaagcctactgtgaccactgtgtacgcgaacaacggctcggtgctgcaagggtcgagtgttgcctcggtgtacgacggaaaactcttaatcggtactctgtaccatcgcgcattgtactgtgagttatag

SEQ ID NO: 27517 - DNA, 1029 bp, Artificial Sequence
  derived and/or modified sequence
atgggccgcctggtggccgtgggcctgctgggcatcgccctggccctgctgggggagcggctgctggccctgaggaaccggctgaaggccagccgggaggtggagagcgtggacctgccccactgccacctgatcaagggcatcgaggccggctctgaagatattgacatcctgcccaacggcctggccttcttctctgtgggcctgaagtttcctggcctgcacagctttgccccagacaagccaggcggcatcctgatgatggacctgaaggaggagaagccccgggcccgggagctgcgcatcagccggggctttgacctggccagcttcaacccccacggcatcagcaccttcatcgacaatgagttcaagaacacagtggagatcttcaagtttgaggaggccgagaacagcctgctgcacctgaagacagtgaagcatgagctgctgcccagcgtgaatgacatcacagctgtgggccctgcccacttctacgccaccaatgaccactacttcagtgaccccttcctgaagtacctggagacctacctgaacctgcactgggccaacgtggtgtactacagccccaatgaggtgaaggtggtggccgagggctttgattctgccaacggcatcaacatcagcccagatgacaagtacatctacgtggccgacatcctggcccacgagatccacgtgctggagaagcacaccaacatgaacctgacccagctgaaggtgctggagctggacaccctggtggacaacctgagcattgaccccagcagcggggacatctgggtgggctgccaccccaacggccagaagctgtttgtgtatgaccccaacaacccccccagcagcgaggtgctgcgcatccagaacatcctgtctgagaagcccaccgtgaccaccgtgtatgccaacaatggatctgtgctgcagggcagctctgtggcctctgtgtatgatggcaagctgctgattggcaccctgtaccaccgggccctgtactgtgagctgtag

SEQ ID NO: 27518 - DNA, 1029 bp, Artificial Sequence
  derived and/or modified sequence
atgggccggctggtggccgtgggcctgctgggcatcgccctggccctgttgggcgaacggctattggcccttcgtaaccgactgaaggcaagcagggaggtggaaagtgtggaccttccacattgccaccttatcaagggcattgaggccggctctgaggacatcgacatcctgcctaacggcctggcctttttttcggttggattaaagtttccaggattgcactcatttgccccagacaaacctggcgggatccttatgatggaccttaaggaggaaaaacctagggcccgggagcttagaatcagtagggggttcgatctggcttctttcaacccccacggcatatcgacatttatcgataacgaatttaagaacaccgtcgaaatctttaagttcgaagaagccgaaaactcgttactgcatctcaaaacggttaagcacgaactgcttccatccgttaacgacatcactgctgtgggccccgcgcacttctacgctaccaacgatcattacttttccgacccgtttcttaagtacctcgaaacttacctgaacctccactgggccaatgtggtgtattacagtccaaatgaggtaaaagtagtggcagaaggattcgattcagccaacggcataaacatctctcctgacgataagtatatatacgtggccgacattcttgcccatgagatccacgttttagagaaacacaccaacatgaatttgacgcagctgaaggttctggagcttgacactttggtggacaatctgtcaatcgatcctagtagtggcgacatttgggtgggttgtcacccaaatggccaaaaattgttcgtgtacgatcccaacaaccccccttcaagtgaggtgttgagaatccagaacatcctctcagaaaagccgacagtgaccacagtgtacgccaataatggaagcgttttgcagggttcatcggtggcatcggtgtacgacggcaaactgctcatcgggacactgtatcatcgggctttgtattgcgaattatag

SEQ ID NO: 27519 - DNA, 1726 bp, Artificial Sequence
  derived and/or modified sequence
aagtttcacatcatgagcctaatgtaaggcgtgtccgggccgtcccgaaggtatctggggaaataggtttgtgaggacaaagaccagggccaggcccagggcggagcctccgcggccccgacgcagggactcggcctaggcggaggacggggcggagcgcggccggcaccatcgagccgggaagatggcaccgcccacggagctgctggccaggccggagcgaggcagcgcgcccggctcccgcgccatggggcggctggtggctgtgggcttgctggggatcgcgctggcgctcctgggcgagaggcttctggcactcagaaatcgacttaaagcctccagagaagtagaatctgtagaccttccacactgccacctgattaaaggaattgaagctggctctgaagatattgacatacttcccaatggtctggctttttttagtgtgggtctaaaattcccaggactccacagctttgcaccagataagcctggaggaatactaatgatggatctaaaagaagaaaaaccaagggcacgggaattaagaatcagtcgtgggtttgatttggcctcattcaatccacatggcatcagcactttcatagacaacgaattcaagaatacagtggaaatttttaaatttgaagaagcagaaaattctctgttgcatctgaaaacagtcaaacatgagcttcttccaagtgtgaatgacatcacagctgttggaccggcacatttctatgccacaaatgaccactacttctctgatcctttcttaaagtatttagaaacatacttgaacttacactgggcaaatgttgtttactacagtccaaatgaagttaaagtggtagcagaaggatttgattcagcaaatgggatcaatatttcacctgatgataagtatatctatgttgctgacatattggctcatgaaattcatgttttggaaaaacacactaatatgaatttaactcagttgaaggtacttgagctggatacactggtggataatttatctattgatccttcctcgggggacatctgggtaggctgtcatcctaatggccagaagctcttcgtgtatgacccgaacaatcctccctcgtcagaggttctccgcatccagaacattctatctgagaagcctacagtgactacagtttatgccaacaatgggtctgttctccaaggaagttctgtagcctcagtgtatgatgggaagctgctcataggcactttataccacagagccttgtattgtgaactctaaattgtacttttggcatgaaagtgcgataacttaacaattaattttctatgaattgctaattctgagggaatttaaccagcaacattgacccagaaatgtatggcatgtgtagttaattttattccagtaaggaacggcccttttagttcttagagcacttttaacaaaaaaggaaaatgaacaggttctttaaaatgccaagcaagggacagaaaagaaagctgctttcgaataaagtgaatacattttgcacaaagtaagcctcacctttgccttccaactgccagaacatggattccactgaaatagagtgaattatatttccttaaaatgtgagtgacctcacttctggcactgtgactactatggctgtttagaactactgataacgtattttgatgttttgtacttacatctttgtttaccattaaaaagttggagttatattaa

SEQ ID NO: 27520 - DNA, 1029 bp, Artificial Sequence
  derived and/or modified sequence
atgggcaggcttgtcgcagtgggacttttgggaattgctttggcactgcttggagaacggctcctggccctgagaaatagactaaaggcgagtcgggaagttgaatcggtcgacctccctcattgccacctgattaaaggcatcgaggccggaagtgaagatattgacatattgccaaacggattagcgtttttcagtgttggactgaagttcccgggactgcacagctttgcgcctgataagcctggtggcatactcatgatggaccttaaagaggaaaagccgcgagcacgcgagttacgtattagcagaggatttgacctggcctcttttaacccccacggcatttcgacgttcatcgataacgagttcaagaatactgtcgaaatattcaagttcgaagaagccgagaactctctgctacacctaaagaccgtgaaacatgaacttctgccttctgtgaacgatataactgccgtggggcctgcccacttttacgctaccaacgaccattatttttccgaccccttcctcaagtatctggagacttaccttaacctacattgggccaatgtcgtgtattatagcccgaacgaggtgaaagtggtagctgagggattcgactcggccaacggaataaatatttcccccgatgacaagtatatttacgtcgctgatatcctggcacacgagattcacgtgctggagaagcacactaacatgaacctcacccagttgaaagttctcgagttggatacattggtggataacctgagcatcgatccgagctcaggtgatatttgggtgggttgccatccaaacggtcagaagctgttcgtatacgatcctaacaatcccccttcctcggaagtgcttcgaattcaaaacatactcagcgagaagcccacggtcacaaccgtctacgccaacaacgggtccgtgttgcagggttcgtccgtagcaagcgtgtatgatggaaaactgctcatcggtacactatatcaccgtgcgttgtactgcgagttatag

SEQ ID NO: 27521 - DNA, 1029 bp, Artificial Sequence
  derived and/or modified sequence
atgggcagactggtggccgtgggcctgctgggcatcgccctggccctgctgggcgagagactgctggccctgagaaacagactgaaggccagcagagaggtggagagcgtggacctgccccactgccacctgatcaagggcatcgaggccggcagcgaggacatcgacatcctgcccaacggcctggccttcttcagcgtgggcctgaagttccccggcctgcacagcttcgcccccgacaagcccggcggcatcctgatgatggacctgaaggaggagaagcccagagccagagagctgagaatcagcagaggcttcgacctggccagcttcaacccccacggcatcagcaccttcatcgacaacgagttcaagaacaccgtggagatcttcaagttcgaggaggccgagaacagcctgctgcacctgaagaccgtgaagcacgagctgctgcccagcgtgaacgacatcaccgccgtgggccccgcccacttctacgccaccaacgaccactacttcagcgaccccttcctgaagtacctggagacctacctgaacctgcactgggccaacgtggtgtactacagccccaacgaggtgaaggtggtggccgagggcttcgacagcgccaacggcatcaacatcagccccgacgacaagtacatctacgtggccgacatcctggcccacgagatccacgtgctggagaagcacaccaacatgaacctgacccagctgaaggtgctggagctggacaccctggtggacaacctgagcatcgaccccagcagcggcgacatctgggtgggctgccaccccaacggccagaagctgttcgtgtacgaccccaacaacccccccagcagcgaggtgctgagaatccagaacatcctgagcgagaagcccaccgtgaccaccgtgtacgccaacaacggcagcgtgctgcagggcagcagcgtggccagcgtgtacgacggcaagctgctgatcggcaccctgtaccacagagccctgtactgcgagctgtag

SEQ ID NO: 27522 - protein, 231 aa, Artificial Sequence
  derived and/or modified sequence
MSLFDLFRGFFGFPGPRSFSPGGGIRFHDNFGFDDLVRDFNSIFSDMGAWTLPSHPPELPGPESETPGERLREGQTLRDSMLKYPDSHQPRIFGGVLESDARSESPQPAPDWGSQRPFHRFDDVWPMDPHPRTREDNDLDSQVSQEGLGPVLQPQPKSYFKSISVTKITKPDGIVEERRTVVDSEGRTETTVTRHEADSSPRGDPESPRPPALDDAFSILDLFLGRWFRSR

SEQ ID NO: 27523 - DNA, 696 bp, Artificial Sequence
  derived and/or modified sequence
atgagcctttttgacctctttagaggcttttttggattccctgggcccaggagctttagtcccggcgggggaatacgctttcatgacaacttcggtttcgatgacctagtacgggacttcaatagtattttcagcgatatgggtgcctggaccttacccagtcaccccccggagctccctggccctgagtccgagactcccggcgagcggttgagagaagggcaaaccctccgagactctatgctcaagtacccagacagccatcagccaaggatatttgggggcgtgctagagtctgacgcaagaagcgagtccccgcaacccgcacctgactgggggtcccagcggcccttccatagattcgatgacgtgtggccaatggaccctcacccgcgcacgagggaagacaatgatctcgatagccaagtgagtcaggagggactcgggcctgtgctgcagcctcagccaaaaagctatttcaagtccatttcagtaaccaaaatcacaaagcctgatgggatcgtagaggagagacgaactgtggtcgattcggaagggcgcactgaaacaaccgtcacccgccacgaagcggatagttctccacgcggggatccagagtctccccggcccccagcactggatgacgctttctctattctggaccttttcctcggcaggtggtttcgatcacgctag

SEQ ID NO: 27524 - DNA, 914 bp, Artificial Sequence
  derived and/or modified sequence
agtgtcaggatcgcgggcttgctttccggtagcgtgggctgacgcctcgctcaatttctcacagggctgcgcaggtttcccccgtctgcgaatggaccactggaggggttcaaaggttcgcgtcccagtacgggaatgagcctctttgatctcttccggggctttttcggctttcctggacctcggagcttcagcccaggaggagggatacgtttccacgataacttcggctttgatgacctagtacgagatttcaatagcatcttcagcgatatgggggcctggaccttgccttcccatcctcctgaacttccaggtcctgagtcagagacacctggtgagagactacgggagggacagacacttcgggactcaatgcttaagtatccagatagtcaccagcccaggatctttgggggggtcttggagagtgatgcaagaagtgaatccccccaaccagcaccagactggggctcccagaggccatttcataggtttgatgatgtatggcctatggacccccatcctagaaccagagaggacaatgatcttgattcccaggtttcccaggagggtcttggcccggttctacagccccagcccaaatcctatttcaagagcatctctgtgaccaagatcactaaaccagatgggatagtggaggagcgccggactgtggtggacagtgagggccggacagagactacagtaacccgacacgaagcagatagcagtcctaggggtgatccagaatcaccaagacctccagccctggatgatgccttttccatcctggacttattcctgggacgttggttccggtcccggtagccttgttaaccctcagaggccttcaagtcctttccacctctcacccattgcccaccattaataagcttagcttctcttgccac

SEQ ID NO: 27525 - DNA, 696 bp, Artificial Sequence
  derived and/or modified sequence
atgagcctgtttgacctcttccggggcttcttcggcttccctggccccaggagcttcagccctgggggcggcatccgcttccatgacaactttggatttgatgacctggtgcgggacttcaacagcatcttcagtgacatgggcgcctggaccctgcccagccaccccccagagctgcccggccctgagagcgagaccccaggagagcggctgcgggagggccagaccctgcgggacagcatgctgaagtacccagacagccaccagccccgcatctttggaggagtgctggagagtgatgcccggtctgagagcccccagcctgccccagactggggcagccagaggcccttccacagatttgatgatgtgtggcccatggacccccaccccaggaccagagaagataatgacctggacagccaggtgtcccaggagggcctgggccctgtgctgcagccccagcccaagagctacttcaagagcatctctgtgaccaagatcaccaagccagatggcatcgtggaggagaggagaacagtggtggacagcgagggccgcacagagaccaccgtgaccaggcatgaagctgacagcagccccaggggggaccctgagagcccccggcccccagccctggatgatgccttcagcatcctggacctcttcctgggccgctggttccgcagcaggtag

SEQ ID NO: 27526 - DNA, 696 bp, Artificial Sequence
  derived and/or modified sequence
atgagcctgttcgacctgttccggggcttcttcggcttccccggcccccggtcattttctccaggggggggcatccgtttccacgacaattttggattcgacgacctcgtgcgcgactttaatagtatatttagcgatatgggagcatggacactgccttcccatccacctgagctgcccggcccagagtcggagacaccgggtgagcgcttaagagagggccagactcttagggactcaatgttgaagtaccctgattcacatcagccccgcatttttgggggcgtcctagagagcgatgcccggtctgagtctccacagcctgctcctgactggggaagccagcgccccttccaccggttcgatgacgtgtggccaatggacccacaccctcggacacgggaggacaacgatctggattctcaggtgtcacaggaggggctgggccccgttctccaaccacaacccaagtcctatttcaagtccatttctgtgacgaagattactaaacctgacggaatcgtcgaggaaagacgcactgtagtagattccgagggccggaccgagactactgtgactaggcacgaagccgatagctcccctaggggcgatccggaaagcccccgacccccagccctggatgatgccttctcaattctcgacctgtttctgggccgctggtttagatcacgttag

SEQ ID NO: 27527 - DNA, 696 bp, Artificial Sequence
  derived and/or modified sequence
atgtctctctttgatctcttccggggtttttttgggttccccggaccccgaagcttttcaccaggcggtggtatccggtttcacgataactttggattcgatgatctggttcgcgactttaatagcatcttttcggacatgggcgcttggacactcccctcccaccctcccgagctgccgggtccggaatccgaaacaccaggggagaggctccgggagggccagaccctccgagactcaatgctaaaataccccgattcacaccaaccacgaattttcggaggggtgcttgagtccgatgcaaggtctgagtcacctcagccagcgccagattggggatctcagagacccttccacaggttcgacgacgtttggccgatggacccccaccctcggacccgggaggataacgatctcgattctcaggtgtctcaggaaggccttgggccagttctgcagcctcagccgaaaagctacttcaaatctatctcagttaccaagatcaccaagcctgacggcatcgttgaagagagaagaactgtcgtggactccgagggcagaaccgagaccactgttacccgtcacgaggctgacagtagccctagaggggatcccgagagtccccgtcctcccgctttagacgacgctttttcgattctcgacctctttctgggcaggtggtttcgctccagatag

SEQ ID NO: 27528 - DNA, 696 bp, Artificial Sequence
  derived and/or modified sequence
atgagcctgttcgacctgttcagaggcttcttcggcttccccggccccagaagcttcagccccggcggcggcatcagattccacgacaacttcggcttcgacgacctggtgagagacttcaacagcatcttcagcgacatgggcgcctggaccctgcccagccacccccccgagctgcccggccccgagagcgagacccccggcgagagactgagagagggccagaccctgagagacagcatgctgaagtaccccgacagccaccagcccagaatcttcggcggcgtgctggagagcgacgccagaagcgagagcccccagcccgcccccgactggggcagccagagacccttccacagattcgacgacgtgtggcccatggacccccaccccagaaccagagaggacaacgacctggacagccaggtgagccaggagggcctgggccccgtgctgcagccccagcccaagagctacttcaagagcatcagcgtgaccaagatcaccaagcccgacggcatcgtggaggagagaagaaccgtggtggacagcgagggcagaaccgagaccaccgtgaccagacacgaggccgacagcagccccagaggcgaccccgagagccccagaccccccgccctggacgacgccttcagcatcctggacctgttcctgggcagatggttcagaagcagatag

SEQ ID NO: 27529 - protein, 742 aa, Artificial Sequence
  derived and/or modified sequence
MDSKESLTPGREENPSSVLAQERGDVMDFYKTLRGGATVKVSASSPSLAVASQSDSKQRRLLVDFPKGSVSNAQQPDLSKAVSLSMGLYMGETETKVMGNDLGFPQQGQISLSSGETDLKLLEESIANLNRSTSVPENPKSSASTAVSAAPTEKEFPKTHSDVSSEQQHLKGQTGTNGGNVKLYTTDQSTFDILQDLEFSSGSPGKETNESPWRSDLLIDENCLLSPLAGEDDSFLLEGNSNEDCKPLILPDTKPKIKDNGDLVLSSPSNVTLPQVKTEKEDFIELCTPGVIKQEKLGTVYCQASFPGANIIGNKMSAISVHGVSTSGGQMYHYDMNTASLSQQQDQKPIFNVIPPIPVGSENWNRCQGSGDDNLTSLGTLNFPGRTVFSNGYSSPSMRPDVSSPPSSSSTATTGPPPKLCLVCSDEASGCHYGVLTCGSCKVFFKRAVEGQHNYLCAGRNDCIIDKIRRKNCPACRYRKCLQAGMNLEARKTKKKIKGIQQATTGVSQETSENPGNKTIVPATLPQLTPTLVSLLEVIEPEVLYAGYDSSVPDSTWRIMTTLNMLGGRQVIAAVKWAKAIPGFRNLHLDDQMTLLQYSWMFLMAFALGWRSYRQSSANLLCFAPDLIINEQRMTLPCMYDQCKHMLYVSSELHRLQVSYEEYLCMKTLLLLSSVPKDGLKSQELFDEIRMTYIKELGKAIVKREGNSSQNWQRFYQLTKLLDSMHENVMWLKPESTSHTLI

SEQ ID NO: 27530 - protein, 144 aa, Artificial Sequence
  derived and/or modified sequence
MDSKESLTPGREENPSSVLAQERGDVMDFYKTLRGGATVKVSASSPSLAVASQSDSKQRRLLVDFPKGSVSNAQQPDLSKAVSLSMGLYMGETETKVMGNDLGFPQQGQISLSSGETDLKLLEESIANLNRSTSVPENPKSSAS

SEQ ID NO: 27531 - protein, 145 aa, Artificial Sequence
  derived and/or modified sequence
MDSKESLTPGREENPSSVLAQERGDVMDFYKTLRGGATVKVSASSPSLAVASQSDSKQRRLLVDFPKGSVSNAQQPDLSKAVSLSMGLYMGETETKVMGNDLGFPQQGQISLSSGETDLKLLEESIANLNRSTSVPENPKSSAST

SEQ ID NO: 27532 - DNA, 2229 bp, Artificial Sequence
  derived and/or modified sequence
atggacagcaaggagagcctgacccccggcagagaggagaaccccagcagcgtgctggcccaggagagaggcgacgtgatggacttctacaagaccctgagaggcggcgccaccgtgaaggtgagcgccagcagccccagcctggccgtggccagccagagcgacagcaagcagagaagactgctggtggacttccccaagggcagcgtgagcaacgcccagcagcccgacctgagcaaggccgtgagcctgagcatgggcctgtacatgggcgagaccgagaccaaggtgatgggcaacgacctgggcttcccccagcagggccagatcagcctgagcagcggcgagaccgacctgaagctgctggaggagagcatcgccaacctgaacagaagcaccagcgtgcccgagaaccccaagagcagcgccagcaccgccgtgagcgccgcccccaccgagaaggagttccccaagacccacagcgacgtgagcagcgagcagcagcacctgaagggccagaccggcaccaacggcggcaacgtgaagctgtacaccaccgaccagagcaccttcgacatcctgcaggacctggagttcagcagcggcagccccggcaaggagaccaacgagagcccctggagaagcgacctgctgatcgacgagaactgcctgctgagccccctggccggcgaggacgacagcttcctgctggagggcaacagcaacgaggactgcaagcccctgatcctgcccgacaccaagcccaagatcaaggacaacggcgacctggtgctgagcagccccagcaacgtgaccctgccccaggtgaagaccgagaaggaggacttcatcgagctgtgcacccccggcgtgatcaagcaggagaagctgggcaccgtgtactgccaggccagcttccccggcgccaacatcatcggcaacaagatgagcgccatcagcgtgcacggcgtgagcaccagcggcggccagatgtaccactacgacatgaacaccgccagcctgagccagcagcaggaccagaagcccatcttcaacgtgatcccccccatccccgtgggcagcgagaactggaacagatgccagggcagcggcgacgacaacctgaccagcctgggcaccctgaacttccccggcagaaccgtgttcagcaacggctacagcagccccagcatgagacccgacgtgagcagcccccccagcagcagcagcaccgccaccaccggccccccccccaagctgtgcctggtgtgcagcgacgaggccagcggctgccactacggcgtgctgacctgcggcagctgcaaggtgttcttcaagagagccgtggagggccagcacaactacctgtgcgccggcagaaacgactgcatcatcgacaagatcagaagaaagaactgccccgcctgcagatacagaaagtgcctgcaggccggcatgaacctggaggccagaaagaccaagaagaagatcaagggcatccagcaggccaccaccggcgtgagccaggagaccagcgagaaccccggcaacaagaccatcgtgcccgccaccctgccccagctgacccccaccctggtgagcctgctggaggtgatcgagcccgaggtgctgtacgccggctacgacagcagcgtgcccgacagcacctggagaatcatgaccaccctgaacatgctgggcggcagacaggtgatcgccgccgtgaagtgggccaaggccatccccggcttcagaaacctgcacctggacgaccagatgaccctgctgcagtacagctggatgttcctgatggccttcgccctgggctggagaagctacagacagagcagcgccaacctgctgtgcttcgcccccgacctgatcatcaacgagcagagaatgaccctgccctgcatgtacgaccagtgcaagcacatgctgtacgtgagcagcgagctgcacagactgcaggtgagctacgaggagtacctgtgcatgaagaccctgctgctgctgagcagcgtgcccaaggacggcctgaagagccaggagctgttcgacgagatcagaatgacctacatcaaggagctgggcaaggccatcgtgaagagagagggcaacagcagccagaactggcagagattctaccagctgaccaagctgctggacagcatgcacgagaacgtgatgtggctgaagcccgagagcaccagccacaccctgatctag

SEQ ID NO: 27533 - DNA, 2229 bp, Artificial Sequence
  derived and/or modified sequence
atggactcaaaagagagcctgaccccaggtcgagaagagaaccccagcagtgtcctggcccaggagcgcggcgatgtgatggatttttataaaacccttcgcgggggcgcaactgttaaagtgagcgcctcgtccccctctttggccgtagcaagtcagtctgacagcaagcagcgaaggctgttggtggacttccccaaaggctcagtgagcaatgctcagcagcccgacctgtccaaagctgtgtcactgtcaatggggctctacatgggagagaccgagaccaaggtgatggggaacgatttggggttcccccagcaaggtcaaatttcactgtccagcggtgagacagaccttaaactgctagaggaatctatcgcaaacctgaaccggagcaccagtgtccccgaaaaccctaaatctagtgcctctacggccgtttcggccgcgcctaccgagaaagaattccccaaaacccactcagatgtgtcaagcgagcagcagcacctgaaaggtcagacaggaactaatggcggcaacgtgaagctgtacacaactgatcagtcaactttcgacatcctccaagatcttgagttcagctcgggctcccccggcaaggaaacaaatgagagcccctggcggtccgatcttctgattgatgaaaactgcctgttgagccctctggctggcgaggatgattcttttcttctggaaggtaattctaacgaggattgtaagcctctcatcctgcccgacaccaagccaaaaataaaagataacggtgacctggtcctcagctctccctcaaatgtaacactgcctcaggttaaaacagaaaaggaggacttcattgagctgtgtacccccggcgtcatcaagcaggagaagcttgggaccgtgtactgccaggcatccttccctggagctaatattatcggaaacaaaatgtcggcaatctcggttcacggagtcagtacaagtggtggtcaaatgtatcactatgatatgaataccgcttccttgtctcagcaacaggatcaaaagccaatattcaatgtgattccaccaattccagtggggtcggaaaactggaaccgttgtcagggttctggcgacgataacctcacctcactgggcacacttaacttccctggcagaactgtcttcagcaacggatattcatcacctagcatgaggccagacgtgtccagccctccaagcagcagttcaactgcgactactgggccaccccccaagctctgtcttgtttgcagcgacgaggcctccggctgtcactacggggtgctcacttgtggtagctgcaaagtcttcttcaagagagctgtggaaggtcagcacaactatctgtgtgccggacgcaacgattgcataattgataagatcagacgcaagaactgcccggcttgtagataccgaaagtgcctgcaggccgggatgaatttagaggctcgaaagacaaaaaaaaaaataaaaggcattcaacaggctaccactggagtcagccaggaaactagcgagaatcctggcaacaagacaatcgtccctgcgaccctgcctcagctgacccccacactagtctccctgctggaggtgatcgagcccgaagtactatatgccggttatgatagcagcgtcccagatagtacctggcggattatgacgaccctcaacatgctgggaggacgccaggtaatcgcagcagtcaagtgggccaaagccatacctgggtttagaaacctgcatctggacgaccagatgactcttctgcaatacagctggatgttcctgatggccttcgctttgggctggcgcagctaccgccagtcctctgcaaatctgctgtgcttcgcgcctgatttgataatcaacgagcaaagaatgaccctcccttgtatgtacgaccaatgcaaacatatgttatacgtgtcatctgagctgcatcgcttacaggtgagctacgaggaatacctgtgcatgaaaactttgcttctgctcagctcggtcccgaaagacggactgaaaagccaagagcttttcgacgaaattagaatgacctacataaaagagttaggaaaagcaattgtgaagagagaagggaacagcagccagaattggcaacgattttatcagctgactaagctactggattccatgcacgaaaatgtgatgtggctgaagcctgagagtacctcacatactctcatctag

SEQ ID NO: 27534 - DNA, 2229 bp, Artificial Sequence
  derived and/or modified sequence
atggacagcaaggagagcctgaccccaggccgggaggagaaccccagctctgtgctggcccaggagagaggagatgtgatggacttctacaagaccctgcggggcggggccaccgtgaaggtgtctgccagcagccccagcctggccgtggccagccagagcgacagcaagcagaggcggctgctggtggacttccccaagggctctgtgtccaatgcccagcagcctgacctgagcaaggctgtgtccctgtccatgggcctgtacatgggagaaacagagaccaaggtgatgggaaatgacctgggcttcccccagcagggccagatcagcctgagcagcggggagacagacctgaagctgctggaggagagcatcgccaacctgaacagaagcacctctgtgcctgagaaccccaagagcagcgccagcacagctgtgtctgctgcccccacagagaaggagttccccaagacccacagtgatgtgtcctctgagcagcagcacctgaagggccagacaggcaccaatggaggaaatgtgaagctgtacaccacagaccagagcacctttgacatcctgcaggacctggagttcagcagcggcagccctgggaaggagaccaatgaaagcccctggaggagtgacctgctgattgatgagaactgcctgctgagccccctggccggagaagatgacagcttcctgctggagggcaacagcaatgaagactgcaagcccctcatcctgcctgacaccaagcccaagatcaaggacaacggggacctggtgctgagcagccccagcaatgtgaccctgccccaggtgaagacagagaaggaggacttcatcgagctgtgcaccccaggagtcatcaagcaggagaagctgggcaccgtgtactgccaggccagcttccctggggccaacatcatcggcaacaagatgtctgccatctctgtgcacggcgtgtccaccagcggcggccagatgtaccactatgacatgaacacagccagcctgagccagcagcaggaccagaagcccatcttcaacgtcatcccccccatccctgtgggcagcgagaactggaaccgctgccagggcagcggagatgacaacctgaccagcctgggcaccctgaacttccctggccgcacagtgttcagcaatggctacagcagccccagcatgaggccagatgtgagcagcccccccagcagcagcagcacagccaccaccggccccccacccaagctgtgcctggtgtgcagtgatgaggccagcggctgccactatggagtgctgacctgtggcagctgcaaggtgttcttcaagagagctgtggagggccagcacaactacctgtgtgccggcagaaatgactgcatcatcgacaagatccggaggaagaactgcccagcctgccgctacaggaagtgcctgcaggccggcatgaacctggaggccaggaagaccaagaagaagatcaagggcatccagcaggccaccactggagtgtcccaggagaccagtgaaaatcctggcaacaagaccatcgtgcctgccaccctgccccagctgacccccaccctggtgtccctgctggaggtgattgagcctgaggtgctgtatgccggctatgacagctctgtgcctgacagcacctggaggatcatgaccaccctgaacatgctgggcggccggcaggtgattgctgctgtgaagtgggccaaggccatccctggcttcaggaacctgcacctggatgaccagatgaccctgctgcagtacagctggatgttcctgatggcctttgccctgggctggaggagctaccggcagagcagcgccaacctgctgtgctttgccccagacctgatcatcaatgagcagaggatgaccctgccctgcatgtatgaccagtgcaagcacatgctgtatgtgtcctctgagctgcaccggctgcaggtgtcctatgaggagtacctgtgcatgaagaccctgctgctgctgagctctgtgcccaaggatggcctgaagagccaggagctgtttgatgagatccgcatgacctacatcaaggagctgggcaaggccatcgtgaagcgggagggcaacagcagccagaactggcagcgcttctaccagctgaccaagctgctggacagcatgcatgaaaatgtgatgtggctgaagccagagagcaccagccacaccctcatctag

SEQ ID NO: 27535 - DNA, 2229 bp, Artificial Sequence
  derived and/or modified sequence
atggacagcaaggagagcctgacccccggccgggaggagaacccctcatctgtccttgctcaagaaagaggggatgtcatggacttttataaaactcttcggggcggcgctactgttaaagtctccgcttcctcaccttctctggctgtagcgagccagtcagatagtaaacagcgcagattattggtggacttccctaagggctctgtgagtaacgcccagcagccggacctgtctaaagccgtgagcctgtccatggggttatacatgggagagactgagaccaaagtgatgggaaacgaccttgggtttccacagcagggccagatctccctgagctcaggagagacggatctgaagcttctggaagaaagcatcgcaaacctcaaccggtcaacgtccgtcccagagaacccaaagtcatcagccagtacggccgtgtcagcagcccctacagagaaagagtttcctaagactcatagcgatgttagctccgaacagcagcatctcaaaggccaaacgggtacaaacgggggaaatgtaaagttatatacaactgaccagtcgacgtttgacattctgcaggatctggaattttccagcgggagtcctggcaaggaaactaacgagagtccttggagaagcgacctccttattgacgaaaactgcttgctttctccgctggcgggtgaggacgattccttcctgctagagggtaattctaacgaggattgtaagccactcattctgccagacacaaagcctaagatcaaagataatggcgatcttgtgctgtctagcccaagcaacgttacactaccgcaagtcaagacagagaaagaggatttcatcgagctgtgtactcccggagtgattaaacaggagaagctgggaaccgtatactgccaggcatccttccccggtgccaatatcatcggaaacaaaatgagcgccatctcagtgcacggggtgagcacttcaggcggacaaatgtaccactatgatatgaacactgcgagcctgagtcagcagcaggatcagaaacctatctttaacgtaatacctccgattcctgtgggatctgagaactggaacagatgtcagggtagcggagacgataatctgacgagtctgggaacacttaactttcctggacggacagtcttcagcaatggctacagcagcccatcgatgcggcccgacgtctcatcacccccctcatcttcctccacagcaactaccgggcctccccctaaactttgtctggtgtgctccgacgaagcttcagggtgccactacggtgttctgacatgtggcagctgtaaggtcttctttaaaagggccgtggaaggtcaacacaattatctgtgcgcaggacgaaacgattgcattattgataagattcggaggaagaattgtcccgcctgccggtaccgtaagtgcctccaggccggcatgaacctggaggctagaaagacaaagaaaaaaataaaggggatccaacaggcaacaacaggtgtgtcgcaggagacctccgaaaacccaggaaacaaaacaatagtgcctgccaccctcccgcagctgacccccaccctggtgtctctcctcgaggtgatcgagccagaagtcctgtatgccggctacgattcctccgtgcccgattcaacatggcgcatcatgacgaccctcaacatgctgggtgggcgccaggtgattgccgcagttaagtgggctaaggccatcccggggttccgcaatctgcacttggacgaccaaatgaccttacttcaatacagctggatgtttctaatggcctttgctttagggtggagatcctatcggcaatcaagtgctaatctgctttgcttcgcccctgatctgatcattaatgaacagcggatgacgctgccatgcatgtatgaccaatgtaagcacatgctatacgtgtcttcagaattgcatcgattgcaggtgtcatacgaggaatatctctgtatgaagaccctgttactactgtcctccgtgcccaaggacggcctcaaaagccaagagctgttcgacgagatcagaatgacctacatcaaggagctgggcaaggccatcgttaagagggagggaaattccagccagaattggcagcggttttaccagctcactaaactgctcgattccatgcacgaaaatgtgatgtggctaaagccagaaagcacgagccacaccttgatctag

SEQ ID NO: 27536 - DNA, 3789 bp, Artificial Sequence
  derived and/or modified sequence
tttttagaaaaaaaaaatatatttccctcctgctccttctgcgttcacaagctaagttgtttatctcggctgcggcgggaactgcggacggtggcgggcgagcggctcctctgccagagttgatattcactgatggactccaaagaatcattaactcctggtagagaagaaaaccccagcagtgtgcttgctcaggagaggggagatgtgatggacttctataaaaccctaagaggaggagctactgtgaaggtttctgcgtcttcaccctcactggctgtcgcttctcaatcagactccaagcagcgaagacttttggttgattttccaaaaggctcagtaagcaatgcgcagcagccagatctgtccaaagcagtttcactctcaatgggactgtatatgggagagacagaaacaaaagtgatgggaaatgacctgggattcccacagcagggccaaatcagcctttcctcgggggaaacagacttaaagcttttggaagaaagcattgcaaacctcaataggtcgaccagtgttccagagaaccccaagagttcagcatccactgctgtgtctgctgcccccacagagaaggagtttccaaaaactcactctgatgtatcttcagaacagcaacatttgaagggccagactggcaccaacggtggcaatgtgaaattgtataccacagaccaaagcacctttgacattttgcaggatttggagttttcttctgggtccccaggtaaagagacgaatgagagtccttggagatcagacctgttgatagatgaaaactgtttgctttctcctctggcgggagaagacgattcattccttttggaaggaaactcgaatgaggactgcaagcctctcattttaccggacactaaacccaaaattaaggataatggagatctggttttgtcaagccccagtaatgtaacactgccccaagtgaaaacagaaaaagaagatttcatcgaactctgcacccctggggtaattaagcaagagaaactgggcacagtttactgtcaggcaagctttcctggagcaaatataattggtaataaaatgtctgccatttctgttcatggtgtgagtacctctggaggacagatgtaccactatgacatgaatacagcatccctttctcaacagcaggatcagaagcctatttttaatgtcattccaccaattcccgttggttccgaaaattggaataggtgccaaggatctggagatgacaacttgacttctctggggactctgaacttccctggtcgaacagttttttctaatggctattcaagccccagcatgagaccagatgtaagctctcctccatccagctcctcaacagcaacaacaggaccacctcccaaactctgcctggtgtgctctgatgaagcttcaggatgtcattatggagtcttaacttgtggaagctgtaaagttttcttcaaaagagcagtggaaggacagcacaattacctatgtgctggaaggaatgattgcatcatcgataaaattcgaagaaaaaactgcccagcatgccgctatcgaaaatgtcttcaggctggaatgaacctggaagctcgaaaaacaaagaaaaaaataaaaggaattcagcaggccactacaggagtctcacaagaaacctctgaaaatcctggtaacaaaacaatagttcctgcaacgttaccacaactcacccctaccctggtgtcactgttggaggttattgaacctgaagtgttatatgcaggatatgatagctctgttccagactcaacttggaggatcatgactacgctcaacatgttaggagggcggcaagtgattgcagcagtgaaatgggcaaaggcaataccaggtttcaggaacttacacctggatgaccaaatgaccctactgcagtactcctggatgtttcttatggcatttgctctggggtggagatcatatagacaatcaagtgcaaacctgctgtgttttgctcctgatctgattattaatgagcagagaatgactctaccctgcatgtacgaccaatgtaaacacatgctgtatgtttcctctgagttacacaggcttcaggtatcttatgaagagtatctctgtatgaaaaccttactgcttctctcttcagttcctaaggacggtctgaagagccaagagctatttgatgaaattagaatgacctacatcaaagagctaggaaaagccattgtcaagagggaaggaaactccagccagaactggcagcggttttatcaactgacaaaactcttggattctatgcatgaaaatgttatgtggttaaaaccagaaagcacatctcacacattaatctgattttcatcccaacaatcttggcgctcaaaaaatagaactcaatgagaaaaagaagattatgtgcacttcgttgtcaataataagtcaactgatgctcatcgacaactataggaggcttttcattaaatgggaaaagaagctgtgcccttttaggatacgtgggggaaaagaaagtcatcttaattatgtttaattgtggatttaagtgctatatggtggtgctgtttgaaagcagatttatttcctatgtatgtgttatctggccatcccaacccaaactgttgaagtttgtagtaacttcagtgagagttggttactcacaacaaatcctgaaaagtatttttagtgtttgtaggtattctgtgggatactatacaagcagaactgaggcacttaggacataacacttttggggtatatatatccaaatgcctaaaactatgggaggaaaccttggccaccccaaaaggaaaactaacatgatttgtgtctatgaagtgctggataattagcatgggatgagctctgggcatgccatgaaggaaagccacgctcccttcagaattcagaggcagggagcaattccagtttcacctaagtctcataattttagttcccttttaaaaaccctgaaaactacatcaccatggaatgaaaaatattgttatacaatacattgatctgtcaaacttccagaaccatggtagccttcagtgagatttccatcttggctggtcactccctgactgtagctgtaggtgaatgtgtttttgtgtgtgtgtgtctggttttagtgtcagaagggaaataaaagtgtaaggaggacactttaaaccctttgggtggagtttcgtaatttcccagactattttcaagcaacctggtccacccaggattagtgaccaggttttcaggaaaggatttgcttctctctagaaaatgtctgaaaggattttattttctgatgaaaggctgtatgaaaataccctcctcaaataacttgcttaactacatatagattcaagtgtgtcaatattctattttgtatattaaatgctatataatggggacaaatctatattatactgtgtatggcattattaagaagctttttcattattttttatcacagtaattttaaaatgtgtaaaaattaaaaccagtgactcctgtttaaaaataaaagttgtagttttttattcatgctgaataataatctgtagttaaaaaaaaagtgtctttttacctacgcagtgaaatgtcagactgtaaaaccttgtgtggaaatgtttaacttttattttttcatttaaatttgctgttctggtattaccaaaccacacatttgtaccgaattggcagtaaatgttagccatttacagcaatgccaaatatggagaaacatcataataaaaaaatctgcttttt

SEQ ID NO: 27537 - DNA, 2229 bp, Artificial Sequence
  derived and/or modified sequence
atggatagcaaagagtctcttacacccggtcgcgaggagaatccctcttcagttttagcgcaagagagaggagacgtgatggacttctataagactctaaggggtggcgctactgtcaaggtgtcggcctcaagccctagtctcgccgtagcctctcagagtgattcaaagcagcgacgtctgctcgtcgacttcccaaaggggagcgtgtctaacgcccagcaacctgacctgagtaaagctgttagcctctctatggggctgtacatgggagagactgagaccaaagtgatgggtaacgatctggggtttccccagcaggggcaaattagcctgagcagcggagaaactgacctgaaactcctggaagagtccattgccaatctcaacagatctactagcgtccccgagaaccctaaatcaagcgctagcacggctgtctcagccgctcctacagagaaagaatttcctaagacccacagtgacgtaagctctgagcagcagcatctgaaaggccaaactggcacaaacggtgggaatgtgaaactctatacaactgaccagagcactttcgatatcctgcaggacctagagtttagcagcgggtctccgggtaaagagacaaacgagtctccctggcggagcgacttgctgattgacgagaactgcttactgtcccccctcgctggtgaggacgactctttcctcctggaggggaactccaatgaagactgtaaaccattgatcttgcctgacaccaaacccaaaattaaggataatggagatctcgtcttgtcatctcccagcaatgtgaccctacctcaggtaaagacggagaaggaagacttcattgaactctgtactcccggtgttatcaagcaggaaaagctgggtacggtttactgccaggcctcattccccggtgccaacataattggtaacaagatgtccgcaatcagcgtccacggcgtgtcgacctcaggaggccagatgtatcactacgacatgaataccgcatctctctcacagcaacaagaccagaaacccattttcaatgttatacctccaatccccgttgggtcggagaattggaaccgatgccaaggaagcggagatgacaacttgacaagcctgggaacccttaacttccccggaagaactgtgtttagcaacggttattcttcgccatcaatgagacccgatgtatccagcccgcctagctcctcatcaaccgccacaacagggccacccccaaagttgtgtctggtatgcagtgacgaagcgtccggctgccattacggcgtattaacatgcgggagctgcaaagtcttttttaaacgggctgtggaaggtcaacacaattacctgtgtgcaggcagaaatgattgcatcattgacaagattcgtcgtaagaactgcccagcttgccggtatagaaagtgtctgcaggctgggatgaatctggaggccaggaagactaaaaaaaaaataaagggaattcaacaggcaaccactggggtgtcacaagaaacatcagagaaccctggaaataaaactattgtgccagccaccttgcctcagctgacccctaccctggtgagtctgctggaggtgatcgagcccgaagtgctttacgccggatacgactctagcgttcctgacagcacgtggaggataatgacaaccttgaatatgctcggcggacggcaggtgattgccgcagtcaagtgggccaaggctatccctggtttcagaaacctccacctggatgaccaaatgacacttttgcagtattcctggatgttccttatggcatttgccctgggctggcggagttatagacagagctctgcgaacctgctgtgcttcgccccagatcttattatcaacgaacagaggatgaccctcccatgtatgtatgaccagtgcaagcatatgctgtatgtgagctcggaactccaccggttacaggtgagttatgaggagtatctgtgtatgaagaccctcctgctcctgagctcagtgccgaaagacggtcttaagtcgcaggagctgtttgacgagattcgcatgacctacatcaaagagctgggtaaagcaattgtcaagagggaggggaactcaagccagaactggcagcgcttctaccagttgactaaactccttgactccatgcacgaaaatgtgatgtggttaaagcctgaatccacatctcacacactgatatag

SEQ ID NO: 27538 - protein, 603 aa, Artificial Sequence
  derived and/or modified sequence
MAEETGQSKLAAAKKKFKEYWQRNRPGVPAAAKRNTKANGSSPETAASGGCHSSEASSSASSSLHARQSPCQEQAAVLNSRSIKISRLNDTIKSLKQQKKQVEHQLEEEKKANNEKQKAERELEGQIQRLNTEKKKLNTDLYHMKHSLRYFEEESKDLAGRLQRSSQRIGELEWSLCAVAATQKKKPDGFSSRSKALLKRQLEQSIREQILLKGHVTQLKESLKEVQLERDQYAEQIKGERAQWQQRMRKMSQEVCTLKEEKKHDTHRVEELERSLSRLKNQMAEPLPPDAPAVSSEVELQDLRKELERVAGELQAQVENNQCISLLNRGQKERLREQEERLQEQQERLREREKRLQQLAEPQSDLEELKHENKSALQLEQQVKELQEKLGQVMETLTSAEKEPEAAVPASGTGGESSGLMDLLEEKADLREHVEKLELGFIQYRRERCHQKVHRLLTEPGDSAKDASPGGGHHQAGPGQGGEEGEAAGAAGDGVAACGSYSEGHGKFLAAARNPAAEPSPGAPAPQELGAADKHGDLCEASLTNSVEPAQGEAREGSSQDNPTAQPVLQLLGEMQDHQEHPGLGSNCCVPCFCWAWLPRRRR

SEQ ID NO: 27539 - protein, 633 aa, Artificial Sequence
  derived and/or modified sequence
MLPVDGEERKSEGSDTEGDRTSPCAGPTSSATLKDLEVGGSGWRCSDPAGQPSNLLPQRGLGAPLPAETAHTQPSPNDRSLYLSPKSSSASSSLHARQSPCQEQAAVLNSRSIKISRLNDTIKSLKQQKKQVEHQLEEEKKANNEKQKAERELEGQIQRLNTEKKKLNTDLYHMKHSLRYFEEESKDLAGRLQRSSQRIGELEWSLCAVAATQKKKPDGFSSRSKALLKRQLEQSIREQILLKGHVTQLKESLKEVQLERDQYAEQIKGERAQWQQRMRKMSQEVCTLKEEKKHDTHRVEELERSLSRLKNQMAEPLPPDAPAVSSEVELQDLRKELERVAGELQAQVENNQCISLLNRGQKERLREQEERLQEQQERLREREKRLQQLAEPQSDLEELKHENKSALQLEQQVKELQEKLGQVMETLTSAEKEPEAAVPASGTGGESSGLMDLLEEKADLREHVEKLELGFIQYRRERCHQKVHRLLTEPGDSAKDASPGGGHHQAGPGQGGEEGEAAGAAGDGVAACGSYSEGHGKFLAAARNPAAEPSPGAPAPQELGAADKHGDLCEASLTNSVEPAQGEAREGSSQDNPTAQPVLQLLGEMQDHQEHPGLGSNCCVPCFCWAWLPRRRR

SEQ ID NO: 27540 - DNA, 1812 bp, Artificial Sequence
  derived and/or modified sequence
atggccgaagaaaccggacagtccaaattggctgctgcgaaaaagaaatttaaagagtactggcagcggaataggcctggtgttccggccgccgctaagcgcaacaccaaggctaacggcagcagccccgaaaccgccgcgagtggcggctgtcatagttctgaggcttcatctagcgcctcgagctctctgcacgctaggcagtccccttgtcaagaacaggctgctgtcctaaattccagatccatcaaaatttcacgacttaatgacaccattaagtccctgaagcagcagaaaaagcaggttgagcaccagctggaggaggagaaaaaagccaataatgagaaacagaaagctgaacgcgaactcgaggggcaaattcagagactgaataccgaaaagaagaaactaaataccgacctttaccacatgaaacactccttaaggtacttcgaggaagaatcaaaggacctggcagggcggcttcaacgatcatctcagaggattggcgaactagagtggtcactctgcgccgtggccgccacacagaagaagaagcccgacggtttcagcagccggtctaaggctctgctgaaacgacaactggaacagtcaatccgggagcagattctgctgaagggccacgtcacccaactcaaagaatctttgaaggaggtgcagttggaaagggaccagtatgccgaacaaatcaagggggaaagagcccaatggcaacagcggatgcgaaaaatgtctcaagaagtgtgtaccctgaaggaggagaagaagcacgacactcaccgcgtcgaagagctcgagcgctccctctctaggctgaaaaaccaaatggccgagcctcttcctcccgacgcccccgccgtgtcaagcgaggtggaactgcaggacctgcgtaaggagctcgagagggtcgccggcgaattacaggctcaggtagagaataatcagtgcatcagcctgctcaataggggccagaaggagcgcttgcgggagcaggaggaacggttgcaggaacagcaggagaggctgagggaacgtgaaaaaaggctgcaacagttagcagaacctcagagcgacttggaggagctgaaacacgagaataaatccgccctccagctggagcagcaagtgaaggagctgcaagaaaaactcggacaggtgatggagacgctaaccagtgcagagaaagagccagaagccgccgttcctgcgtccggcacaggtggcgagagcagcggtctgatggatttgctcgaggaaaaggcagatctccgagagcatgtggaaaaacttgaacttggctttatacagtaccgcagagagaggtgccatcagaaggtacataggctgctgaccgagccaggggactccgccaaggacgcctcgcccggaggcggacaccaccaagcggggccagggcagggcggagaagagggtgaagctgccggcgccgcaggcgacggtgttgctgcttgcggttcttacagcgagggtcatggtaagtttctggccgctgccaggaacccggctgccgagcccagtccaggtgcccccgctcctcaggaactaggggctgctgacaaacatggcgatctctgtgaagcatctctgacaaactctgtggaacctgctcagggcgaagctcgcgagggctcctcgcaggacaacccgaccgcacagccggtcctgcagcttttaggcgagatgcaggaccaccaagaacatcccggactaggatctaattgttgcgtgccttgcttttgttgggcatggctgccgcggaggcggaggtag

SEQ ID NO: 27541 - DNA, 1812 bp, Artificial Sequence
  derived and/or modified sequence
atggccgaagaaactggccaaagtaaacttgctgccgccaagaaaaagtttaaggaatattggcagcgaaataggcctggagtccctgctgctgcaaagcgaaacacgaaagctaacggctcttcacctgagactgcagcatctggaggctgtcattcaagcgaagcatcttcctcagcctcgagctctctgcacgccaggcagtccccctgtcaagaacaggcagcagtgctgaactcccggagcataaagatcagtcgcttaaacgacaccattaaatcgctgaagcagcagaagaaacaggtggaacaccagcttgaggaagagaagaaggccaataacgagaagcaaaaagccgagcgggagcttgaaggacagattcagaggttaaacaccgaaaaaaagaagctcaacaccgatctctatcacatgaaacacagcctccggtacttcgaagaagagtcgaaggacctcgccggtagactgcagcggtcctctcagaggatcggggaactggaatggtccttgtgtgccgtggccgccactcagaagaagaagcctgacggatttagttccagaagcaaggcactcctgaagagacagctcgaacagagcatcagagagcagatactgctcaaagggcatgtcacccagctgaaggagtccctcaaggaagtccagctggagagagatcagtacgccgagcagataaagggagagagggcgcaatggcagcagcggatgcgtaagatgtcccaggaggtctgcacgctgaaggaagagaaaaagcacgatactcatagggtcgaggagttggaacgtagcctgtcacggctcaagaaccaaatggccgagccgctcccccccgacgcacccgccgtttcctctgaagttgagcttcaggatctacggaaggaattggagcgggttgccggggagctgcaggctcaagttgaaaacaatcagtgcatcagtctactgaatcggggccagaaggagcgactccgagagcaagaagaaaggctacaggaacagcaggagcgccttagggaacgggagaagcgactccaacagctggccgagcctcaatcagaccttgaggagctgaagcatgagaataaaagcgctctacagctggagcagcaggtgaaggagctccaagaaaagttaggccaggtgatggagacactgaccagtgcagagaaggaacccgaggccgccgtccctgccagcggcaccgggggcgagtcctccggcctgatggacctgctggaggaaaaggcagaccttcgtgagcacgtggaaaaactggagttgggatttattcagtatcgcagggagcggtgtcaccagaaggtgcaccgcctgctgactgagcccggagattccgctaaagacgccagtccgggaggcggacatcatcaggctgggccaggccaggggggcgaggaaggcgaggcagctggtgcggcaggagatggcgtggcagcatgcggatcatatagcgagggccacggtaagttcttggcagctgcacgtaatcctgctgccgagccatctccaggagcccccgccccacaggaacttggcgctgctgacaaacatggcgacctgtgtgaggcctcactcactaatagcgtggaaccagcacagggggaggcacgcgaaggttcctcccaagacaaccccactgcccagccagtcttacagctgctgggcgagatgcaggatcatcaagaacacccaggcttgggaagcaattgttgcgtgccgtgcttttgctgggcgtggctgccccggaggagacggtag

SEQ ID NO: 27542 - DNA, 1902 bp, Artificial Sequence
  derived and/or modified sequence
atgttacccgtcgatggcgaggagcggaagtccgaagggtccgatacagaaggcgataggacctcgccttgcgccggccctacatctagcgctacactgaaagatctggaagtcggcggttctggttggcgttgcagcgaccccgctggacagcccagtaatctgttgccccagagggggttgggtgcacccttgcctgctgaaacagcgcatacacagccctcacctaacgatcgcagcctttatttgtcgcccaagtccagctccgccagtagttcccttcatgctcgacagagcccatgtcaggaacaggcagcggtcctgaatagccggagcatcaaaatcagccggctcaacgacacgattaagtcgctgaagcagcaaaagaaacaggtggaacatcaactggaagaagaaaagaaggcaaataacgagaagcagaaagcagagagggaactcgaaggccagatccaacgcctcaacactgagaaaaaaaagctcaacaccgatctttatcacatgaagcactccctgaggtatttcgaggaggagagcaaagacttagcgggacgccttcaacgctctagccaacgaatcggggaactggagtggtccctgtgcgccgtggccgccacacagaagaagaaaccagatggattttcatctcgttcaaaggccctgctgaaaagacagcttgagcagtccatccgcgaacagattttactgaagggccatgttacacagctgaaagagagcttaaaggaagtgcagttggagcgagaccagtacgccgagcaaatcaaaggagagcgcgcccagtggcagcaacgtatgcgcaaaatgtcccaggaggtgtgcaccctgaaggaagagaaaaagcatgacacccatagggtggaggaactggagagaagcttaagccggctcaagaaccagatggctgagccattacctccggacgcaccggcagtttccagcgaagtggaactgcaggacctgcggaaagagctggagagggtcgcaggggagctgcaggctcaggtcgaaaataatcaatgcataagtctgctgaaccgcggtcagaaagaacgcctacgggaacaggaagagagacttcaggagcagcaggagcgactccgcgaaagggaaaagcggcttcagcagctggccgaacctcagagcgatttagaggagctcaagcacgagaataagtcggcactgcagcttgagcagcaggtgaaagaattacaagagaagttgggccaagtaatggaaactctgacatcggcagagaaggagccagaggcagcagtgcctgcatctggcacgggtggcgagtcctctgggctcatggatttactcgaagagaaggctgatcttagggaacatgtcgagaagctggaactgggtttcatccagtacagaagggaacggtgccaccagaaggtccaccggctgctaacggaacccggcgacagcgccaaggacgcctccccgggcggcggccatcatcaagccgggccaggtcaaggtggggaggagggagaggctgccggggccgccggggacggagttgctgcttgtgggtcttactcagaaggtcacggtaagtttctcgcagccgctaggaacccagctgctgagccctctccgggagcccctgctccacaggagctcggagctgccgacaagcacggagatctttgcgaggcctctctcactaacagcgttgaaccagcgcagggcgaagcacgcgagggcagtagccaggataatccaactgctcagcctgtgctacagctgctgggggaaatgcaggatcaccaggaacatccaggattgggcagtaactgctgcgtgccttgtttttgctgggcttggttgcctaggcgccggcgctag

SEQ ID NO: 27543 - DNA, 5428 bp, Artificial Sequence
  derived and/or modified sequence
ggcggctgcggggcgaggacggcggcggaccggggcagccccgcgccctggccaggaataattggtggggatggattgtgaaatggagctgcataaatatccagtttgccaactgagctaagaaatgctggataaaagtaaaagctctactgagatgaagaaagaaaaagaatacctgctcagctccagagacacgtaaagggacagagattgggggacagaaggaagtgcattaattccttccacgacccctgaagagcagcggtgggtctgagcatcctatctccaggaagcaggccagcaggcaagccagctgccacctcgtcctgtgcaaagcacaggcaccgtccccaaaagatttccaaagatgatgttaaacccagccacggttctgatctccaggaaagcaattgctgtggtacaaaaggacaagggttaaaagagaacagtgggagctctctttcccaactaactcacgcagtgtgacgcagaggctttcagcacagcccagggtgcccgggactgaaaactccttcaccagccccctccacaggatatagaagacttagatcactacgagatgaaagcagagcccattagtgggaaaaagttggaggatgaaggaattgaaaaagaaaatttggcaatattagagaaattaggaagactgaaagacaagagcatttaactgcaaactgttgtcgttgtcaactgggttgtcttcctgaagtatgaatccggtatgtattgtgtggaggagcattacgtactgaacttctcacaaaacagggctgaagcagtgcctactcgacagaaccggtcatcgtacaaagaaatgccacgtgactcaaaggcaaagccagagtgcagcttggagcaaagaagatgatgtctcactctgtcacccaagatggagtgcaatggcacgatctcagctcactgcaacctctgcctcccaggttcaagcaattatcctgcctcagccacccgagtagctgagattacaggcctctgccaccatgctcagctattttttgtatttttagtagagacggggtttcaccatgttgggcaggctagtcttggaactactgacctcaggtgatccgcccactttggcctcccgaaagtgctgggattacagtcatgagccaccatgcccagcctatttatttctgattctttaagggtgactggatgtgttgatcagcgctcgctgggatttggctgacgtggccccagccccgcctccctccccaccccacaatggcagaagaaactggacagagtaaattagctgcagccaagaaaaagttcaaagaatattggcagagaaaccgccctggtgttccagcagcagcgaagaggaacacgaaagcaaatggcagtagccctgagacggccgcttctggtggttgccactcatctgaggcttcctcctccgcctcctcctctctgcatgcgcgtcagagcccgtgccaagaacaagcagcagtcctgaactcgaggtccataaaaatcagtcgactgaatgacaccatcaaatctttgaaacaacagaagaaacaagtggaacatcagctggaagaagaaaagaaagcaaacaatgagaaacagaaagctgaaagggagctagagggtcaaatccagagattgaacacagagaaaaagaaactaaatacggacctgtatcacatgaaacattctctcagatactttgaagaagagtccaaggatctggccggccgcctgcaacgttcatcgcagcgtataggagagttagagtggtctctctgtgctgtcgccgccacacagaagaagaagccggatgggttctcgagccgcagtaaagcacttctcaagcggcagttagagcagtccatacgggagcagatactgctgaaaggacacgtgacacagttgaaggagtcgcttaaagaagtccagctggagagagatcaatatgctgaacaaataaaaggagagagggcccagtggcagcagaggatgaggaaaatgtcgcaggaggtttgcacattgaaggaggagaagaagcatgatacgcatcgggtagaggagctggagaggagcttgtccagactcaaaaaccagatggctgagccactgcccccggatgccccagcagtgtcctctgaggtggagctgcaagacctgaggaaggagctggagagagtggcaggagagctccaggctcaggtggaaaacaatcagtgcatcagtctcctgaaccgtgggcaaaaggagaggcttcgcgagcaggaggagaggcttcaggagcagcaggagaggcttcgggaacgggagaagaggcttcagcagctggccgagccacagagcgacttggaggagctgaagcacgagaacaagagcgcactgcagttggagcagcaagtaaaggagctgcaggagaagctgggccaggtgatggagacgctcacctcggccgagaaggagccagaggcagcagtcccagcctcagggactgggggcgagtctagcggccttatggacctcctggaggagaaggcggacctgagggagcatgtggagaaactggaacttggattcatccagtaccggagagagagatgccatcagaaagtacatcgccttctaacagagccaggggacagtgccaaagatgcgtcaccgggaggaggccatcatcaggctggcccaggacaaggaggagaggaaggtgaagctgctggagctgcaggagatggtgttgcggcttgtggcagctacagcgaggggcacggcaaattcctggccgctgcccggaaccctgctgctgaacccagtccaggagccccagccccccaggagctcggggctgccgacaagcatggtgatctttgtgaggcgagcctcaccaacagcgtggagcctgcacaaggagaagccagggagggttcttcccaggacaaccctactgcacagccagtcctgcagctccttggtgagatgcaggaccaccaggagcacccaggcttgggcagcaactgctgtgtgccatgcttttgctgggcttggctgccgagaagaaggagataaacaccaccatcatcaaagagctgctcaagaaatttttaaaaacgaaacaaagttatggggttaatctcctacacaattcatttacttcatttgaatgttagagctactcatgattatttgtgtttctaatttatagtttaagtttatttgtaaaaagttaaaagagagtgggtctctgtgcctctcactgatgttcactctggcatcctttagcatttttcttttttcatttcataattgtaggtcattagcatgcatatcgagtttgcccttacgtggtgggagttcaaacacacaaagacccactctttgcacaaaactgttctcgctggtttggaataggctcccgtgcttttttaatgttattgcagcatggatgttcattacagaattcagataaaatttgctaatgttctgctatgatgtttgatctcatcttaatcacagtgagctcttccatagctcaatatgcggtttgccctcaagtgtgcactgtttattactttgtaatatgccactatgagtactgacacttagagctgtttaaaggccgagaactggaaacagcctttcctccattttctgtgtattggtgatgggagtgataaccttttgggggagctttctaaatctcgcagaagaggaaagtggcctgctctggcaggtatgtgcaggatacagtgtgtttcatctgttccggtgccaagaatgagcactgtactgtggcagttccctttggatttgtatgtgctctgggctcatgaagatattgcatcgtgagctgcagcagttgcactctttttcagtgacctaaaaatggcttatttccgaggaatgaaaggctgccatcgttggctgtggatgtggaaaacctttcctagcttagagcatttgtatctacaatacattttaaagtcagagttcgtgttccctgttttaatcacatgactacctgtcccagtacacgaaagggcgctggttggcattcttcttaatgtatttagtaaagatcataagacatcctttaagagtttaaatgtctctgaaacaggcatacaggctctagtcaagaatgaattagagtgaaggaaagctgtgtgacacctggcattcctctctgttcatggagcttctttgaggcttgaagtttgattttactatctagacctctctggctaatacctattcttcaaccacctcggttactctgacataggaatttacttcttttccttgagtggaaaacactttagaaaataataacaaacattattataaactaatatatgtgagagtacttagttgaaacaaaaaggaattttagtagacagtattatattatctttgaaaatcaaggagaagtttatgcaactgaaaatgtttacacactgtgctgcaatctactgtttgtgaatgtcaatgtattatcaggaaacatgtctatacgatcgcagagttgtatttcctcacaaacttctttacgaagagtgaaatatgtttttgtacctctcagtttcagtcagggacatattttgtgcaatatttctgtgattgtgcctatgcgtgatgagtgaatgcatttcaatcatacattgcctaaatcataacttgatgatgcttgggaaagaatcaacagttaaaacttcatgaagttctaatgtctgtgttccaaaacacatcacattattaggttgtagggagatatgtatgtgtgctccctggggtggggagttttctagttactagaccatctccatttttagcacttggcagcctcatgatccttttataaataggagattaacaggagagcagcaatacgattttgccaatggaataacagatttgccggcattcactgaaagagggcagatattgggtccttgtgacttcaactgactcttccgaattgtatgaatttatcaatgtattagataaacccagtttcagaataataaagaaaaaatattagaccaaataatgtggctaatagtggtatgatttctagcccgtgggtttaaaactgtatcctaaagagtcattttaaaataatataaatatttaaaagtgtaactgctatctttatgttctgaaataagttaaaacattttaaaatatgaatactgtagtttaaaagaaagaaatggtgggaaggaaaagtagagaaagaaatgccaattccagtccaaagctttgtttgccaagttttcttagaatgaattttaccaatgtatgggttcttgttaacagaatgtgtaacagaaatactgaaagacttttgcctaaagtggcattattgactgctggtgtgatgctactgtaatgtgataaattattaaattgttgcaaa

SEQ ID NO: 27544 - DNA, 4335 bp, Artificial Sequence
  derived and/or modified sequence
agttacgcagctgtcttccaggtgactggatgtgttgatcagcgctcgctgggatttggctgacgtggccccagccccgcctccctccccaccccacaatggcagaagaaactggacagagtaaattagctgcagccaagaaaaagttcaaagaatattggcagagaaaccgccctggtgttccagcagcagcgaagaggaacacgaaagcaaatggcagtagccctgagacggccgcttctggtggttgccactcatctgaggcttcctcctccgcctcctcctctctgcatgcgcgtcagagcccgtgccaagaacaagcagcagtcctgaactcgaggtccataaaaatcagtcgactgaatgacaccatcaaatctttgaaacaacagaagaaacaagtggaacatcagctggaagaagaaaagaaagcaaacaatgagaaacagaaagctgaaagggagctagagggtcaaatccagagattgaacacagagaaaaagaaactaaatacggacctgtatcacatgaaacattctctcagatactttgaagaagagtccaaggatctggccggccgcctgcaacgttcatcgcagcgtataggagagttagagtggtctctctgtgctgtcgccgccacacagaagaagaagccggatgggttctcgagccgcagtaaagcacttctcaagcggcagttagagcagtccatacgggagcagatactgctgaaaggacacgtgacacagttgaaggagtcgcttaaagaagtccagctggagagagatcaatatgctgaacaaataaaaggagagagggcccagtggcagcagaggatgaggaaaatgtcgcaggaggtttgcacattgaaggaggagaagaagcatgatacgcatcgggtagaggagctggagaggagcttgtccagactcaaaaaccagatggctgagccactgcccccggatgccccagcagtgtcctctgaggtggagctgcaagacctgaggaaggagctggagagagtggcaggagagctccaggctcaggtggaaaacaatcagtgcatcagtctcctgaaccgtgggcaaaaggagaggcttcgcgagcaggaggagaggcttcaggagcagcaggagaggcttcgggaacgggagaagaggcttcagcagctggccgagccacagagcgacttggaggagctgaagcacgagaacaagagcgcactgcagttggagcagcaagtaaaggagctgcaggagaagctgggccaggtgatggagacgctcacctcggccgagaaggagccagaggcagcagtcccagcctcagggactgggggcgagtctagcggccttatggacctcctggaggagaaggcggacctgagggagcatgtggagaaactggaacttggattcatccagtaccggagagagagatgccatcagaaagtacatcgccttctaacagagccaggggacagtgccaaagatgcgtcaccgggaggaggccatcatcaggctggcccaggacaaggaggagaggaaggtgaagctgctggagctgcaggagatggtgttgcggcttgtggcagctacagcgaggggcacggcaaattcctggccgctgcccggaaccctgctgctgaacccagtccaggagccccagccccccaggagctcggggctgccgacaagcatggtgatctttgtgaggcgagcctcaccaacagcgtggagcctgcacaaggagaagccagggagggttcttcccaggacaaccctactgcacagccagtcctgcagctccttggtgagatgcaggaccaccaggagcacccaggcttgggcagcaactgctgtgtgccatgcttttgctgggcttggctgccgagaagaaggagataaacaccaccatcatcaaagagctgctcaagaaatttttaaaaacgaaacaaagttatggggttaatctcctacacaattcatttacttcatttgaatgttagagctactcatgattatttgtgtttctaatttatagtttaagtttatttgtaaaaagttaaaagagagtgggtctctgtgcctctcactgatgttcactctggcatcctttagcatttttcttttttcatttcataattgtaggtcattagcatgcatatcgagtttgcccttacgtggtgggagttcaaacacacaaagacccactctttgcacaaaactgttctcgctggtttggaataggctcccgtgcttttttaatgttattgcagcatggatgttcattacagaattcagataaaatttgctaatgttctgctatgatgtttgatctcatcttaatcacagtgagctcttccatagctcaatatgcggtttgccctcaagtgtgcactgtttattactttgtaatatgccactatgagtactgacacttagagctgtttaaaggccgagaactggaaacagcctttcctccattttctgtgtattggtgatgggagtgataaccttttgggggagctttctaaatctcgcagaagaggaaagtggcctgctctggcaggtatgtgcaggatacagtgtgtttcatctgttccggtgccaagaatgagcactgtactgtggcagttccctttggatttgtatgtgctctgggctcatgaagatattgcatcgtgagctgcagcagttgcactctttttcagtgacctaaaaatggcttatttccgaggaatgaaaggctgccatcgttggctgtggatgtggaaaacctttcctagcttagagcatttgtatctacaatacattttaaagtcagagttcgtgttccctgttttaatcacatgactacctgtcccagtacacgaaagggcgctggttggcattcttcttaatgtatttagtaaagatcataagacatcctttaagagtttaaatgtctctgaaacaggcatacaggctctagtcaagaatgaattagagtgaaggaaagctgtgtgacacctggcattcctctctgttcatggagcttctttgaggcttgaagtttgattttactatctagacctctctggctaatacctattcttcaaccacctcggttactctgacataggaatttacttcttttccttgagtggaaaacactttagaaaataataacaaacattattataaactaatatatgtgagagtacttagttgaaacaaaaaggaattttagtagacagtattatattatctttgaaaatcaaggagaagtttatgcaactgaaaatgtttacacactgtgctgcaatctactgtttgtgaatgtcaatgtattatcaggaaacatgtctatacgatcgcagagttgtatttcctcacaaacttctttacgaagagtgaaatatgtttttgtacctctcagtttcagtcagggacatattttgtgcaatatttctgtgattgtgcctatgcgtgatgagtgaatgcatttcaatcatacattgcctaaatcataacttgatgatgcttgggaaagaatcaacagttaaaacttcatgaagttctaatgtctgtgttccaaaacacatcacattattaggttgtagggagatatgtatgtgtgctccctggggtggggagttttctagttactagaccatctccatttttagcacttggcagcctcatgatccttttataaataggagattaacaggagagcagcaatacgattttgccaatggaataacagatttgccggcattcactgaaagagggcagatattgggtccttgtgacttcaactgactcttccgaattgtatgaatttatcaatgtattagataaacccagtttcagaataataaagaaaaaatattagaccaaataatgtggctaatagtggtatgatttctagcccgtgggtttaaaactgtatcctaaagagtcattttaaaataatataaatatttaaaagtgtaactgctatctttatgttctgaaataagttaaaacattttaaaatatgaatactgtagtttaaaagaaagaaatggtgggaaggaaaagtagagaaagaaatgccaattccagtccaaagctttgtttgccaagttttcttagaatgaattttaccaatgtatgggttcttgttaacagaatgtgtaacagaaatactgaaagacttttgcctaaagtggcattattgactgctggtgtgatgctactgtaatgtgataaattattaaattgttgcaaagtgctgtttttgccttaaaattttattttgcgcatcttgaaaattatagtattaaaggtattgatactgtgcaaa

SEQ ID NO: 27545 - DNA, 4252 bp, Artificial Sequence
  derived and/or modified sequence
atgttgccagttgatggggaagaaaggaagtcggagggctcagacactgagggggacagaacatctccatgtgcaggccctacatcatctgctaccctgaaggatctggaggtaggaggctctgggtggaggtgcagtgaccccgcaggccagccctccaacctcctcccgcagcggggactgggtgcccctctgccagctgagacagcccacacacaacccagccctaatgatcgttctctctacctctcccccaagtcctcctccgcctcctcctctctgcatgcgcgtcagagcccgtgccaagaacaagcagcagtcctgaactcgaggtccataaaaatcagtcgactgaatgacaccatcaaatctttgaaacaacagaagaaacaagtggaacatcagctggaagaagaaaagaaagcaaacaatgagaaacagaaagctgaaagggagctagagggtcaaatccagagattgaacacagagaaaaagaaactaaatacggacctgtatcacatgaaacattctctcagatactttgaagaagagtccaaggatctggccggccgcctgcaacgttcatcgcagcgtataggagagttagagtggtctctctgtgctgtcgccgccacacagaagaagaagccggatgggttctcgagccgcagtaaagcacttctcaagcggcagttagagcagtccatacgggagcagatactgctgaaaggacacgtgacacagttgaaggagtcgcttaaagaagtccagctggagagagatcaatatgctgaacaaataaaaggagagagggcccagtggcagcagaggatgaggaaaatgtcgcaggaggtttgcacattgaaggaggagaagaagcatgatacgcatcgggtagaggagctggagaggagcttgtccagactcaaaaaccagatggctgagccactgcccccggatgccccagcagtgtcctctgaggtggagctgcaagacctgaggaaggagctggagagagtggcaggagagctccaggctcaggtggaaaacaatcagtgcatcagtctcctgaaccgtgggcaaaaggagaggcttcgcgagcaggaggagaggcttcaggagcagcaggagaggcttcgggaacgggagaagaggcttcagcagctggccgagccacagagcgacttggaggagctgaagcacgagaacaagagcgcactgcagttggagcagcaagtaaaggagctgcaggagaagctgggccaggtgatggagacgctcacctcggccgagaaggagccagaggcagcagtcccagcctcagggactgggggcgagtctagcggccttatggacctcctggaggagaaggcggacctgagggagcatgtggagaaactggaacttggattcatccagtaccggagagagagatgccatcagaaagtacatcgccttctaacagagccaggggacagtgccaaagatgcgtcaccgggaggaggccatcatcaggctggcccaggacaaggaggagaggaaggtgaagctgctggagctgcaggagatggtgttgcggcttgtggcagctacagcgaggggcacggcaaattcctggccgctgcccggaaccctgctgctgaacccagtccaggagccccagccccccaggagctcggggctgccgacaagcatggtgatctttgtgaggcgagcctcaccaacagcgtggagcctgcacaaggagaagccagggagggttcttcccaggacaaccctactgcacagccagtcctgcagctccttggtgagatgcaggaccaccaggagcacccaggcttgggcagcaactgctgtgtgccatgcttttgctgggcttggctgccgagaagaaggagataaacaccaccatcatcaaagagctgctcaagaaatttttaaaaacgaaacaaagttatggggttaatctcctacacaattcatttacttcatttgaatgttagagctactcatgattatttgtgtttctaatttatagtttaagtttatttgtaaaaagttaaaagagagtgggtctctgtgcctctcactgatgttcactctggcatcctttagcatttttcttttttcatttcataattgtaggtcattagcatgcatatcgagtttgcccttacgtggtgggagttcaaacacacaaagacccactctttgcacaaaactgttctcgctggtttggaataggctcccgtgcttttttaatgttattgcagcatggatgttcattacagaattcagataaaatttgctaatgttctgctatgatgtttgatctcatcttaatcacagtgagctcttccatagctcaatatgcggtttgccctcaagtgtgcactgtttattactttgtaatatgccactatgagtactgacacttagagctgtttaaaggccgagaactggaaacagcctttcctccattttctgtgtattggtgatgggagtgataaccttttgggggagctttctaaatctcgcagaagaggaaagtggcctgctctggcaggtatgtgcaggatacagtgtgtttcatctgttccggtgccaagaatgagcactgtactgtggcagttccctttggatttgtatgtgctctgggctcatgaagatattgcatcgtgagctgcagcagttgcactctttttcagtgacctaaaaatggcttatttccgaggaatgaaaggctgccatcgttggctgtggatgtggaaaacctttcctagcttagagcatttgtatctacaatacattttaaagtcagagttcgtgttccctgttttaatcacatgactacctgtcccagtacacgaaagggcgctggttggcattcttcttaatgtatttagtaaagatcataagacatcctttaagagtttaaatgtctctgaaacaggcatacaggctctagtcaagaatgaattagagtgaaggaaagctgtgtgacacctggcattcctctctgttcatggagcttctttgaggcttgaagtttgattttactatctagacctctctggctaatacctattcttcaaccacctcggttactctgacataggaatttacttcttttccttgagtggaaaacactttagaaaataataacaaacattattataaactaatatatgtgagagtacttagttgaaacaaaaaggaattttagtagacagtattatattatctttgaaaatcaaggagaagtttatgcaactgaaaatgtttacacactgtgctgcaatctactgtttgtgaatgtcaatgtattatcaggaaacatgtctatacgatcgcagagttgtatttcctcacaaacttctttacgaagagtgaaatatgtttttgtacctctcagtttcagtcagggacatattttgtgcaatatttctgtgattgtgcctatgcgtgatgagtgaatgcatttcaatcatacattgcctaaatcataacttgatgatgcttgggaaagaatcaacagttaaaacttcatgaagttctaatgtctgtgttccaaaacacatcacattattaggttgtagggagatatgtatgtgtgctccctggggtggggagttttctagttactagaccatctccatttttagcacttggcagcctcatgatccttttataaataggagattaacaggagagcagcaatacgattttgccaatggaataacagatttgccggcattcactgaaagagggcagatattgggtccttgtgacttcaactgactcttccgaattgtatgaatttatcaatgtattagataaacccagtttcagaataataaagaaaaaatattagaccaaataatgtggctaatagtggtatgatttctagcccgtgggtttaaaactgtatcctaaagagtcattttaaaataatataaatatttaaaagtgtaactgctatctttatgttctgaaataagttaaaacattttaaaatatgaatactgtagtttaaaagaaagaaatggtgggaaggaaaagtagagaaagaaatgccaattccagtccaaagctttgtttgccaagttttcttagaatgaattttaccaatgtatgggttcttgttaacagaatgtgtaacagaaatactgaaagacttttgcctaaagtggcattattgactgctggtgtgatgctactgtaatgtgataaattattaaattgttgcaaa

SEQ ID NO: 27546 - DNA, 1812 bp, Artificial Sequence
  derived and/or modified sequence
atggccgaggagaccggccagagcaagctggccgccgccaagaagaagttcaaggagtactggcagaggaacagacctggggtgcctgctgctgccaagaggaacaccaaggccaacggcagcagccctgagacagctgccagcggcggctgccacagcagcgaggccagcagcagcgccagcagcagcctgcacgcccggcagagcccctgccaggagcaggccgctgtgctgaacagccgcagcatcaagatcagccggctgaatgacaccatcaagagcctgaagcagcagaagaagcaggtggagcaccagctggaggaggagaagaaggccaacaatgagaagcagaaggccgagcgggagctggagggccagatccagaggctgaacacagagaagaagaagctgaacacagacctgtaccacatgaagcacagcctgcgctactttgaggaggagagcaaggacctggccggccgcctgcagaggagcagccagagaattggagagctggagtggagcctgtgtgctgtggccgccacccagaagaagaagccagatggcttcagcagccgcagcaaggccctgctgaagaggcagctggagcagagcatccgggagcagatcctgctgaagggccacgtgacccagctgaaggagagcctgaaggaggtgcagctggagcgggaccagtatgcagagcagatcaagggggagcgggcccagtggcagcagaggatgaggaagatgagccaggaggtgtgcaccctgaaggaggagaagaagcatgacacccaccgggtggaggagctggagaggagcctgagccggctgaagaaccagatggccgagcccctgcccccagatgccccagctgtgagcagcgaggtggagctgcaggacctgaggaaggagctggagcgggtggccggggagctgcaggcccaggtggagaacaaccagtgcatcagcctgctgaacagaggccagaaggagcggctgcgggagcaggaggagcggctgcaggagcagcaggagcggctgcgggagcgggagaagaggctgcagcagctggccgagccccagagcgacctggaggagctgaagcatgagaacaagagcgccctgcagctggagcagcaggtgaaggagctgcaggagaagctgggccaggtgatggagaccctgaccagcgctgagaaggagcctgaggccgctgtgcctgccagcggcactggaggagagagcagcggcctgatggacctgctggaggagaaggctgacctgcgggagcacgtggagaagctggagctgggcttcatccagtacagaagagagcgctgccaccagaaggtgcaccggctgctgacagagcccggggacagcgccaaggatgccagccctgggggcggccaccaccaggccggccctggccagggcggggaggagggggaggccgccggggctgctggagatggagtggccgcctgtggcagctacagcgagggccacggcaagttcctggccgccgccagaaatcctgctgctgagcccagccctggggccccagccccccaggagctgggcgctgctgacaagcatggagacctgtgtgaggccagcctgaccaacagcgtggagcccgcccagggcgaggcccgggagggcagcagccaggacaaccccacagcccagcctgtgctgcagctgctgggggagatgcaggaccaccaggagcaccctggcctgggcagcaactgctgcgtgccctgcttctgctgggcctggctgcccaggagaagaagatag

SEQ ID NO: 27547 - DNA, 1902 bp, Artificial Sequence
  derived and/or modified sequence
atgctgcctgtggatggagaggagaggaagtctgagggcagtgacacagaaggagacaggaccagcccctgtgccggccccaccagcagcgccaccctgaaggacctggaggtgggcggcagcggctggcgctgcagcgaccctgctggccagcccagcaacctgctgccccagaggggcctgggcgcccccctgcctgctgagacagcccacacccagcccagccccaatgacaggagcctgtacctgagccccaagagcagcagcgccagcagcagcctgcacgcccggcagagcccctgccaggagcaggccgctgtgctgaacagccgcagcatcaagatcagccggctgaatgacaccatcaagagcctgaagcagcagaagaagcaggtggagcaccagctggaggaggagaagaaggccaacaatgagaagcagaaggccgagcgggagctggagggccagatccagaggctgaacacagagaagaagaagctgaacacagacctgtaccacatgaagcacagcctgcgctactttgaggaggagagcaaggacctggccggccgcctgcagaggagcagccagagaattggagagctggagtggagcctgtgtgctgtggccgccacccagaagaagaagccagatggcttcagcagccgcagcaaggccctgctgaagaggcagctggagcagagcatccgggagcagatcctgctgaagggccacgtgacccagctgaaggagagcctgaaggaggtgcagctggagcgggaccagtatgcagagcagatcaagggggagcgggcccagtggcagcagaggatgaggaagatgagccaggaggtgtgcaccctgaaggaggagaagaagcatgacacccaccgggtggaggagctggagaggagcctgagccggctgaagaaccagatggccgagcccctgcccccagatgccccagctgtgagcagcgaggtggagctgcaggacctgaggaaggagctggagcgggtggccggggagctgcaggcccaggtggagaacaaccagtgcatcagcctgctgaacagaggccagaaggagcggctgcgggagcaggaggagcggctgcaggagcagcaggagcggctgcgggagcgggagaagaggctgcagcagctggccgagccccagagcgacctggaggagctgaagcatgagaacaagagcgccctgcagctggagcagcaggtgaaggagctgcaggagaagctgggccaggtgatggagaccctgaccagcgctgagaaggagcctgaggccgctgtgcctgccagcggcactggaggagagagcagcggcctgatggacctgctggaggagaaggctgacctgcgggagcacgtggagaagctggagctgggcttcatccagtacagaagagagcgctgccaccagaaggtgcaccggctgctgacagagcccggggacagcgccaaggatgccagccctgggggcggccaccaccaggccggccctggccagggcggggaggagggggaggccgccggggctgctggagatggagtggccgcctgtggcagctacagcgagggccacggcaagttcctggccgccgccagaaatcctgctgctgagcccagccctggggccccagccccccaggagctgggcgctgctgacaagcatggagacctgtgtgaggccagcctgaccaacagcgtggagcccgcccagggcgaggcccgggagggcagcagccaggacaaccccacagcccagcctgtgctgcagctgctgggggagatgcaggaccaccaggagcaccctggcctgggcagcaactgctgcgtgccctgcttctgctgggcctggctgcccaggagaagaagatag

SEQ ID NO: 27548 - DNA, 1812 bp, Artificial Sequence
  derived and/or modified sequence
atggccgaggagaccggccagagcaagctggccgccgccaagaagaaatttaaagagtattggcagagaaatcgccctggagtaccagctgcggcgaaacggaatacaaaggcaaacggcagctctcctgaaacggccgcatctggagggtgccattccagcgaagcatcctcttccgccagctcatctctgcacgcccgccagtcgccctgccaggaacaggcagccgttttgaactctcggagcatcaaaatctctagactgaatgacaccatcaagagcctcaaacagcagaaaaaacaagtggaacatcagctggaagaagaaaagaaagccaacaatgagaaacagaaggctgaaagggaactggaaggtcagattcagcgacttaatactgagaaaaagaagctgaatacagatctgtaccacatgaagcactccctacggtattttgaagaggaatctaaggatctggcagggcgcctgcagaggtctagccagcggatcggcgaacttgaatggagcctatgtgcagtggcggccactcagaaaaagaaacccgacggtttttcatccagatccaaagcactcctgaaacgtcagctcgaacaaagcattagggagcagatcctgttaaagggccacgtcacgcagctgaaggagtctctgaaagaagttcagctggagcgggaccaatacgccgaacagattaagggcgaaagggctcagtggcagcagaggatgcggaagatgagccaggaagtctgtacccttaaggaagagaagaagcacgacactcatcgcgtggaagagctcgagagaagcctgtctagactgaagaaccaaatggcagagcccctcccaccagacgctcctgccgtgagcagtgaggtggaactgcaggatctcaggaaagagctggagcgggtcgcaggcgagctgcaggcgcaggttgaaaacaaccagtgcatatcgctgctgaaccgcgggcagaaggagcgcttgcgcgagcaggaggaacgcctacaagaacagcaagagcggcttcgggagcgcgaaaaaaggctgcagcagctggctgaacctcaaagcgatttggaagaactcaagcatgaaaataaatctgccctgcagttggagcaacaagtgaaagaactccaagagaagctgggccaggtgatggagaccttgacaagcgcggagaaagaacctgaggccgccgtgcctgctagcggcaccggcggggagagcagtggccttatggacctgttggaggagaaggccgacctcagggagcatgtagagaagttagagctaggctttatccagtaccggcgcgagcggtgccatcagaaagttcataggctgctcaccgagcccggtgactccgccaaagatgccagccccggaggggggcatcatcaagccggcccaggtcaggggggagaagagggagaagccgctggcgccgcaggggacggtgttgccgcttgtgggagctacagcgagggacatggaaagttcctggccgcggctcggaatcccgccgcggagcctagccccggtgcacccgctccccaggagctaggggctgcagacaaacacggcgacttatgcgaggcaagtcttacaaattccgtggagcctgcacagggagaagcccgagagggttcctctcaggataaccctacagcccaacccgttctgcagctgctgggcgagatgcaggatcatcaggagcaccctggcttaggcagcaactgttgtgtgccgtgcttctgttgggcttggttaccccggaggagacggtag

SEQ ID NO: 27549 - DNA, 1812 bp, Artificial Sequence
  derived and/or modified sequence
atggccgaggagaccggccagagcaagctggccgccgccaagaagaagttcaaggagtactggcagcgaaaccggcccggcgttcccgcagcagccaagcgcaacacaaaggcaaacgggagctctcctgaaactgctgcctctgggggctgtcatagtagcgaggcttcaagcagcgccagcagcagtttgcatgctcgacagtcaccgtgccaggagcaggcagccgttcttaattcacggtccattaaaatctctcggctgaatgacacaattaaaagtctgaaacagcaaaaaaaacaagtcgaacatcagctggaagaggaaaagaaggcaaataatgagaagcagaaggccgagagggaactggagggccagatccagagattaaatactgagaagaaaaagcttaacacagatctttaccacatgaagcacagcctgagatactttgaggaagaatcaaaggaccttgcaggtagactccagcgaagcagtcagcgcatcggcgaactcgaatggagcctgtgcgctgtcgctgcgacccagaaaaaaaaaccagatgggttttcctctcgctcaaaggcgctgctcaaaagacagctggaacagtctattcgcgagcagattctcctcaaggggcacgtcacccagctcaaagagagcctcaaggaagtccaactcgaacgagaccagtacgctgagcaaatcaaaggcgaacgagcgcagtggcagcagagaatgcgtaaaatgtctcaggaggtctgcactttgaaagaagagaaaaaacacgacacacaccgagttgaagagctcgagcgctctctgtctcgattgaagaaccagatggctgagcccctgccgccagacgcccccgctgtgtctagtgaagtcgaattacaggacctgaggaaagaattggagcgtgtggctggtgaattgcaggctcaggtggagaataatcagtgtatcagcctccttaacaggggtcagaaagagagactgagagagcaggaagaacggctgcaggaacaacaagaaagactgagagaaagggaaaagcgcctgcagcagcttgcagaaccacaatcagatctggaagagctgaaacatgaaaataaatctgcactgcagttagagcagcaggtcaaagaattacaggaaaagctaggacaggtgatggagactctcacaagcgccgagaaggaacccgaggctgctgtacccgcctccggtaccgggggcgagagttctggtctcatggacctgttggaagaaaaagccgatctgagagagcacgttgaaaagctagagctgggtttcatccagtatcggcgcgagagatgccatcagaaggtccatcggctcctgaccgaaccaggcgattcagccaaggacgctagtcccggcggcgggcaccatcaggccggccctggccagggcggggaggagggtgaggcggcaggcgccgctggtgatggggtggccgcctgcggttcttattctgaggggcatggaaagttcctcgccgcggctcgtaaccccgccgccgagccctcccctggtgcaccagctcctcaggagcttggagccgcagataaacacggcgacctttgtgaagctagcctcaccaactcagtggaaccagcccagggcgaggcgcgggaaggttcttctcaggacaacccaacggcacagcctgtcctccagctgctcggtgaaatgcaggaccaccaggagcatcctggtctggggagcaattgctgcgtgccttgcttctgttgggcctggctgcctcgccgacgtcggtag

SEQ ID NO: 27550 - DNA, 1902 bp, Artificial Sequence
  derived and/or modified sequence
atgctgcccgtggacggcgaggagcggaagagcgagggcagcgacaccgaaggcgacagaaccagtccttgcgctggaccaacctcatcagccaccctcaaggacctggaagtgggagggtcaggatggagatgtagcgatccggcaggccagcccagcaatctactaccacagagaggccttggcgcacccttgcccgccgaaacggcacacactcagccttcccccaatgaccgaagcctttacctgtcaccgaagtcatcatcagcttcaagctctttgcacgctaggcagtctccatgtcaagaacaggccgcagtgttgaattcgcgatcgataaagatttctcggctgaacgatacaatcaagtcactgaagcagcaaaaaaagcaggtcgagcatcagctggaggaggaaaaaaaggcgaacaatgaaaaacaaaaggcagagagagaactggagggccaaattcagaggctcaacactgaaaagaagaaattaaacactgatttgtatcacatgaagcactctctgcggtacttcgaggaggagagcaaggacctggctggacgcctgcagcgttccagtcagcgcattggtgaactcgagtggagtctgtgtgctgtggctgcgacgcagaaaaagaagcctgacggcttctcaagtcggagtaaagctctcctgaagcggcaactggaacagagtattagagaacaaatcctgctaaagggacacgtgactcaactgaaggaaagcctcaaggaggttcagctagaaagagaccagtacgcagagcaaatcaaaggtgagagggcccagtggcaacagagaatgaggaaaatgtcacaggaagtctgtactctgaaggaggaaaaaaagcatgacacgcatagggtggaagagctggaacgatcactatctagacttaaaaaccagatggccgaacctttacccccggacgcgcctgcagtgtcatctgaagtcgaactccaggatctgagaaaggagctcgagagggtcgccggggaattgcaggcacaggtggaaaacaatcaatgtatcagtctactgaataggggtcaaaaggagcgtttacgggaacaggaggagaggcttcaggaacagcaggagaggctcagggagagggaaaaaaggctccaacaactcgcggagcctcagtctgacctagaggagcttaagcatgagaacaagtctgccttgcagctagaacagcaggtgaaggaattgcaagagaaactcggtcaggtgatggagaccctgacttccgcagagaaagagcccgaggccgcggtacctgcctcaggcactggcggggagtcctctggattaatggatctgctggaagagaaagcagacctaagagagcatgtggagaagctcgagctcggctttatccaatacagaagagaaagatgccaccagaaggtacaccgcctcctgactgaaccaggtgactccgccaaagacgcctcaccaggcgggggacaccatcaggccggccctggacaaggaggcgaggaaggtgaagccgcgggcgccgctggcgacggggttgctgcgtgcgggtcttattcagaggggcacggtaagttcctggctgctgccagaaaccctgctgccgaaccatctccaggagcgcccgcaccccaggaactgggcgctgcagataagcacggggacctttgtgaggcttctcttactaacagtgtggaacccgcccagggtgaggcccgtgaggggtccagccaggataatcctacagcacagccagtccttcagctcctgggagagatgcaggatcaccaggagcatccgggactaggaagtaactgctgtgtgccctgcttctgttgggcgtggctccccaggaggaggagatag

SEQ ID NO: 27551 - DNA, 1812 bp, Artificial Sequence
  derived and/or modified sequence
atggctgaggaaaccggccaaagtaaactggcggctgccaagaaaaagtttaaagagtattggcagagaaatcgcccaggtgtccctgctgctgctaagcggaatacgaaggctaacgggagctcccctgaaactgctgcatccggagggtgtcactcctcagaggccagcagctccgccagctcttcacttcacgctcgccagtctccctgccaggagcaggcagcggtcctgaactctcgctcaataaagatcagccgacttaacgatacaattaaatccctcaagcaacagaagaaacaggtggaacaccaactcgaagaggagaagaaagcaaataacgagaaacaaaaagcagaaagggaattggaaggccaaatacaacgcctcaacaccgaaaagaaaaagctgaacacagacctctatcacatgaaacactctctccgctatttcgaagaggaaagtaaagatctcgctgggaggctgcagcgaagcagtcagcggatcggagaattggaatggtctctgtgtgccgtcgcagctacgcagaagaagaagcccgatgggttctcctctcgcagcaaagccttgctgaagcgacagcttgaacagtccattcgagagcagattctgctgaaaggacacgtcacacagctgaaagaatcactgaaggaagtgcagctggaacgtgaccagtatgccgaacagattaagggcgagcgagcgcagtggcagcagcgaatgcggaaaatgtcccaagaggtttgcaccttaaaagaggaaaagaagcacgatactcatagagtggaagaactggagcggagcctctcgaggctgaaaaaccagatggccgagccattacctccggatgccccagcagtatctagcgaagtggaactgcaggatctcaggaaggagctggaaagagtggccggagaacttcaagctcaggtggaaaataaccagtgtataagccttctgaacagggggcagaaagaacgacttagagaacaggaagaaaggctgcaggagcaacaggagcgcttgagagagagagaaaagaggctgcaacaattggctgagccgcagtctgatctggaggagctcaaacacgagaacaaatcagccctacagcttgaacagcaggtgaaggagctgcaggaaaagttaggtcaggttatggaaaccctgaccagcgcagagaaagaacccgaagcggctgtcccagcaagcggtacaggtggcgagtctagcggactcatggacctgttggaggagaaagccgacttgagagagcacgtggagaaactggaactgggttttattcagtacagacgtgagcgttgccatcagaaggttcaccggctgctgaccgagccaggcgactcagctaaggatgcttcaccaggaggcggacaccaccaagccggtcccggacagggtggcgaggagggcgaagcagccggagctgccggtgatggcgttgccgcatgcggaagctacagtgagggccatgggaagtttctggcggcagctcggaatccagctgcagagccatctccaggtgccccagccccacaagaactgggcgctgcagacaagcatggggacctgtgtgaggcatcacttaccaacagcgtcgaacccgctcaaggagaggccagggaggggtccagtcaggataatccgaccgctcagcccgtgcttcagcttttgggcgaaatgcaggatcatcaggagcatcccggtctgggcagcaactgttgcgtgccttgcttttgctgggcctggctcccgagaagaaggcggtag

SEQ ID NO: 27552 - DNA, 1812 bp, Artificial Sequence
  derived and/or modified sequence
atggccgaagagacaggacagagcaagctcgccgctgcgaagaagaaattcaaggagtattggcagaggaacaggcccggtgtgcccgctgctgccaaaagaaacactaaagcaaatgggtcctcgcctgagacagcggcaagcggcggatgccactcctcagaagcaagttctagtgcttcatcttccttgcacgctaggcaatccccctgccaggaacaggccgctgttctgaactcgcggtcaattaagatcagcaggctcaatgataccattaagagtctcaaacagcaaaagaagcaggttgagcatcagctcgaagaagagaaaaaggccaataatgaaaagcagaaggccgagcgcgagctggagggccagatccaacgcctcaataccgagaagaagaagctgaacaccgatctctatcacatgaaacactcgctgcgttactttgaagaagagtcaaaagacttggctggacgtctgcagcgttcttctcagcgcataggcgagctggagtggagtttgtgcgctgtggctgccacacagaaaaagaagcctgacggctttagctctcgcagcaaggctctcctgaaacgtcagctggaacagagtattagggaacagattctgcttaaagggcatgttacgcagctgaaagaaagcctcaaggaagttcagttagaacgggatcagtacgccgagcagattaagggcgagagagctcagtggcagcagcgcatgcgaaagatgagccaggaagtttgtactctgaaagaagagaaaaaacatgacacacaccgggttgaggagctggaaaggagcttgagcagactgaaaaatcagatggctgagccacttcctcctgatgccccagcagtgtccagtgaggtagagttgcaagacctgcgaaaagaattggaaagagtggccggtgaattacaggctcaggtcgagaacaaccagtgcattagcttgcttaatcgcggacagaaggagcgtctccgggagcaggaagagagactgcaagagcaacaggaacggctccgtgagcgtgagaagcgtctgcaacagctggccgaacctcagtccgacctggaagagctcaaacatgaaaacaagagcgcgctgcagctggaacaacaggtgaaggagttacaggaaaagcttggccaggtcatggaaacgctgacctcagcagagaaggaacccgaggctgcagtcccagcgtctgggactggcggagagtcctcaggtctgatggatcttctggaggaaaaggccgatctgcgggagcatgttgagaagttggagcttggctttattcaataccggagagaacggtgtcatcagaaagtgcacaggctgctgaccgaaccaggagactccgcaaaagacgcatcgccgggtggcggacaccatcaggctggccctggtcagggcggagaggaaggagaggccgcaggtgctgccggtgacggcgtcgcggcatgtggatcatattccgaggggcatggtaaattcctggcagccgcaaggaatcctgccgcagaaccatcccccggtgccccagcccctcaagaattgggggctgcagataagcatggagatctctgcgaggccagcctcactaacagcgtggagcccgctcaaggggaagctcgagagggcagctctcaagacaatcccacagctcagcctgtgctacagctgctcggcgagatgcaggaccaccaggagcatccaggcctggggtccaactgctgcgtgccgtgtttttgttgggcgtggctgccccgacgacggagatag

SEQ ID NO: 27553 - DNA, 1902 bp, Artificial Sequence
  derived and/or modified sequence
atgctgccagtcgatggagaagagcgcaaatcagaaggctccgacacggagggggaccgcactagtccttgcgccggtcccacctcttccgcaaccctaaaggacctagaggtgggtgggtccggctggcgctgttccgaccccgcaggccagccgagcaacctgttgccccagcgcggattgggagccccactacctgctgaaacagcacatacccagccaagccctaacgatcggagcttgtatttgtcccccaagtcttctagcgctagtagtagcttgcatgcacgccaaagtccttgtcaggagcaggccgctgttctcaatagcagaagtattaaaatcagccgactcaacgataccattaagtccctcaaacaacagaagaagcaggtagaacaccagttagaggaagaaaagaaggccaacaacgagaaacagaaggctgagcgagagcttgaaggacagatccaacgactgaataccgagaagaagaagcttaacacggatttgtatcacatgaagcactccctgcgctatttcgaggaggaaagtaaagatttagccggaaggctgcaaaggtcctcacagagaatcggggagctggagtggagcctctgcgctgtggctgctacacagaagaagaagccggacggattcagcagtcgaagtaaagctctcctgaaacgacaattggagcaatcaatcagggagcagatcctcctgaaagggcatgtaacgcagttgaaagaaagtctaaaagaagtgcaacttgagagggaccagtatgctgagcagattaaaggagagagagcccagtggcagcagaggatgcgcaagatgtcacaggaggtttgtacgctgaaggaagaaaaaaagcatgacactcaccgcgttgaggagttggagcgtagtttatctcgcctgaaaaatcagatggctgaaccactgcctccagacgcccctgccgtctcttcggaggtggagctgcaggatctccgaaaagaactggagagggtggccggagagctccaggcccaggtggagaataatcaatgtatttccctgctaaaccggggacagaaggagagactgcgtgagcaggaggagaggctgcaggaacaacaggagaggctgcgagagcgcgagaaacgcctgcaacagctggcggaaccccagagcgatctcgaggaactgaaacatgaaaacaaatctgcccttcagttggagcagcaggttaaggagctgcaggaaaagctggggcaagtcatggagaccctgacctctgcagaaaaggagccggaagccgcagtcccagcctctgggactggcggtgaatcttcgggactgatggacttgctcgaggagaaggcagaccttcgagagcatgtggagaaactggaattgggctttattcagtacaggcgggaacggtgccaccaaaaagtgcacaggctactgacagagcccggagacagcgccaaggacgctagccctgggggaggccaccatcaggctggtcctggccaagggggtgaggagggagaggcggcaggcgctgctggcgatggcgtggccgcttgtgggtcctatagtgagggtcatggaaagtttcttgccgctgctaggaacccagccgctgaacccagtcctggcgcaccagccccacaggaactgggagccgcagacaagcacggcgacctgtgcgaagcatcactaaccaattccgttgagcccgctcagggtgaagctcgggagggcagttctcaggataaccccactgcccagcccgttctgcaattgctcggggagatgcaggatcaccaggaacatcctggattggggagtaattgctgcgtcccctgcttttgttgggcttggttgcctaggaggaggagatag

SEQ ID NO: 27554 - DNA, 1812 bp, Artificial Sequence
  derived and/or modified sequence
atggccgaggagaccggccagagcaagctggccgccgccaagaagaagttcaaggagtactggcagagaaacagacccggcgtgcccgccgccgccaagagaaacaccaaggccaacggcagcagccccgagaccgccgccagcggcggctgccacagcagcgaggccagcagcagcgccagcagcagcctgcacgccagacagagcccctgccaggagcaggccgccgtgctgaacagcagaagcatcaagatcagcagactgaacgacaccatcaagagcctgaagcagcagaagaagcaggtggagcaccagctggaggaggagaagaaggccaacaacgagaagcagaaggccgagagagagctggagggccagatccagagactgaacaccgagaagaagaagctgaacaccgacctgtaccacatgaagcacagcctgagatacttcgaggaggagagcaaggacctggccggcagactgcagagaagcagccagagaatcggcgagctggagtggagcctgtgcgccgtggccgccacccagaagaagaagcccgacggcttcagcagcagaagcaaggccctgctgaagagacagctggagcagagcatcagagagcagatcctgctgaagggccacgtgacccagctgaaggagagcctgaaggaggtgcagctggagagagaccagtacgccgagcagatcaagggcgagagagcccagtggcagcagagaatgagaaagatgagccaggaggtgtgcaccctgaaggaggagaagaagcacgacacccacagagtggaggagctggagagaagcctgagcagactgaagaaccagatggccgagcccctgccccccgacgcccccgccgtgagcagcgaggtggagctgcaggacctgagaaaggagctggagagagtggccggcgagctgcaggcccaggtggagaacaaccagtgcatcagcctgctgaacagaggccagaaggagagactgagagagcaggaggagagactgcaggagcagcaggagagactgagagagagagagaagagactgcagcagctggccgagccccagagcgacctggaggagctgaagcacgagaacaagagcgccctgcagctggagcagcaggtgaaggagctgcaggagaagctgggccaggtgatggagaccctgaccagcgccgagaaggagcccgaggccgccgtgcccgccagcggcaccggcggcgagagcagcggcctgatggacctgctggaggagaaggccgacctgagagagcacgtggagaagctggagctgggcttcatccagtacagaagagagagatgccaccagaaggtgcacagactgctgaccgagcccggcgacagcgccaaggacgccagccccggcggcggccaccaccaggccggccccggccagggcggcgaggagggcgaggccgccggcgccgccggcgacggcgtggccgcctgcggcagctacagcgagggccacggcaagttcctggccgccgccagaaaccccgccgccgagcccagccccggcgcccccgccccccaggagctgggcgccgccgacaagcacggcgacctgtgcgaggccagcctgaccaacagcgtggagcccgcccagggcgaggccagagagggcagcagccaggacaaccccaccgcccagcccgtgctgcagctgctgggcgagatgcaggaccaccaggagcaccccggcctgggcagcaactgctgcgtgccctgcttctgctgggcctggctgcccagaagaagaagatag

SEQ ID NO: 27555 - DNA, 1902 bp, Artificial Sequence
  derived and/or modified sequence
atgctgcccgtggacggcgaggagagaaagagcgagggcagcgacaccgagggcgacagaaccagcccctgcgccggccccaccagcagcgccaccctgaaggacctggaggtgggcggcagcggctggagatgcagcgaccccgccggccagcccagcaacctgctgccccagagaggcctgggcgcccccctgcccgccgagaccgcccacacccagcccagccccaacgacagaagcctgtacctgagccccaagagcagcagcgccagcagcagcctgcacgccagacagagcccctgccaggagcaggccgccgtgctgaacagcagaagcatcaagatcagcagactgaacgacaccatcaagagcctgaagcagcagaagaagcaggtggagcaccagctggaggaggagaagaaggccaacaacgagaagcagaaggccgagagagagctggagggccagatccagagactgaacaccgagaagaagaagctgaacaccgacctgtaccacatgaagcacagcctgagatacttcgaggaggagagcaaggacctggccggcagactgcagagaagcagccagagaatcggcgagctggagtggagcctgtgcgccgtggccgccacccagaagaagaagcccgacggcttcagcagcagaagcaaggccctgctgaagagacagctggagcagagcatcagagagcagatcctgctgaagggccacgtgacccagctgaaggagagcctgaaggaggtgcagctggagagagaccagtacgccgagcagatcaagggcgagagagcccagtggcagcagagaatgagaaagatgagccaggaggtgtgcaccctgaaggaggagaagaagcacgacacccacagagtggaggagctggagagaagcctgagcagactgaagaaccagatggccgagcccctgccccccgacgcccccgccgtgagcagcgaggtggagctgcaggacctgagaaaggagctggagagagtggccggcgagctgcaggcccaggtggagaacaaccagtgcatcagcctgctgaacagaggccagaaggagagactgagagagcaggaggagagactgcaggagcagcaggagagactgagagagagagagaagagactgcagcagctggccgagccccagagcgacctggaggagctgaagcacgagaacaagagcgccctgcagctggagcagcaggtgaaggagctgcaggagaagctgggccaggtgatggagaccctgaccagcgccgagaaggagcccgaggccgccgtgcccgccagcggcaccggcggcgagagcagcggcctgatggacctgctggaggagaaggccgacctgagagagcacgtggagaagctggagctgggcttcatccagtacagaagagagagatgccaccagaaggtgcacagactgctgaccgagcccggcgacagcgccaaggacgccagccccggcggcggccaccaccaggccggccccggccagggcggcgaggagggcgaggccgccggcgccgccggcgacggcgtggccgcctgcggcagctacagcgagggccacggcaagttcctggccgccgccagaaaccccgccgccgagcccagccccggcgcccccgccccccaggagctgggcgccgccgacaagcacggcgacctgtgcgaggccagcctgaccaacagcgtggagcccgcccagggcgaggccagagagggcagcagccaggacaaccccaccgcccagcccgtgctgcagctgctgggcgagatgcaggaccaccaggagcaccccggcctgggcagcaactgctgcgtgccctgcttctgctgggcctggctgcccagaagaagaagatag

SEQ ID NO: 27556 - protein, 598 aa, Artificial Sequence
  derived and/or modified sequence
MKPTGTDPRILSIAAEVAKSPEQNVPVILLKLKEIINITPLGSSELKKIKQDIYCYDLIQYCLLVLSQDYSRIQGGWTTISQLTQILSHCCVGLEPGEDAEEFYNELLPSAAENFLVLGRQLQTCFINAAKAEEKDELLHFFQIVTDSLFWLLGGHVELIQNVLQSDHFLHLLQADNVQIGSAVMMMLQNILQINSGDLLRIGRKALYSILDEVIFKLFSTPSPVIRSTATKLLLLMAESHQEILILLRQSTCYKGLRRLLSKQETGTEFSQELRQLVGLLSPMVYQEVEEQKLHQAACLIQAYWKGFQTRKRLKKLPSAVIALQRSFRSKRSKMLLEINRQKEEEDLKLQLQLQRQRAMRLSRELQLSMLEIVHPGQVEKHYREMEEKSALIIQKHWRGYRERKNFHQQRQSLIEYKAAVTLQRAALKFLAKCRKKKKLFAPWRGLQELTDARRVELKKRVDDYVRRHLGSPMSDVVSRELHAQAQERLQHYFMGRALEERAQQHREALIAQISTNVEQLMKAPSLKEAEGKEPELFLSRSRPVAAKAKQAHLTTLKHIQAPWWKKLGEESGDEIDVPKDELSIELENLFIGGTKPP

SEQ ID NO: 27557 - DNA, 1797 bp, Artificial Sequence
  derived and/or modified sequence
atgaagccgacaggcaccgatccaagaatcctcagcatcgccgccgaagtggcgaagtcacctgaacagaacgttcccgtcattctgctgaaactcaaagagattatcaacattacccccctcggatcctccgagttgaaaaagatcaagcaagatatctactgctacgaccttatccagtactgcttgctggtgctaagccaggactatagcagaattcagggaggctggactacaatctcccagttaacacagatcctcagtcactgctgtgtgggtctggagcctggcgaggacgcggaggaattttacaacgaattgctcccttcagccgctgagaattttctcgttctgggccgtcaactccagacatgctttattaatgccgcaaaagctgaagagaaagatgaactgttgcattttttccagatcgtgaccgatagtctgttctggctgttgggtgggcacgttgaattgatccagaacgtgctgcagagtgaccattttctgcatcttttacaggccgacaatgtacagattggttctgcggtcatgatgatgttacagaatatcctgcaaatcaattccggtgacttactgagaattggaaggaaggccctttactctatcctggatgaggtcatattcaagctcttctctacacctagcccggtaatcaggtcaacagctaccaaactgctgcttctgatggcggaatcacaccaggagattctcattttgctcagacagtcaacctgctacaaaggactgcgccgcctgctgtctaagcaggagactgggaccgaattctctcaagagttgaggcagcttgtcggcttgctcagccccatggtgtaccaggaggtggaagagcagaagctgcaccaggcggcttgcctcatccaagcatattggaagggattccagaccaggaagcggttaaaaaaactccccagcgcagtgatagctctgcaaaggtcgttcaggtctaagagatctaaaatgctgctggagataaacaggcaaaaggaggaagaggatttgaaactgcagcttcagctacaaaggcagagagccatgagattgagccgtgaacttcagctaagcatgctcgaaatcgtgcaccccggtcaggtggagaaacattaccgggagatggaggagaaatctgccctcatcattcaaaaacattggagaggctaccgggaacgcaagaactttcaccagcaacgccagtccctcattgagtacaaggcagccgtgactctccagcgagcagccctgaaatttctggccaaatgccggaaaaaaaagaagctcttcgccccttggagagggttgcaggaactgactgatgccaggagggtggagttgaagaaacgcgttgacgattatgtgcgacgtcacctgggttctccaatgtccgacgtggtgtctcgggagctgcatgcccaggcacaggaacgcctacaacattatttcatgggtcgcgccttagaggagcgagcgcaacagcatcgggaggcattgatcgctcagatatccaccaatgtcgagcagctgatgaaggctccctctcttaaggaagctgagggcaaggaacctgagttgtttttgtctagaagccggcccgtagcagcgaaagccaagcaagcccacctcaccactctaaaacacatacaggctccttggtggaagaaacttggggaagaaagtggagacgaaattgacgtccccaaggatgagctctccattgagcttgagaacctgttcatcggcggaacaaaacctccatag

SEQ ID NO: 27558 - DNA, 2594 bp, Artificial Sequence
  derived and/or modified sequence
cgcctccaggccccttcccgcgtcgcgacgcacgctgccccggaaggccgcggcgctgtagtgcggcgtgggagccccaggttctttagtggaagaacgcgaagcgaggatgagtgatccgtggaggcagtaacaggcgcggcgagggagaagtgattcccgaagaatcaaggctgggccggacccggtggcctggcaacagggtaataagagaaatgaagccaacaggtacagacccaaggatcttatctatagctgctgaagttgcaaaaagccctgagcagaatgtccctgttatactgttgaagttaaaagaaataataaacatcacacctttaggaagctcagagttgaagaaaatcaaacaagatatatattgttatgatctcattcaatattgcctcttggtcctcagtcaagattattctcgaatccagggtggttggactacaatttcccagcttacacagatattaagccattgctgtgtgggcttggagccaggagaagatgcagaggaattttacaatgaattacttccatcagctgcagaaaattttctagttttggggagacaattacaaacatgttttatcaatgcagctaaggctgaagaaaaagatgaattactacactttttccaaattgtgactgattctctcttctggcttttgggaggccatgttgaacttattcagaatgtactacaaagtgatcatttcttacatttactgcaagctgacaatgtccaaataggatctgcagtcatgatgatgctacagaatatactacagatcaacagtggtgatttactcagaataggaagaaaagccctgtattcaattttagatgaagttattttcaagcttttttcaactcctagtccagttataagaagtactgctacaaaactcctactgttgatggctgaatcccatcaggaaattttgattttactgagacaaagtacctgctacaaaggactcagacgtctactaagtaaacaggaaactgggactgaattcagtcaagaacttagacagcttgttggccttttaagcccaatggtctatcaggaagtagaagagcagaaactacatcaagcagcatgcttgattcaagcctattggaagggttttcagacaagaaagagattaaagaagcttccatctgctgtgattgctttgcagaggagtttcagatccaaacgatcaaagatgttgctggagataaataggcagaaggaagaagaggacctcaaattacaattgcaacttcaaagacagagagccatgagactttcccgagaattgcagctgagtatgctcgaaatagttcatccaggtcaggtggagaaacactatcgggaaatggaagagaaatcagcactgattatccagaaacattggagagggtacagggaaaggaaaaattttcaccaacagaggcagtctctcatagagtataaagcagctgtcacacttcaaagagcagcgcttaaattcctagcgaagtgccgtaagaaaaagaaactatttgctccttggcgaggactccaagaactcactgatgcacgccgagttgaactgaagaaacgagtggatgactatgtcagaagacatttgggctctccaatgtcagatgtggtcagtagggagctccatgcccaagctcaagaacgactgcaacactactttatgggcagggccctagaagagcgagcccagcagcacagagaagctctgatagcacagatcagcaccaacgttgaacagctaatgaaggcaccaagtctgaaggaggcagaagggaaagaacctgagctcttcctaagtagatccaggcctgtggcagccaaggccaagcaggcccatctcacaaccctgaagcacatacaagcaccctggtggaagaagcttggagaagaatctggagatgagattgatgttccaaaggatgagcttagtatagaattagaaaatttattcattggtggaaccaaaccaccttagtgagtaaccctaagaattgacacaaatctcatattttaggagattatattggttctgcctctggcatgctggtagactagggccatcctaacttattattttccagaggttctcctccagacaagacctgcagtaagcaaagagttatattctacctctctctcaattttctttttcttttctctgtatcctcatcgttagccacacacagatttgtgtggcttttattgtagaactaaacttagcatagtgttctgttgtttacatgaagtgtgtttttctttggtttcttctgttttccaactaaatatttttttctaaataaatattttcaacaattgatttgaaaaatttgtcaggattatttcaacttttcacatttgttatctgaaattcctatttcctgttaacataggaggtgtgtgcagactttattaatgtgaggaaaagaaatgctcaattgaaggacatttccctgttttctataaagcaatggttgaactcattttctattttgttatttctaaaaggaactgcataccaaaaaaatgcattctttctattaaactgtgagaactacat

SEQ ID NO: 27559 - DNA, 1797 bp, Artificial Sequence
  derived and/or modified sequence
atgaagcccaccggcacagacccccgcatcctgagcattgctgctgaggtggccaagagccctgagcagaatgtgcctgtgatcctgctgaagctgaaggagatcatcaacatcacccccctgggcagcagcgagctgaagaagatcaagcaggacatctactgctatgacctgatccagtactgcctgctggtgctgagccaggactacagccgcatccagggcggctggaccaccatcagccagctgacccagatcctgagccactgctgcgtgggcctggagcccggggaggatgctgaggagttctacaatgagctgctgcccagcgctgctgagaacttcctggtgctgggccggcagctgcagacctgcttcatcaatgctgccaaggccgaggagaaggatgagctgctgcacttcttccagatcgtgacagacagcctcttctggctgctgggcggccacgtggagctgatccagaatgtgctgcagagcgaccacttcctgcacctgctgcaggccgacaacgtgcagatcggcagcgctgtgatgatgatgctgcagaacatcctgcagatcaacagcggggacctgctgcgcatcggcaggaaggccctgtacagcatcctggatgaggtgatcttcaagctgttcagcacccccagccctgtgatccgcagcacagccaccaagctgctgctgctgatggccgagagccaccaggagatcctgatcctgctgcggcagagcacctgctacaagggcctgcggcggctgctgagcaagcaggagaccggcacagagttcagccaggagctgcggcagctggtgggcctgctgagccccatggtgtaccaggaggtggaggagcagaagctgcaccaggccgcctgcctgatccaggcctactggaagggcttccagaccaggaagaggctgaagaagctgcccagcgctgtgattgccctgcagaggagcttccgcagcaagaggagcaagatgctgctggagatcaaccggcagaaggaggaggaggacctgaagctgcagctgcagctgcagaggcagagggccatgaggctgagccgggagctgcagctgtccatgctggagatcgtgcaccctggccaggtggagaagcactaccgggagatggaggagaagagcgccctgatcatccagaagcactggaggggctaccgggagaggaagaacttccaccagcagaggcagagcctgattgagtacaaggctgctgtgaccctgcagagagctgccctgaagttcctggccaagtgcaggaagaagaagaagctgtttgccccctggaggggcctgcaggagctgacagatgcccggcgggtggagctgaagaagagggtggatgattatgtgagaagacacctgggcagccccatgtctgatgtggtgtcccgggagctgcacgcccaggcccaggagcggctgcagcactacttcatgggccgggccctggaggagcgggcccagcagcaccgggaggccctgattgcccagatcagcaccaacgtggagcagctgatgaaggcccccagcctgaaggaggccgagggcaaggagcctgagctgttcctgagccgcagcaggcctgtggccgccaaggccaagcaggcccacctgaccaccctgaagcacatccaggccccctggtggaagaagctgggggaggagagcggagatgaaattgatgtgcccaaggatgagctgagcattgagctggagaacctcttcatcggcggcaccaagcccccatag

SEQ ID NO: 27560 - DNA, 1797 bp, Artificial Sequence
  derived and/or modified sequence
atgaagcccaccggcaccgacccccggatcctgagcatcgccgccgaagtggcaaagtccccggagcagaacgtccctgttatcctgctgaagctaaaggagatcattaatatcacacccctcggcagcagcgaactcaagaagatcaagcaggacatttattgctatgacttaatacagtattgtctgttagtgctttcccaggattatagccggattcaggggggatggaccaccatctctcagctgactcagattttaagtcattgctgcgtgggcctcgaacctggagaggacgccgaagagttttacaacgaactcctgccttcagctgccgagaactttctagtgctcggaaggcagcttcagacttgttttataaatgccgccaaggccgaagagaaagatgagcttctgcactttttccagatcgtgactgactctcttttttggctcctgggaggccatgtggagctcatccaaaacgtgctgcagtccgaccattttctgcacttgctacaggcagataatgtgcagatcgggtctgcagtaatgatgatgcttcagaatattctgcagattaactccggcgacctcctgagaatcggcagaaaagcgctctactcgattctggacgaggtgatttttaagctgttctcaacaccatctccagtaattagatctactgccactaagctattactgcttatggccgaatcacaccaggaaatattaatcctgctgaggcaaagcacttgctacaagggcctccgtagactcttgtccaagcaagagactgggactgagttctcccaggaactacgccagctcgttgggttattgtccccgatggtgtaccaagaggtagaagagcagaagctacaccaggcggcctgcctgatccaagcatactggaaggggtttcagacgagaaaaaggcttaagaaactgccatcagccgtgattgccttgcaacggtcctttaggagcaagcgttccaaaatgctgttagaaatcaatcgccagaaagaggaggaagacctcaagctacaacttcagctgcagagacagcgcgccatgaggctttctcgcgagctacagctgagtatgctggagatagtgcatccaggacaggtggagaagcattacagggagatggaggaaaaaagtgcgttaattatacagaagcattggcgcggatatcgtgagaggaaaaactttcaccagcaaaggcaatccctgattgaatataaagcggcagtcacgttgcaacgggctgctttaaagttcctggcgaaatgccgcaagaagaaaaagctgttcgctccatggaggggactgcaagaattaaccgatgctaggagggtcgagctcaagaagcgggttgatgattacgtgcgcagacacctaggctctcctatgagcgacgtcgtcagtagggagctgcatgctcaggcccaagaacgtctgcagcactacttcatggggcgcgcactcgaggaaagggcacagcagcaccgcgaagcattgatagcccagatttctactaatgtagaacaattgatgaaagcgccgagtctcaaggaagccgaaggaaaggaaccagaactgtttctttctcgatccagacccgtggccgcaaaggcaaagcaggctcatctgaccacactcaagcacattcaagccccttggtggaagaagctaggcgaagaatcaggagatgagatcgacgtccccaaagatgagctgtctatcgaattggaaaatcttttcattggggggacaaagcccccatag

SEQ ID NO: 27561 - DNA, 1797 bp, Artificial Sequence
  derived and/or modified sequence
atgaaaccaaccgggacggatcctcggatactctccatcgccgcagaagtggctaagtcaccagagcagaatgttcctgtaattctgcttaagctgaaagaaattatcaacattacacccttgggcagttctgagctgaaaaaaattaagcaggacatttactgctatgatcttattcagtactgtctgctggtgttgtcccaggattactcgcgaattcagggaggctggacaaccatttcacaactgactcagatactatctcactgctgcgtaggactcgagcccggagaggacgcggaagagttctacaatgaactgctgccttccgccgctgaaaatttcttggtcctcggtcgacagcttcaaacctgcttcatcaacgccgcaaaagcggaggagaaagatgaacttctgcacttctttcagatagtgaccgatagtctgttctggctgttagggggacatgtggagctgattcagaacgtgttgcaatcagatcatttcctgcatctgctgcaggcggataacgtccagataggttctgccgtgatgatgatgttgcaaaatatcctccagatcaacagcggcgatctgctgaggatcgggcgtaaggctctgtattccattttggatgaagtgatattcaaactcttcagcactccttccccagtgatcagatccacagccaccaagctgctgttgcttatggccgagtcccaccaggagatcctgatcctgctccgccaatcaacatgttataaaggtctccgcagacttcttagcaaacaggagaccggaaccgagttcagccaggagcttagacagttagtcgggttgctctcccccatggtgtatcaagaagtcgaggagcaaaaactgcaccaggccgcttgcttaatccaggcttactggaaggggtttcagaccaggaaacgcctaaaaaagctgccgtctgcagtgattgccttgcaacgcagttttaggagcaaacgatccaagatgctgctcgagattaaccgacaaaaggaagaagaggatctgaagctccagctgcagctccagcgccagcgtgctatgagactatcacgggagcttcagctgtctatgttagagattgtccaccctggccaggttgaaaaacactatcgagaaatggaggagaaaagcgcgctgattatccaaaaacactggaggggataccgagaacgcaaaaattttcaccagcagcgtcagtctctaattgaatataaggccgcagtgaccctccaacgggcagccctaaaatttctggcgaaatgtcgcaagaaaaaaaagcttttcgcaccctggagagggttgcaagaactaactgacgccagacgggtggagttaaagaagcgcgttgacgactacgtgagacgccatctcggttctcccatgtctgatgtagtctcccgagagttgcatgcacaagcccaggaacggttgcaacattactttatgggacgcgctctggaggagagggcccagcagcaccgggaagccctcatcgcacaaatatctaccaacgtggagcagctgatgaaagctccatcactgaaggaagctgagggcaaagagcccgaactgtttctttcacgatccaggcccgttgccgctaaagcaaagcaggcccatctcaccaccctgaagcatattcaggctccttggtggaagaaactcggtgaagaaagcggtgacgaaattgacgtgcctaaagatgagctgtccatcgagctcgagaatcttttcatcggcggaactaagcccccttag

SEQ ID NO: 27562 - DNA, 1797 bp, Artificial Sequence
  derived and/or modified sequence
atgaagcccaccggcaccgaccccagaatcctgagcatcgccgccgaggtggccaagagccccgagcagaacgtgcccgtgatcctgctgaagctgaaggagatcatcaacatcacccccctgggcagcagcgagctgaagaagatcaagcaggacatctactgctacgacctgatccagtactgcctgctggtgctgagccaggactacagcagaatccagggcggctggaccaccatcagccagctgacccagatcctgagccactgctgcgtgggcctggagcccggcgaggacgccgaggagttctacaacgagctgctgcccagcgccgccgagaacttcctggtgctgggcagacagctgcagacctgcttcatcaacgccgccaaggccgaggagaaggacgagctgctgcacttcttccagatcgtgaccgacagcctgttctggctgctgggcggccacgtggagctgatccagaacgtgctgcagagcgaccacttcctgcacctgctgcaggccgacaacgtgcagatcggcagcgccgtgatgatgatgctgcagaacatcctgcagatcaacagcggcgacctgctgagaatcggcagaaaggccctgtacagcatcctggacgaggtgatcttcaagctgttcagcacccccagccccgtgatcagaagcaccgccaccaagctgctgctgctgatggccgagagccaccaggagatcctgatcctgctgagacagagcacctgctacaagggcctgagaagactgctgagcaagcaggagaccggcaccgagttcagccaggagctgagacagctggtgggcctgctgagccccatggtgtaccaggaggtggaggagcagaagctgcaccaggccgcctgcctgatccaggcctactggaagggcttccagaccagaaagagactgaagaagctgcccagcgccgtgatcgccctgcagagaagcttcagaagcaagagaagcaagatgctgctggagatcaacagacagaaggaggaggaggacctgaagctgcagctgcagctgcagagacagagagccatgagactgagcagagagctgcagctgagcatgctggagatcgtgcaccccggccaggtggagaagcactacagagagatggaggagaagagcgccctgatcatccagaagcactggagaggctacagagagagaaagaacttccaccagcagagacagagcctgatcgagtacaaggccgccgtgaccctgcagagagccgccctgaagttcctggccaagtgcagaaagaagaagaagctgttcgccccctggagaggcctgcaggagctgaccgacgccagaagagtggagctgaagaagagagtggacgactacgtgagaagacacctgggcagccccatgagcgacgtggtgagcagagagctgcacgcccaggcccaggagagactgcagcactacttcatgggcagagccctggaggagagagcccagcagcacagagaggccctgatcgcccagatcagcaccaacgtggagcagctgatgaaggcccccagcctgaaggaggccgagggcaaggagcccgagctgttcctgagcagaagcagacccgtggccgccaaggccaagcaggcccacctgaccaccctgaagcacatccaggccccctggtggaagaagctgggcgaggagagcggcgacgagatcgacgtgcccaaggacgagctgagcatcgagctggagaacctgttcatcggcggcaccaagcccccctag

SEQ ID NO: 27563 - protein, 465 aa, Artificial Sequence
  derived and/or modified sequence
MKPTGTDPRILSIAAEVAKSPEQNVPVILLKLKEIINITPLGSSELKKIKQDIYCYDLIQYCLLVLSQDYSRIQGGWTTISQLTQILSHCCVGLEPGEDAEEFYNELLPSAAENFLVLGRQLQTCFINAAKAEEKDELLHFFQIVTDSLFWLLGGHVELIQNVLQSDHFLHLLQADNVQIGSAVMMMLQNILQINRSKRSKMLLEINRQKEEEDLKLQLQLQRQRAMRLSRELQLSMLEIVHPGQVEKHYREMEEKSALIIQKHWRGYRERKNFHQQRQSLIEYKAAVTLQRAALKFLAKCRKKKKLFAPWRGLQELTDARRVELKKRVDDYVRRHLGSPMSDVVSRELHAQAQERLQHYFMGRALEERAQQHREALIAQISTNVEQLMKAPSLKEAEGKEPELFLSRSRPVAAKAKQAHLTTLKHIQAPWWKKLGEESGDEIDVPKDELSIELENLFIGGTKPP

SEQ ID NO: 27564 - DNA, 1398 bp, Artificial Sequence
  derived and/or modified sequence
atgaaaccgacaggaacagacccgagaatactcagcattgccgctgaagtggccaaatcacccgagcagaacgtccctgttatcttgttgaaactgaaagaaattatcaacatcacccctctcggtagttctgaactcaaaaagatcaaacaggacatatattgctatgacctgatacagtactgtctcctggtgctaagccaggattactccaggatccagggagggtggacaactatctctcagctcacacagatactgagtcattgctgtgtcgggctggagcctggggaagacgctgaggagttttacaacgaactcctgccctccgcggctgagaacttcctggtgctgggtcgccaactgcagacttgttttattaatgccgccaaagcagaagaaaaggacgagctcttgcacttttttcagatcgttaccgattcccttttttggcttctgggcggccatgtagaacttatccagaacgtgttacagtctgaccacttcctgcaccttctccaagccgacaacgttcagatagggagtgctgtcatgatgatgttgcagaatatcctgcaaattaaccgaagcaagaggagcaaaatgcttctggagatcaataggcaaaaggaggaagaagatctgaaactgcagctgcagctgcagagacaaagggcgatgaggttgagtcgggagttgcagctgtcaatgctggaaatcgtgcaccctggccaggtggaaaagcattatcgcgaaatggaagagaagagcgccttgatcatccagaaacactggcgcggatatcgagaacgaaaaaactttcaccaacagcggcagtcactcatcgaatataaggcggcggtgaccctgcagagagccgccctgaaatttctcgccaagtgccggaagaaaaaaaagcttttcgccccctggaggggacttcaggagttgaccgacgctagaagggtggagttgaagaaaagggtcgacgattacgtgcgccgccatctcgggtcgcctatgtctgacgtcgtatcccgagagttacacgcccaggcccaagagcgtcttcagcactattttatgggccgggccctcgaagaacgcgctcaacaacacagggaggccctcattgcccagatcagcacaaacgtggaacagctaatgaaagctccaagtctgaaggaagctgaggggaaagaacctgagctgtttctgtctaggtcccgacctgttgctgccaaagccaagcaggcgcacttgaccacgcttaaacatatccaggcgccttggtggaagaagctgggggaggagagtggcgacgaaatcgatgtccctaaggatgagctgtctatcgaactggagaatttatttatcggaggcacgaagccaccttag

SEQ ID NO: 27565 - DNA, 1919 bp, Artificial Sequence
  derived and/or modified sequence
ggccgcggcgctgtagtgcggcgtgggagccccaggttctttagtggaagaacgcgaagcgaggatgagtgatccgtggaggcagtaacaggcgcggcgagggagaagtgattcccgaagaatcaaggctgggccggacccggtggcctggcaacagggtaataagagaaatgaagccaacaggtacagacccaaggatcttatctatagctgctgaagttgcaaaaagccctgagcagaatgtccctgttatactgttgaagttaaaagaaataataaacatcacacctttaggaagctcagagttgaagaaaatcaaacaagatatatattgttatgatctcattcaatattgcctcttggtcctcagtcaagattattctcgaatccagggtggttggactacaatttcccagcttacacagatattaagccattgctgtgtgggcttggagccaggagaagatgcagaggaattttacaatgaattacttccatcagctgcagaaaattttctagttttggggagacaattacaaacatgttttatcaatgcagctaaggctgaagaaaaagatgaattactacactttttccaaattgtgactgattctctcttctggcttttgggaggccatgttgaacttattcagaatgtactacaaagtgatcatttcttacatttactgcaagctgacaatgtccaaataggatctgcagtcatgatgatgctacagaatatactacagatcaacagatccaaacgatcaaagatgttgctggagataaataggcagaaggaagaagaggacctcaaattacaattgcaacttcaaagacagagagccatgagactttcccgagaattgcagctgagtatgctcgaaatagttcatccaggtcaggtggagaaacactatcgggaaatggaagagaaatcagcactgattatccagaaacattggagagggtacagggaaaggaaaaattttcaccaacagaggcagtctctcatagagtataaagcagctgtcacacttcaaagagcagcgcttaaattcctagcgaagtgccgtaagaaaaagaaactatttgctccttggcgaggactccaagaactcactgatgcacgccgagttgaactgaagaaacgagtggatgactatgtcagaagacatttgggctctccaatgtcagatgtggtcagtagggagctccatgcccaagctcaagaacgactgcaacactactttatgggcagggccctagaagagcgagcccagcagcacagagaagctctgatagcacagatcagcaccaacgttgaacagctaatgaaggcaccaagtctgaaggaggcagaagggaaagaacctgagctcttcctaagtagatccaggcctgtggcagccaaggccaagcaggcccatctcacaaccctgaagcacatacaagcaccctggtggaagaagcttggagaagaatctggagatgagattgatgttccaaaggatgagcttagtatagaattagaaaatttattcattggtggaaccaaaccaccttagtgagtaaccctaagaattgacacaaatctcatattttaggagattatattggttctgcctctggcatgctggtagactagggccatcctaacttattattttccagaggttctcctccagacaagacctgcagtaagcaaagagttatattctacctctctctcaattttctttttcttttctctgtatcctcatcgttagccacacacagatttgtgtggcttttattgtagaactaaacttagcatagtgttctgttgtttacatgaagtgtgtttttctttggtttcttctgttttccaactaaatatttttttctaaataaatattttcaacaattgatttgaaaaa

SEQ ID NO: 27566 - DNA, 1398 bp, Artificial Sequence
  derived and/or modified sequence
atgaagcccaccggcacagacccccgcatcctgagcattgctgctgaggtggccaagagccctgagcagaatgtgcctgtgatcctgctgaagctgaaggagatcatcaacatcacccccctgggcagcagcgagctgaagaagatcaagcaggacatctactgctatgacctgatccagtactgcctgctggtgctgagccaggactacagccgcatccagggcggctggaccaccatcagccagctgacccagatcctgagccactgctgcgtgggcctggagcccggggaggatgctgaggagttctacaatgagctgctgcccagcgctgctgagaacttcctggtgctgggccggcagctgcagacctgcttcatcaatgctgccaaggccgaggagaaggatgagctgctgcacttcttccagatcgtgacagacagcctcttctggctgctgggcggccacgtggagctgatccagaatgtgctgcagagcgaccacttcctgcacctgctgcaggccgacaacgtgcagatcggcagcgctgtgatgatgatgctgcagaacatcctgcagatcaacagaagcaagaggagcaagatgctgctggagatcaaccggcagaaggaggaggaggacctgaagctgcagctgcagctgcagaggcagagggccatgaggctgagccgggagctgcagctgtccatgctggagatcgtgcaccctggccaggtggagaagcactaccgggagatggaggagaagagcgccctgatcatccagaagcactggaggggctaccgggagaggaagaacttccaccagcagaggcagagcctcatcgagtacaaggctgctgtgaccctgcagagagctgccctgaagttcctggccaagtgcaggaagaagaagaagctgtttgccccctggaggggcctgcaggagctgacagatgccaggagagtggagctgaagaagagggtggatgattatgtgcggcggcacctgggcagccccatgtctgatgtggtgtcccgggagctgcacgcccaggcccaggagcggctgcagcactacttcatgggccgggccctggaggagcgggcccagcagcaccgggaggccctgattgcccagatcagcaccaacgtggagcagctgatgaaggcccccagcctgaaggaggccgagggcaaggagcctgagctgttcctgagccgcagcaggcctgtggccgccaaggccaagcaggcccacctgaccaccctgaagcacatccaggccccctggtggaagaagctgggggaggagagcggagatgaaattgatgtgcccaaggatgagctgagcattgagctggagaacctcttcatcggcggcaccaagccaccctag

SEQ ID NO: 27567 - DNA, 1398 bp, Artificial Sequence
  derived and/or modified sequence
atgaagcccaccggcaccgacccccggatcctgagcatcgccgccgaggtcgccaagagcccagagcagaacgttcccgtaatactgctcaaactaaaagagatcatcaatattacccctctcgggtctagcgagttaaagaagattaagcaagacatttactgttacgaccttattcagtactgcttgctggtgctgagtcaggactactcacggatccagggcggctggaccaccatcagtcagcttacccagatactatcccattgttgtgttggcctcgagccaggggaggatgccgaagagttttacaacgagttgctccctagcgcagccgagaattttcttgtgctcgggagacaactgcaaacatgtttcattaatgcagcgaaagccgaggagaaggatgaactcctccacttttttcagattgtcactgatagcttgttttggctgttgggcggccatgtggaactgatccagaatgtactccagtctgatcactttctgcatttgctacaggccgataacgtgcagatcggcagtgcggtgatgatgatgctgcaaaacattttacagattaacagatctaaaagaagcaaaatgctgctcgagattaacaggcaaaaagaggaggaagacctcaagcttcagcttcaattacagcgacaacgagcaatgcgtctctccagagagctccagctttctatgctggaaatcgtgcaccccgggcaggtagagaagcactatcgcgagatggaggagaagagcgccttgatcatccaaaaacattggcggggatacagggaaagaaagaactttcatcagcagcgccagagtctgatagaatataaagccgcggtgaccctccagcgcgctgctctgaaattcttggcaaaatgtcggaagaagaagaagctgtttgccccctggcgcggtttacaggaactcactgatgccagaagggttgaactgaaaaaaagggtcgacgattacgtgcggaggcacctggggtcacccatgtccgacgtggtaagtcgcgaactccacgctcaggctcaggagaggctgcagcactactttatgggtcgtgctctcgaagaaagagctcagcagcatagggaagccctgatcgcccagatctctacgaacgtggaacaactcatgaaggcccccagtctgaaagaggcagaggggaaggagcctgaattgtttctgtctcggagcaggcccgtggcggcaaaagctaagcaggcccacttgaccaccctgaaacatattcaggcaccatggtggaagaaactgggagaagagtcgggagatgagatcgatgtaccgaaggatgaactgtctatcgaactggagaacctctttatcggcggtactaagcccccttag

SEQ ID NO: 27568 - DNA, 1398 bp, Artificial Sequence
  derived and/or modified sequence
atgaaacctactggcaccgatccccgtatactgtccattgccgctgaggtagcaaagtcaccggagcaaaatgtaccggtcatcctgttgaaactgaaagaaattatcaacattactccattgggcagcagcgagcttaaaaaaatcaagcaggacatctattgttatgatctgattcagtattgcttgcttgtcctttcccaggactacagccgcattcagggcggatggacaactatctcgcaattgacccagattctctcacactgctgtgtgggactggaaccaggagaagatgctgaggaattctacaacgagctcctgcctagcgccgcagagaatttcctggtcctcggcagacagctccagacatgttttatcaatgccgctaaggccgaggaaaaagatgagctgctgcatttcttccagattgtgactgactctctattctggctccttggcggacacgtggaattaattcaaaacgtcctgcagtctgatcattttttgcacttgctgcaggcggataatgtgcagatcggctccgctgtaatgatgatgctccaaaatattttgcaaataaaccggtccaaaaggtccaagatgttgctggaaatcaacagacagaaagaagaagaggatctgaagctccaactgcagctgcaacggcagagagctatgagactttctcgcgagctccagttgagcatgctcgaaatagtgcaccccggacaggtcgagaaacactaccgtgaaatggaggagaagtccgcactaatcatacaaaagcattggcggggttaccgggagcgaaaaaacttccatcagcaaagacaatctctgattgagtataaggccgcagtgacacttcaaagagctgcactaaagtttttggcgaagtgtcggaaaaaaaaaaaactgtttgccccatggaggggtttgcaggagctcaccgatgcacgcagggtggagttgaaaaaaagagtggacgattatgtgcgccgtcacctgggcagccccatgtcagacgtcgtgtctcgcgagctgcatgcacaggcccaagaacggcttcagcactatttcatgggacgggctctcgaagaaagagctcaacaacaccgagaagctctgatagcgcagatcagtaccaatgtcgagcagctgatgaaagccccatcccttaaggaggccgagggtaaagagcccgaactgtttctgtccaggtctaggcctgtggcagccaaggccaaacaggcccacctaacaactctgaagcatatccaggcaccctggtggaagaagctgggagaggagtccggggacgagatcgacgttcctaaggatgagttgtctatcgagctggaaaatctgtttatcggaggcaccaagcccccatag

SEQ ID NO: 27569 - DNA, 1398 bp, Artificial Sequence
  derived and/or modified sequence
atgaagcccaccggcaccgaccccagaatcctgagcatcgccgccgaggtggccaagagccccgagcagaacgtgcccgtgatcctgctgaagctgaaggagatcatcaacatcacccccctgggcagcagcgagctgaagaagatcaagcaggacatctactgctacgacctgatccagtactgcctgctggtgctgagccaggactacagcagaatccagggcggctggaccaccatcagccagctgacccagatcctgagccactgctgcgtgggcctggagcccggcgaggacgccgaggagttctacaacgagctgctgcccagcgccgccgagaacttcctggtgctgggcagacagctgcagacctgcttcatcaacgccgccaaggccgaggagaaggacgagctgctgcacttcttccagatcgtgaccgacagcctgttctggctgctgggcggccacgtggagctgatccagaacgtgctgcagagcgaccacttcctgcacctgctgcaggccgacaacgtgcagatcggcagcgccgtgatgatgatgctgcagaacatcctgcagatcaacagaagcaagagaagcaagatgctgctggagatcaacagacagaaggaggaggaggacctgaagctgcagctgcagctgcagagacagagagccatgagactgagcagagagctgcagctgagcatgctggagatcgtgcaccccggccaggtggagaagcactacagagagatggaggagaagagcgccctgatcatccagaagcactggagaggctacagagagagaaagaacttccaccagcagagacagagcctgatcgagtacaaggccgccgtgaccctgcagagagccgccctgaagttcctggccaagtgcagaaagaagaagaagctgttcgccccctggagaggcctgcaggagctgaccgacgccagaagagtggagctgaagaagagagtggacgactacgtgagaagacacctgggcagccccatgagcgacgtggtgagcagagagctgcacgcccaggcccaggagagactgcagcactacttcatgggcagagccctggaggagagagcccagcagcacagagaggccctgatcgcccagatcagcaccaacgtggagcagctgatgaaggcccccagcctgaaggaggccgagggcaaggagcccgagctgttcctgagcagaagcagacccgtggccgccaaggccaagcaggcccacctgaccaccctgaagcacatccaggccccctggtggaagaagctgggcgaggagagcggcgacgagatcgacgtgcccaaggacgagctgagcatcgagctggagaacctgttcatcggcggcaccaagcccccctag

SEQ ID NO: 27570 - protein, 208 aa, Artificial Sequence
  derived and/or modified sequence
MKDIDIGKEYIIPSPGYRSVRERTSTSGTHRDREDSKFRRTRPLECQDALETAARAEGLSLDASMHSQLRILDEEHPKGKYHHGLSALKPIRTTSKHQHPVDNAGLFSCMTFSWLSSLARVAHKKGELSMEDVWSLSKHESSDVNCRRLERLWQEELNEVGPDAASLRRVVWIFCRTRLILSIVCLMITQLAGFSGPNFQDGCILRSE

SEQ ID NO: 27571 - DNA, 627 bp, Artificial Sequence
  derived and/or modified sequence
atgaaggatattgacattggaaaagagtacatcattccatctcccggataccgctccgtcagagaaaggacctcaacctctgggacccatagagatagagaagactccaaatttagaaggactagacctctggagtgccaggacgccttagagaccgctgcgagggccgaaggcctctctcttgatgcatccatgcactcccagcttaggattctggatgaagaacacccgaagggcaagtaccatcatggactgtcggcattaaaacctataagaactacatcaaaacaccagcacccagttgacaatgccgggctctttagttgtatgaccttcagttggctgtcctcgctggctcgggtggcgcacaaaaagggagagttgtccatggaggacgtttggtctctgtcgaaacacgagtcaagtgatgtcaactgcagacgattagagaggttatggcaggaggagttgaatgaggtgggtcctgatgctgccagcttgagaagggttgtctggattttttgccgaacccggctcattctctccatcgtatgtcttatgatcacgcagctggcagggttttcaggtccaaactttcaggatggttgcatcttgaggtcagaatag

SEQ ID NO: 27572 - DNA, 678 bp, Artificial Sequence
  derived and/or modified sequence
atgaaggacatagacatcggtaaggaatatataattcccagcccaggatatcgttccgttagggagcgcacgtctacctcaggcacccaccgagacagggaggacagtaaattccgcagaacacggccccttgaatgtcaggacgcactagagacagccgcgagagccgaagggctttctctggacgcaagcatgcacagtcagctgcgtattttagacgaggaacacccgaaaggcaagtaccaccacggactgagtgcgttgaagcctattagaacaacgtccaagcaccagcaccccgtggacaacgctggtctgtttagttgtatgactttttcatggctctcctccctggctagagtggcccacaagaagggtgagctgtctatggaggacgtgtggagcctaagtaagcacgagtcaagcgacgtaaactgtcggaggcttgaacggctgtggcaggaggagctaaacgaggtgggccctgatgccgctagtctgcgcagggtggtatggatcttttgtcgcactaggctcatcctcagcatcgtgtgcctcatgataactcagctggctgggttcagcggacctcctagctttggggattgtagcatctcagcagaggtttgtggcaaccgattgcactgcaccgctattctattatcatgcttcacatag

SEQ ID NO: 27573 - DNA, 696 bp, Artificial Sequence
  derived and/or modified sequence
atgaaggacatcgacatcgggaaagagtacattatcccgagcccagggtatagaagtgtgcgtgagcgtacttccacttctggtacccaccgggatcgcgaagattccaagtttcggcggacaaggccactcgaatgtcaggatgccttggagaccgccgcacgcgccgagggccttagcctcgatgctagtatgcacagtcaactcaggatcctggacgaagagcatcctaagggcaaatatcaccatggcctgtccgcgctgaagccgatcaggaccacttctaagcaccagcacccggttgataacgctggcctgttcagttgtatgactttttcttggctatcatctctggcccgcgtggcccacaaaaagggagagttatcaatggaggacgtgtggtccctgtctaagcatgaaagttccgatgttaactgtcgtcggctagagcggctatggcaggaggagttgaatgaagttggccccgatgcggcgagcctgagaagagtggtgtggatcttctgtagaacacggctgattctcagtattgtgtgtctgatgatcactcagcttgcggggttcagcggcccagtgtcaagcaatcaccccttccggcagagccccggggcacgacctagaccagcgctcactctcctgttctgctgcaggggatgcgctcaactgtgggcccgctag

SEQ ID NO: 27574 - DNA, 444 bp, Artificial Sequence
  derived and/or modified sequence
atgaaggatattgatattggtaaagagtatattattccctcacctgggtacagaagcgtgcgggagcgcacgagtactagcggaacacacagagacagggaggactccaagttccggagaacacggcccctggaatgccaggatgcccttgaaactgcagcccgagccgagggtctctctctcgacgcttcaatgcattctcagctgcgcatcttggatgaggagcacccgaagggcaagtaccaccatgggctgtctgctcttaagccaataaggaccaccagcaagcaccagcaccctgtcgacaacgctggtctgttttcatgtatgaccttttcgtggctgtcttcactggcacgagtcgcccataagaagggggaactgtccatggaggacgtatggagtctctctaaacacgagtcatccgatgtcaactgcaggtag

SEQ ID NO: 27575 - DNA, 639 bp, Artificial Sequence
  derived and/or modified sequence
atgaaagatatcgatattggcaaagagtatattataccctctcctgggtaccgctcggtaagggagagaactagcacctcaggtacacaccgggaccgagaggattctaagtttcggcgcactagaccgctggagtgtcaggacgccctcgaaactgcagcccgagccgagggactgagcctggatgcgagtatgcattcccaactgcgcatccttgatgaggaacacccaaagggaaagtaccaccacgggctctctgctctaaaaccaatcaggactacatcgaaacaccagcatccagtggacaacgctggtctgttctcgtgtatgaccttcagttggctaagttccttagcccgcgtggcccacaagaagggagagctctctatggaagacgtgtggtcattgtctaaacacgaatcctctgatgtaaactgcaggcgcctggagaggctttggcaggaagagctgaacgaggtcgggccagatgccgcatccctccggcgtgtcgtgtggatcttctgtcgcacacggctcattctctccattgtttgcctcatgataacccagctagcaggcttttccggaccacttgcgtggtgttgtcaggaccttgacctcgggggagtgagcctgtag

SEQ ID NO: 27576 - DNA, 627 bp, Artificial Sequence
  derived and/or modified sequence
atgaaggacatcgacatcggcaaggagtacatcatccccagccctggctacagatctgtgcgggagaggaccagcaccagcggcacccaccgggaccgggaggacagcaagttccggaggacccggcccctggagtgccaggatgccctggagacagctgcccgggcagagggcctgagcctggatgcctccatgcacagccagctgcgcatcctggatgaggagcaccccaagggcaagtaccaccacggcctgagcgccctgaagcccatccgcaccaccagcaagcaccagcaccctgtggacaatgccggcctcttcagctgcatgaccttctcctggctgagcagcctggcccgggtggcccacaagaagggggagctgtccatggaggatgtgtggagcctgagcaagcatgagagcagtgatgtgaactgccggcggctggagcggctgtggcaggaggagctgaatgaggtgggcccagatgctgccagcctgcggcgggtggtgtggatcttctgcaggaccaggctcatcctgagcatcgtgtgcctgatgatcacccagctggccggcttcagcggccccaacttccaggacggctgcatcctgcggtctgagtag

SEQ ID NO: 27577 - DNA, 678 bp, Artificial Sequence
  derived and/or modified sequence
atgaaggacatcgacatcggcaaggagtacatcatccccagccctggctacagatctgtgcgggagaggaccagcaccagcggcacccaccgggaccgggaggacagcaagttccggaggacccggcccctggagtgccaggatgccctggagacagctgcccgggcagagggcctgagcctggatgcctccatgcacagccagctgcgcatcctggatgaggagcaccccaagggcaagtaccaccacggcctgagcgccctgaagcccatccgcaccaccagcaagcaccagcaccctgtggacaatgccggcctcttcagctgcatgaccttctcctggctgagcagcctggcccgggtggcccacaagaagggggagctgtccatggaggatgtgtggagcctgagcaagcatgagagcagtgatgtgaactgccggcggctggagcggctgtggcaggaggagctgaatgaggtgggcccagatgctgccagcctgcggcgggtggtgtggatcttctgcaggaccaggctcatcctgagcatcgtgtgcctgatgatcacccagctggccggcttcagcggccccccatcctttggagactgcagcatctctgctgaggtgtgtggcaaccggctgcactgcacagccatcctgctgagctgcttcacctag

SEQ ID NO: 27578 - DNA, 696 bp, Artificial Sequence
  derived and/or modified sequence
atgaaggacatcgacatcggcaaggagtacatcatccccagccctggctacagatctgtgcgggagaggaccagcaccagcggcacccaccgggaccgggaggacagcaagttccggaggacccggcccctggagtgccaggatgccctggagacagctgcccgggcagagggcctgagcctggatgcctccatgcacagccagctgcgcatcctggatgaggagcaccccaagggcaagtaccaccacggcctgagcgccctgaagcccatccgcaccaccagcaagcaccagcaccctgtggacaatgccggcctcttcagctgcatgaccttctcctggctgagcagcctggcccgggtggcccacaagaagggggagctgtccatggaggatgtgtggagcctgagcaagcatgagagcagtgatgtgaactgccggcggctggagcggctgtggcaggaggagctgaatgaggtgggcccagatgctgccagcctgcggcgggtggtgtggatcttctgcaggaccaggctcatcctgagcatcgtgtgcctgatgatcacccagctggccggcttcagcggccctgtgagcagcaaccaccccttccggcagagccctggggcccggcccaggcctgccctgaccctgctcttctgctgccggggctgtgcccagctgtgggccaggtag

SEQ ID NO: 27579 - DNA, 444 bp, Artificial Sequence
  derived and/or modified sequence
atgaaggacatcgacatcggcaaggagtacatcatccccagccctggctacagatctgtgcgggagaggaccagcaccagcggcacccaccgggaccgggaggacagcaagttccggaggacccggcccctggagtgccaggatgccctggagacagctgcccgggcagagggcctgagcctggatgcctccatgcacagccagctgcgcatcctggatgaggagcaccccaagggcaagtaccaccacggcctgagcgccctgaagcccatccgcaccaccagcaagcaccagcaccctgtggacaatgccggcctcttcagctgcatgaccttctcctggctgagcagcctggcccgggtggcccacaagaagggggagctgtccatggaggatgtgtggagcctgagcaagcatgagagcagtgatgtgaactgcaggtag

SEQ ID NO: 27580 - DNA, 639 bp, Artificial Sequence
  derived and/or modified sequence
atgaaggacatcgacatcggcaaggagtacatcatccccagccctggctacagatctgtgcgggagaggaccagcaccagcggcacccaccgggaccgggaggacagcaagttccggaggacccggcccctggagtgccaggatgccctggagacagctgcccgggcagagggcctgagcctggatgcctccatgcacagccagctgcgcatcctggatgaggagcaccccaagggcaagtaccaccacggcctgagcgccctgaagcccatccgcaccaccagcaagcaccagcaccctgtggacaatgccggcctcttcagctgcatgaccttctcctggctgagcagcctggcccgggtggcccacaagaagggggagctgtccatggaggatgtgtggagcctgagcaagcatgagagcagtgatgtgaactgccggcggctggagcggctgtggcaggaggagctgaatgaggtgggcccagatgctgccagcctgcggcgggtggtgtggatcttctgcaggaccaggctcatcctgagcatcgtgtgcctgatgatcacccagctggccggcttcagcggccccctggcctggtgctgccaggacctggacctgggcggcgtgtccctgtag

SEQ ID NO: 27581 - DNA, 627 bp, Artificial Sequence
  derived and/or modified sequence
atgaaggacatcgacatcggcaaggagtacatcatccccagccccggctacaggagcgttagagagcgaacctctacgagtggcacccatcgcgaccgcgaagattccaagtttcggcggacacggcccctcgaatgtcaggacgctctggaaaccgcagctcgggccgagggcttgagtttggacgcctcaatgcatagccagctgagaatcttagatgaggaacatcccaaaggcaaataccaccacggtttaagcgccctcaagccaatcaggacaacgtctaaacaccagcacccagttgacaacgccggcctcttctcttgtatgactttcagttggctgagctccctcgcccgtgttgcacataagaaaggtgaactgtctatggaggacgtgtggtccctatcgaaacacgaaagttcagatgtaaactgccgcaggctggagcggctctggcaggaagagcttaatgaggtcgggcccgacgccgccagcttaaggagagtcgtttggattttttgcaggacaaggcttattttatcaattgtgtgtcttatgataactcagctggcaggattctccggccctaatttccaagacggatgtatcctccgctccgagtag

SEQ ID NO: 27582 - DNA, 678 bp, Artificial Sequence
  derived and/or modified sequence
atgaaggacatcgacatcggcaaggagtacatcatccccagccccggatataggtctgtgcgcgagcgaacatcgacgtccggaacacacagagatagggaagattccaagtttagacggacaagaccactcgagtgtcaggatgctttggagacagccgctcgggctgaaggcctgagcctggacgcgtctatgcatagccagctgaggatcctggacgaggaacatcccaagggcaaatatcatcatgggttgtctgccttgaagcccattaggaccacatcaaagcaccagcacccagttgacaacgccggtctcttcagctgcatgaccttcagctggcttagctctctggcccgggtagctcataaaaaaggagaactgtcaatggaggacgtttggagtctgagcaaacacgaaagcagcgatgtcaactgtagacggttggaacgattgtggcaagaagagcttaatgaggtgggacctgacgccgcatctctgaggcgcgtcgtctggattttctgtagaacccgactgattttatctatcgtctgcctgatgataacacagctcgccgggttctccggtcctccatcattcggtgactgctccattagcgccgaagtatgcggcaaccggttgcattgtacagctatccttctctcttgtttcacctag

SEQ ID NO: 27583 - DNA, 696 bp, Artificial Sequence
  derived and/or modified sequence
atgaaggacatcgacatcggcaaggagtacatcatccccagccccgggtatcgcagcgtgcgcgaacgaacttcaactagcggcacacaccgtgaccgggaggacagcaagtttcgtagaactcggccactcgaatgccaggacgctctggaaacagccgcccgtgccgagggactttccctggacgcgtctatgcattcccaactgcgaattctcgatgaggagcatcctaagggaaagtaccaccacggcctgagcgccttaaagcctatccggaccacctccaaacaccagcaccccgtcgacaatgcgggattgttttcttgtatgacttttagttggctgagctctctggcaagagtggcacacaagaagggtgaactctctatggaagatgtctggtctctctcaaaacatgagagtagtgacgtcaattgtcgccgcttggagagattgtggcaggaggagctgaatgaagtggggcccgacgccgcctcactgcgcagagtggtgtggattttctgccgaacaagactgatactgagtatagtgtgcttgatgattacccagctcgcaggtttttcaggcccagtcagtagtaaccacccgttccgacagtcgccgggagcccgcccacgaccggcacttacccttctgttttgttgcagagggtgcgcccagctgtgggctagatag

SEQ ID NO: 27584 - DNA, 444 bp, Artificial Sequence
  derived and/or modified sequence
atgaaggacatcgacatcggcaaggagtacatcatccccagccccggttaccgcagtgttagggagcgcacttccacctctggcacccatcgcgaccgagaagacagtaaatttagacgtacgcggccactggagtgccaagatgccctcgagactgccgccagggcggaggggttgagcctcgatgcctcaatgcatagtcagctccgtattttggacgaggagcatcccaaaggaaagtaccaccacggacttagcgctctgaagcccattcggaccacctccaagcaccagcacccggtggataacgccggtttgttcagttgcatgacctttagttggctcagttctttagcacgcgtggctcataaaaaaggagagttgtctatggaggatgtctggtctttgagcaaacatgaatccagcgatgtcaactgtaggtag

SEQ ID NO: 27585 - DNA, 639 bp, Artificial Sequence
  derived and/or modified sequence
atgaaggacatcgacatcggcaaggagtacatcatccccagccccgggtacagaagcgttcgagagcggacctccactagcggtacacatcgagatcgcgaagacagtaaatttcgccgcacacgtcctctcgaatgtcaagacgctctcgagacagccgctcgtgccgaaggcctgtcactggacgcgagcatgcattcccagctaaggattctggatgaagaacaccccaagggtaagtaccatcacgggttgtctgcactgaaacccattagaacaacatcaaaacaccagcatccggtggataatgcagggctgttttcatgcatgacattttcatggctctcttctctcgcacgcgtggcgcacaaaaagggcgagttgtctatggaggatgtgtggtccctcagcaaacatgaatcttctgacgtcaattgtcgtcgcctggaaaggttatggcaggaagaactgaacgaggttggccccgacgctgcaagcctccgtagagtggtgtggattttttgtcgtactcgcctgatattgagtatcgtgtgcctgatgattacccagctagccggatttagcgggcccctggcatggtgttgtcaggacctggatctgggcggagtgtcactttag

SEQ ID NO: 27586 - DNA, 627 bp, Artificial Sequence
  derived and/or modified sequence
atgaaggatatagatatagggaaggaatacattatcccctcccccggttacagaagcgtgcgcgagcgtaccagcacatctggcactcacagggatcgggaagactctaaattccgcaggactcggcctctggaatgccaagatgcgctggagacagccgctagggcggaggggctgtccctggatgccagtatgcattcccaactgcgcattctggacgaagaacaccctaaagggaagtatcaccacggtttgagtgcccttaagcccatcagaacgacaagcaagcatcaacatcctgtggacaacgctggactcttttcctgcatgacattcagttggctgagcagtttggccagagtggcacacaagaagggcgaactcagtatggaggacgtttggtcattatctaaacacgagagcagtgacgtgaactgcagaagacttgagcgcctttggcaggaggagctcaacgaagtgggacccgacgcagcatcactccgccgagtggtatggatattctgcagaactcggttaatcctttccatcgtgtgcttgatgatcacacaactggcaggcttttcaggacccaactttcaggacggatgcatactgcgaagcgagtag

SEQ ID NO: 27587 - DNA, 678 bp, Artificial Sequence
  derived and/or modified sequence
atgaaagatatcgacatcggaaaggaatacataatccctagcccaggctatcggtccgtgagggaaagaacaagtacttctggcacccaccgcgatcgagaagactccaagtttcgcaggacacggcctctggaatgtcaggacgcccttgaaacggcagctcgggcagaagggctgagcctcgacgcctcaatgcattcccagctgcgcatactcgacgaggaacatccaaaggggaaatatcaccacggtctgtctgcactcaaaccaataaggactacatcaaaacaccagcatcccgtggataatgccggattattttcatgtatgacctttagctggctgtctagccttgcccgtgttgcgcacaaaaagggagaactgagcatggaggacgtctggtccctgtccaagcatgagtcctcggatgtcaattgtcgcaggcttgaacgtctgtggcaagaggagctgaacgaggttggtccagatgccgcttccttacgcagggtggtgtggattttttgtaggactcggctcattctttccattgtgtgcctgatgattacccagctggctgggttcagtggcccacccagtttcggggactgtagcatctctgccgaagtgtgcggaaatcgcctccactgcaccgccatcctgttgtcctgtttcacctag

SEQ ID NO: 27588 - DNA, 696 bp, Artificial Sequence
  derived and/or modified sequence
atgaaggacatcgacatcggcaaagagtacatcataccatcccctgggtacagaagtgtgcgggagaggaccagtaccagcggcacccaccgggatagggaagactctaagttccgcaggacacgtcctctggagtgccaagatgcactagagactgcggctagagccgaagggctgagcttagacgcttccatgcacagccaattacgcattttagatgaggaacatcctaaaggcaaatatcaccacggtctgtccgctttgaaaccaataagaaccacctccaagcaccagcaccccgttgataacgctggcctgtttagctgtatgacatttagctggctgagctcactcgcaagggtcgctcacaagaagggcgagttatctatggaagatgtttggtctctcagtaagcatgaaagttctgatgtgaattgccgcaggttggagcgcttgtggcaggaggaactgaatgaggtggggcctgatgcagcaagtctgcgcagagtcgtctggatattttgtaggactagactgatcctgtccatcgtgtgcctcatgattacccagctggctggcttctcagggccagtgagtagcaatcaccccttccgtcagtcacctggcgctcgaccccgtccagccttgacactgttgttttgctgcaggggctgcgcccagctatgggccaggtag

SEQ ID NO: 27589 - DNA, 444 bp, Artificial Sequence
  derived and/or modified sequence
atgaaagacatcgacatcgggaaagaatacatcataccttccccaggctacaggtctgtgcgcgagaggaccagcacatctggaactcaccgcgacagagaagactcaaaattcaggcgcacacggccacttgagtgtcaagatgctctcgaaaccgcagcgagggccgagggtttaagcctggacgcaagcatgcattctcaacttcgaattctagatgaggaacatcctaagggcaagtaccaccatggcctctccgccctgaagcctatcaggaccaccagcaagcatcagcacccagttgacaatgctggcctattttcgtgcatgactttttcctggctttcttctctcgccagagtggcccataagaaaggggaattaagtatggaggacgtctggagtctgagtaagcacgagagctctgatgtcaactgccgttag

SEQ ID NO: 27590 - DNA, 639 bp, Artificial Sequence
  derived and/or modified sequence
atgaaagatatcgacatcggtaaggaatatataataccctcccccggatataggtcagtgagggaaagaacgagcacctccggcacccatagagatagggaggatagcaagtttcggaggacacgaccattagaatgtcaagacgctctcgaaacagctgcacgagcggagggtctctctctggatgctagtatgcattcccagctgagaatcttggatgaagaacaccctaagggaaaataccatcacggtctaagcgcactgaaacccattcgaacaacttcaaagcatcagcatcccgtggacaatgctggtcttttttcatgcatgacgttcagctggctatccagcctggctcgtgtggcacacaagaagggagagctgtccatggaggacgtttggagcctatctaagcacgagagctctgacgtgaattgcagacgtttggaacgcctgtggcaggaggagctaaatgaggtgggaccagacgctgcttcactccgccgagtcgtctggatcttctgcagaacaaggctcatcttaagcatagtctgcctaatgatcacgcagctggccggattctctggcccactagcctggtgctgtcaggatttggacctcggcggtgtgtctctgtag

SEQ ID NO: 27591 - DNA, 1923 bp, Artificial Sequence
  derived and/or modified sequence
ggctcatgctcgggagcgtggttgagcggctggcgcggttgtcctggagcaggggcgcaggaattctgatgtgaaactaacagtctgtgagccctggaacctccactcagagaagatgaaggatatcgacataggaaaagagtatatcatccccagtcctgggtatagaagtgtgagggagagaaccagcacttctgggacgcacagagaccgtgaagattccaagttcaggagaactcgaccgttggaatgccaagatgccttggaaacagcagcccgagccgagggcctctctcttgatgcctccatgcattctcagctcagaatcctggatgaggagcatcccaagggaaagtaccatcatggcttgagtgctctgaagcccatccggactacttccaaacaccagcacccagtggacaatgctgggcttttttcctgtatgactttttcgtggctttcttctctggcccgtgtggcccacaagaagggggagctctcaatggaagacgtgtggtctctgtccaagcacgagtcttctgacgtgaactgcagaagactagagagactgtggcaagaagagctgaatgaagttgggccagacgctgcttccctgcgaagggttgtgtggatcttctgccgcaccaggctcatcctgtccatcgtgtgcctgatgatcacgcagctggctggcttcagtggaccaaattttcaggatggctgtattctgcggtcagaatgagagagtcaagctgggcagaatctctcgccaagagttcagccttcctttggagactgctccatcagtgccgaggtgtgtgggaacaggcttcactgcaccgccatcttactgagttgcttcacgtgaggaaaagggggctttggccctgtgactcagttccacattttggattgcatactggaaaagaagccaatcttcttgctagtaaaccagcaacccggctgtatacagtggtgacccaagcaatggatataaacctaaaaatctgagggaggggagaggtggaatacagtagttcttggaatctgaagtctcctatttgatcaggttatttcctgggacttggcaaaaatctgattggtggggatctcctaggacctagtggacatctggtattaatttaatctcaggaaaaacaagaaattaacccagagagagtctgggttttggaattcagcgtagctacctccagaccgtggtgtctggcctccatttttgtctgtcattcagctctgacttacagctgcagtcacctttgctataaggcacctgggtagaagggtggatgggcttcacatcaatttttttcttcctttagggtgggggattggtttggctttcttttgttgtggttttttgttttatttttgtcaagattgatttttagatgcaaggacttgaaaagacccagaaggatgccaccagtttttccttgaggcctaggattttttattctgtcccgagcagaggtaattcctcacaacttagtgcaccagtagcaccagccattttgagcagagtacctctttggggagcttttcgttttgttttgtttttaattctctttccttagcagcaaggtcttttttcctagagaatctactccgttgcagaatcattgcaacctcaggagccctcactgattgagtgctgtcagcctgatatactactttggactctggaaacagatatgggttctattctctatttctactgtgtgtcgttaaacaaccgtcggagaccagatgacctgttagatggctagtcctgtataactcgactctgtatgtttcaatgtatgttactgcaatgcttcacctgctgtacagtgtttgtgagatgctctttgaagatggtacttttatattttttcattttcaataaaagtacattccttccca

SEQ ID NO: 27592 - DNA, 1848 bp, Artificial Sequence
  derived and/or modified sequence
ggctcatgctcgggagcgtggttgagcggctggcgcggttgtcctggagcaggggcgcaggaattctgatgtgaaactaacagtctgtgagccctggaacctccactcagagaagatgaaggatatcgacataggaaaagagtatatcatccccagtcctgggtatagaagtgtgagggagagaaccagcacttctgggacgcacagagaccgtgaagattccaagttcaggagaactcgaccgttggaatgccaagatgccttggaaacagcagcccgagccgagggcctctctcttgatgcctccatgcattctcagctcagaatcctggatgaggagcatcccaagggaaagtaccatcatggcttgagtgctctgaagcccatccggactacttccaaacaccagcacccagtggacaatgctgggcttttttcctgtatgactttttcgtggctttcttctctggcccgtgtggcccacaagaagggggagctctcaatggaagacgtgtggtctctgtccaagcacgagtcttctgacgtgaactgcagaagactagagagactgtggcaagaagagctgaatgaagttgggccagacgctgcttccctgcgaagggttgtgtggatcttctgccgcaccaggctcatcctgtccatcgtgtgcctgatgatcacgcagctggctggcttcagtggaccaccttcctttggagactgctccatcagtgccgaggtgtgtgggaacaggcttcactgcaccgccatcttactgagttgcttcacgtgaggaaaagggggctttggccctgtgactcagttccacattttggattgcatactggaaaagaagccaatcttcttgctagtaaaccagcaacccggctgtatacagtggtgacccaagcaatggatataaacctaaaaatctgagggaggggagaggtggaatacagtagttcttggaatctgaagtctcctatttgatcaggttatttcctgggacttggcaaaaatctgattggtggggatctcctaggacctagtggacatctggtattaatttaatctcaggaaaaacaagaaattaacccagagagagtctgggttttggaattcagcgtagctacctccagaccgtggtgtctggcctccatttttgtctgtcattcagctctgacttacagctgcagtcacctttgctataaggcacctgggtagaagggtggatgggcttcacatcaatttttttcttcctttagggtgggggattggtttggctttcttttgttgtggttttttgttttatttttgtcaagattgatttttagatgcaaggacttgaaaagacccagaaggatgccaccagtttttccttgaggcctaggattttttattctgtcccgagcagaggtaattcctcacaacttagtgcaccagtagcaccagccattttgagcagagtacctctttggggagcttttcgttttgttttgtttttaattctctttccttagcagcaaggtcttttttcctagagaatctactccgttgcagaatcattgcaacctcaggagccctcactgattgagtgctgtcagcctgatatactactttggactctggaaacagatatgggttctattctctatttctactgtgtgtcgttaaacaaccgtcggagaccagatgacctgttagatggctagtcctgtataactcgactctgtatgtttcaatgtatgttactgcaatgcttcacctgctgtacagtgtttgtgagatgctctttgaagatggtacttttatattttttcattttcaataaaagtacattccttccca

SEQ ID NO: 27593 - DNA, 4697 bp, Artificial Sequence
  derived and/or modified sequence
cggctggcgcggttgtcctggagcaggggcgcaggaattctgatgtgaaactaacagtctgtgagccctggaacctccactcagagaagatgaaggatatcgacataggaaaagagtatatcatccccagtcctgggtatagaagtgtgagggagagaaccagcacttctgggacgcacagagaccgtgaagattccaagttcaggagaactcgaccgttggaatgccaagatgccttggaaacagcagcccgagccgagggcctctctcttgatgcctccatgcattctcagctcagaatcctggatgaggagcatcccaagggaaagtaccatcatggcttgagtgctctgaagcccatccggactacttccaaacaccagcacccagtggacaatgctgggcttttttcctgtatgactttttcgtggctttcttctctggcccgtgtggcccacaagaagggggagctctcaatggaagacgtgtggtctctgtccaagcacgagtcttctgacgtgaactgcagaagactagagagactgtggcaagaagagctgaatgaagttgggccagacgctgcttccctgcgaagggttgtgtggatcttctgccgcaccaggctcatcctgtccatcgtgtgcctgatgatcacgcagctggctggcttcagtggaccagtaagttctaaccatcctttccgacagtctccaggggcccggccacggccagctctaacactcttattctgttgcagaggttgtgctcagctttgggctaggtagcagtcttagagatgccttcaggtctgttgaaaggggtcgatggattttggcaacagctggaaggatgaaagggcagtgttgccagagaagaaatggaactggcttgatttctgggtgggggtgaaatggaactgactccagttctgcacaggactgtgcttctcggttgtgtgttaacatgaactgacagtcggtgcaggcagatgtgtcttgcagtgctatgagtgggtgagagcacgttgtgtggcccgggctggtgagccagcaccgggaacataccaagtgcctggaggcagttatcacatgtttggcaggtctgtggcaaataagccctgagaaaactagaggactgtcgaggattttagagtctgacctggagtccgtttaagtttggcttatagtgtgactgtgtggcaagtgttggggtggcagccgtggttttccccagtctgtactgatgcagagtagacaagagagcctttgacgttcactctgtttcctgggcacctgtttcttacacctgctgtgctgccttacacttgagaccttgattaaatctattctctacacatttgccttgaggcatcggagcagtagtactgcttgtactgtgcgttttccatatgtgggtaagctggaggttcatggttttggtaagtatgtgcctaagatgcatggcaattaggtaaaactaatttgcagttttgtttttgtttttatttttttaacgtttgatgcctcttgttaaagttttgatctcttttctgaagcagagaacactacttttctggtattgggtttctatattattaataattgaccaactaacatactttatataaaagttttaagtaagaaggaccatgtaactgaaatgttgtgttatgtaatttaccaaaatggcaaacattttcatagagccagcttcccccaagaagagcttctgtcattgtttcactacagggctggtggctgctctgatctcatagaattcattcctctgggtagcaccatatgcaggctttgcgaataaagtgatcatgggctttcttgattccatttggccaatgcaagaacttcattggctcccctctaaaaaaaattccatggattgctgggatttttattttttattttttgaaaaaaatggtacctatccgtattcagcttggtggcttcacagtccctcccctgaacatccgtatattccttattctctcatttatggtgcagaacactggggtactaacctctaggaaactgttctagctgccagggaaagctaagagccctcctttaacaggaaagcagcagcatgctttttcttctctctgccgtttcagggaagagcaccttaaggccagtgttatttcatgggattctgccctagagctgagaaagtaatggactcatccataatctcttttatagatttgaaagtgtaaacaatacacacttccttttttggaactccaattctaatatgtttctttttcattggaaattgaaaaaccaggctggttttgagattagtactagcagtgagtaaacctcctgtctgtggacttaaatccttttgaggaacatttcgttttagatttttacaagttttctaatctggcacgactttcaaactagcttaatctgttcttacagaaacctgtgtaaggacagactgcccacatacgggctccccaaataaaatggcatttttatttcttgtccctgctcgggtttcaccgaaccttggtagccataatcagaacaaatgaaacacagtcaagttgttgtgttctgtttgtttttacctgccagccagctgatgctgacatttatacaccaagatgatccaaggttttggtgacgccggtggggactgccgctatatgtgcagggtgcccgggggtcatagtaatgttaatggagtaccagaatctctaacagtgtggtcctgtgtagccacattgctacacttacagagatgctttggggcctttttggattaagacagttctaaaagaccaggcctcacctatgatctgtgtataaagaattagcatcgcactgtagatctgcaagagaaggccgcctcctgcagtgctctctcttggtgaatgctaactctgctcgagggccttttggggaaaggacagtgtaaaacccttagagaggtaagtttcccacccttccaacctctctccacctgcagcttgcttggtgctgtcaggatctggatttggggggagtctctctgtagtggaaccagtgacagaagctgttctttagaattttcaggatggctgtattctgcggtcagaatgagagagtcaagctgggcagaatctctcgccaagagttcaggtaaggtaatgtttattcactgggaatgctttccacagccagacagctatgctaacagtctcaagttttcttccagtttgtttagatttaaatgatacatttgtaactttttaaaaactaaattttggttggatttttcatgaaaacctcttttttctttatcccctaaaaaatggtttgaaatgtcattgttatttaaaaacccgatgtgttggaacttctttaatctgctgtttcctctttttccccccctttgaaagtttcgcatagtgtaaacattcactatgtcttttaccttccctgctcctcccatctgggaggcgctgatgctattacccagtgctgaaaaatggcactctaaaggtatgggaaggaaggagcccaaggcaaccacctgctgtcctttcagccttcctttggagactgctccatcagtgccgaggtgtgtgggaacaggcttcactgcaccgccatcttactgagttgcttcacgtgaggaaaagggggctttggccctgtgactcagttccacattttggattgcatactggaaaagaagccaatcttcttgctagtaaaccagcaacccggctgtatacagtggtgacccaagcaatggatataaacctaaaaatctgagggaggggagaggtggaatacagtagttcttggaatctgaagtctcctatttgatcaggttatttcctgggacttggcaaaaatctgattggtggggatctcctaggacctagtggacatctggtattaatttaatctcaggaaaaacaagaaattaacccagagagagtctgggttttggaattcagcgtagctacctccagaccgtggtgtctggcctccatttttgtctgtcattcagctctgacttacagctgcagtcacctttgctataaggcacctgggtagaagggtggatgggcttcacatcaatttttttcttcctttagggtgggggattggtttggctttcttttgttgtggttttttgttttatttttgtcaagattgatttttagatgcaaggacttgaaaagacccagaaggatgccaccagtttttccttgaggcctaggattttttattctgtcccgagcagaggtaattcctcacaacttagtgcaccagtagcaccagccattttgagcagagtacctctttggggagcttttcgttttgttttgtttttaattctctttccttagcagcaaggtcttttttcctagagaatctactccgttgcagaatcattgcaacctcaggagccctcactgattgagtgctgtcagcctgatatactactttggactctggaaacagatatgggttctattctctatttctactgtgtgtcgttaaacaaccgtcggagaccagatgacctgttagatggctagtcctgtataactcgactctgtatgtttcaatgtatgttactgcaatgcttcacctgctgtacagtgtttgtgagatgctctttgaagatggtacttttatattttttcattttcaataaaagtacattccttccca

SEQ ID NO: 27594 - DNA, 591 bp, Artificial Sequence
  derived and/or modified sequence
cgggtctgagagaaacgcccacctgggaggctgtgcagcgggtggctcggggcaccctgctcaacccgcagcggagccgccagcgaccttcgaagaattctgatgtgaaactaacagtctgtgagccctggaacctccactcagagaagatgaaggatatcgacataggaaaagagtatatcatccccagtcctgggtatagaagtgtgagggagagaaccagcacttctgggacgcacagagaccgtgaagattccaagttcaggagaactcgaccgttggaatgccaagatgccttggaaacagcagcccgagccgagggcctctctcttgatgcctccatgcattctcagctcagaatcctggatgaggagcatcccaagggaaagtaccatcatggcttgagtgctctgaagcccatccggactacttccaaacaccagcacccagtggacaatgctgggcttttttcctgtatgactttttcgtggctttcttctctggcccgtgtggcccacaagaagggggagctctcaatggaagacgtgtggtctctgtccaagcacgagtcttctgacgtgaactgcagaa

SEQ ID NO: 27595 - DNA, 2000 bp, Artificial Sequence
  derived and/or modified sequence
ggctcatgctcgggagcgtggttgagcggctggcgcggttgtcctggagcaggggcgcaggaattctgatgtgaaactaacagtctgtgagccctggaacctccactcagagaagatgaaggatatcgacataggaaaagagtatatcatccccagtcctgggtatagaagtgtgagggagagaaccagcacttctgggacgcacagagaccgtgaagattccaagttcaggagaactcgaccgttggaatgccaagatgccttggaaacagcagcccgagccgagggcctctctcttgatgcctccatgcattctcagctcagaatcctggatgaggagcatcccaagggaaagtaccatcatggcttgagtgctctgaagcccatccggactacttccaaacaccagcacccagtggacaatgctgggcttttttcctgtatgactttttcgtggctttcttctctggcccgtgtggcccacaagaagggggagctctcaatggaagacgtgtggtctctgtccaagcacgagtcttctgacgtgaactgcagaagactagagagactgtggcaagaagagctgaatgaagttgggccagacgctgcttccctgcgaagggttgtgtggatcttctgccgcaccaggctcatcctgtccatcgtgtgcctgatgatcacgcagctggctggcttcagtggaccacttgcttggtgctgtcaggatctggatttggggggagtctctctgtagtggaaccagtgacagaagctgttctttagaattttcaggatggctgtattctgcggtcagaatgagagagtcaagctgggcagaatctctcgccaagagttcagccttcctttggagactgctccatcagtgccgaggtgtgtgggaacaggcttcactgcaccgccatcttactgagttgcttcacgtgaggaaaagggggctttggccctgtgactcagttccacattttggattgcatactggaaaagaagccaatcttcttgctagtaaaccagcaacccggctgtatacagtggtgacccaagcaatggatataaacctaaaaatctgagggaggggagaggtggaatacagtagttcttggaatctgaagtctcctatttgatcaggttatttcctgggacttggcaaaaatctgattggtggggatctcctaggacctagtggacatctggtattaatttaatctcaggaaaaacaagaaattaacccagagagagtctgggttttggaattcagcgtagctacctccagaccgtggtgtctggcctccatttttgtctgtcattcagctctgacttacagctgcagtcacctttgctataaggcacctgggtagaagggtggatgggcttcacatcaatttttttcttcctttagggtgggggattggtttggctttcttttgttgtggttttttgttttatttttgtcaagattgatttttagatgcaaggacttgaaaagacccagaaggatgccaccagtttttccttgaggcctaggattttttattctgtcccgagcagaggtaattcctcacaacttagtgcaccagtagcaccagccattttgagcagagtacctctttggggagcttttcgttttgttttgtttttaattctctttccttagcagcaaggtcttttttcctagagaatctactccgttgcagaatcattgcaacctcaggagccctcactgattgagtgctgtcagcctgatatactactttggactctggaaacagatatgggttctattctctatttctactgtgtgtcgttaaacaaccgtcggagaccagatgacctgttagatggctagtcctgtataactcgactctgtatgtttcaatgtatgttactgcaatgcttcacctgctgtacagtgtttgtgagatgctctttgaagatggtacttttatattttttcattttcaataaaagtacattccttccca

SEQ ID NO: 27596 - DNA, 627 bp, Artificial Sequence
  derived and/or modified sequence
atgaaggacatcgacatcggcaaggagtacatcatccccagccccggctacagaagcgtgagagagagaaccagcaccagcggcacccacagagacagagaggacagcaagttcagaagaaccagacccctggagtgccaggacgccctggagaccgccgccagagccgagggcctgagcctggacgccagcatgcacagccagctgagaatcctggacgaggagcaccccaagggcaagtaccaccacggcctgagcgccctgaagcccatcagaaccaccagcaagcaccagcaccccgtggacaacgccggcctgttcagctgcatgaccttcagctggctgagcagcctggccagagtggcccacaagaagggcgagctgagcatggaggacgtgtggagcctgagcaagcacgagagcagcgacgtgaactgcagaagactggagagactgtggcaggaggagctgaacgaggtgggccccgacgccgccagcctgagaagagtggtgtggatcttctgcagaaccagactgatcctgagcatcgtgtgcctgatgatcacccagctggccggcttcagcggccccaacttccaggacggctgcatcctgagaagcgagtag

SEQ ID NO: 27597 - DNA, 678 bp, Artificial Sequence
  derived and/or modified sequence
atgaaggacatcgacatcggcaaggagtacatcatccccagccccggctacagaagcgtgagagagagaaccagcaccagcggcacccacagagacagagaggacagcaagttcagaagaaccagacccctggagtgccaggacgccctggagaccgccgccagagccgagggcctgagcctggacgccagcatgcacagccagctgagaatcctggacgaggagcaccccaagggcaagtaccaccacggcctgagcgccctgaagcccatcagaaccaccagcaagcaccagcaccccgtggacaacgccggcctgttcagctgcatgaccttcagctggctgagcagcctggccagagtggcccacaagaagggcgagctgagcatggaggacgtgtggagcctgagcaagcacgagagcagcgacgtgaactgcagaagactggagagactgtggcaggaggagctgaacgaggtgggccccgacgccgccagcctgagaagagtggtgtggatcttctgcagaaccagactgatcctgagcatcgtgtgcctgatgatcacccagctggccggcttcagcggcccccccagcttcggcgactgcagcatcagcgccgaggtgtgcggcaacagactgcactgcaccgccatcctgctgagctgcttcacctag

SEQ ID NO: 27598 - DNA, 696 bp, Artificial Sequence
  derived and/or modified sequence
atgaaggacatcgacatcggcaaggagtacatcatccccagccccggctacagaagcgtgagagagagaaccagcaccagcggcacccacagagacagagaggacagcaagttcagaagaaccagacccctggagtgccaggacgccctggagaccgccgccagagccgagggcctgagcctggacgccagcatgcacagccagctgagaatcctggacgaggagcaccccaagggcaagtaccaccacggcctgagcgccctgaagcccatcagaaccaccagcaagcaccagcaccccgtggacaacgccggcctgttcagctgcatgaccttcagctggctgagcagcctggccagagtggcccacaagaagggcgagctgagcatggaggacgtgtggagcctgagcaagcacgagagcagcgacgtgaactgcagaagactggagagactgtggcaggaggagctgaacgaggtgggccccgacgccgccagcctgagaagagtggtgtggatcttctgcagaaccagactgatcctgagcatcgtgtgcctgatgatcacccagctggccggcttcagcggccccgtgagcagcaaccaccccttcagacagagccccggcgccagacccagacccgccctgaccctgctgttctgctgcagaggctgcgcccagctgtgggccagatag

SEQ ID NO: 27599 - DNA, 444 bp, Artificial Sequence
  derived and/or modified sequence
atgaaggacatcgacatcggcaaggagtacatcatccccagccccggctacagaagcgtgagagagagaaccagcaccagcggcacccacagagacagagaggacagcaagttcagaagaaccagacccctggagtgccaggacgccctggagaccgccgccagagccgagggcctgagcctggacgccagcatgcacagccagctgagaatcctggacgaggagcaccccaagggcaagtaccaccacggcctgagcgccctgaagcccatcagaaccaccagcaagcaccagcaccccgtggacaacgccggcctgttcagctgcatgaccttcagctggctgagcagcctggccagagtggcccacaagaagggcgagctgagcatggaggacgtgtggagcctgagcaagcacgagagcagcgacgtgaactgcagatag

SEQ ID NO: 27600 - DNA, 639 bp, Artificial Sequence
  derived and/or modified sequence
atgaaggacatcgacatcggcaaggagtacatcatccccagccccggctacagaagcgtgagagagagaaccagcaccagcggcacccacagagacagagaggacagcaagttcagaagaaccagacccctggagtgccaggacgccctggagaccgccgccagagccgagggcctgagcctggacgccagcatgcacagccagctgagaatcctggacgaggagcaccccaagggcaagtaccaccacggcctgagcgccctgaagcccatcagaaccaccagcaagcaccagcaccccgtggacaacgccggcctgttcagctgcatgaccttcagctggctgagcagcctggccagagtggcccacaagaagggcgagctgagcatggaggacgtgtggagcctgagcaagcacgagagcagcgacgtgaactgcagaagactggagagactgtggcaggaggagctgaacgaggtgggccccgacgccgccagcctgagaagagtggtgtggatcttctgcagaaccagactgatcctgagcatcgtgtgcctgatgatcacccagctggccggcttcagcggccccctggcctggtgctgccaggacctggacctgggcggcgtgagcctgtag

SEQ ID NO: 27601 - protein, 250 aa, Artificial Sequence
  derived and/or modified sequence
MEKGPVRAPAEKPRGARCSNGFPERDPPRPGPSRPAEKPPRPEAKSAQPADGWKGERPRSEEDNELNLPNLAAAYSSILSSLGENPQRQGLLKTPWRAASAMQFFTKGYQETISDVLNDAIFDEDHDEMVIVKDIDMFSMCEHHLVPFVGKVHIGYLPNKQVLGLSKLARIVEIYSRRLQVQERLTKQIAVAITEALRPAGVGVVVEATHMCMVMRGVQKMNSKTVTSTMLGVFREDPKTREEFLTLIRS

SEQ ID NO: 27602 - DNA, 750 bp, Artificial Sequence
  derived and/or modified sequence
atggaaaaaggacctgtgcgagcaccagcagagaagccgagaggtgcacgctgctcgaacggttttccagagcgtgaccctcctaggcctggtccatccagacctgcagagaagcccccaagaccagaggccaagagcgcccaaccggcagacggatggaagggcgaacggccccgttccgaagaagataacgaactgaacttgcctaaccttgctgcagcatacagctcaatactttcgtcacttggggagaatcctcagagacaaggcctcctgaaaacgccttggagagccgcgtcggctatgcagttctttaccaagggataccaagaaactatttccgatgtgctcaacgatgcaattttcgatgaggaccacgacgagatggtgatcgtgaaagacatcgatatgttttcaatgtgcgaacatcatctggtaccttttgtgggaaaagtgcatattggatacttgcccaataagcaggtgctgggcttgtcgaagctggctaggatcgtcgaaatctattcgcgcagactgcaagtgcaggaaagacttaccaagcagattgcagtggcaatcaccgaagcactgcgtccggcaggagtgggagttgttgtggaagccacgcatatgtgtatggtgatgcggggagtgcagaagatgaacagcaagaccgtgacttccaccatgctgggagtctttagggaagatccaaagacccgggaggaatttcttactctgataagaagc

SEQ ID NO: 27603 - DNA, 750 bp, Artificial Sequence
  derived and/or modified sequence
atggaaaaaggcccagtgcgggcccccgccgaaaaacctcgaggtgcaaggtgttccaacggcttccccgaaagggatcccccccgaccgggcccctcgagaccagcagagaagccgcctaggcctgaggccaaatcagcccagcctgccgatgggtggaagggggagagacctagaagtgaagaggacaacgagctgaatctacctaatctagcagccgcttattcttctatcctgagttcactgggagagaatccacagcggcagggcttgctcaagaccccgtggcgggcagcttccgccatgcaattcttcaccaagggttaccaggaaacaatctcagacgtgctgaacgatgcaatttttgacgaggaccacgacgagatggttattgtgaaggacattgacatgttttccatgtgcgagcatcacttggtgccctttgtgggaaaagttcacatcggatacttgccaaacaaacaggttctcgggttgtcaaagttggctcgaatcgtcgaaatctactcaagacggctgcaggtgcaggagcgcctgacgaagcagattgctgtggcaatcacagaggctctgcggcccgccggagtgggagtagtggtcgaagccacacatatgtgcatggtcatgaggggtgtccagaagatgaattcaaagaccgtcactagcaccatgctaggcgtcttccgcgaggatcccaaaactagggaagagttcctaaccctcattagatcc

SEQ ID NO: 27604 - DNA, 750 bp, Artificial Sequence
  derived and/or modified sequence
atggagaaaggaccggtgcgggccccagcagagaagccacgcggcgcacggtgttcgaatggcttcccggagcgcgatccgccgcggcctggcccgtcgcgcccggccgaaaaaccgccgaggcccgaagcgaaaagcgcccaaccggcggatggttggaaaggtgaaagaccgaggtcggaagaggataacgagttgaatctgccaaacctggccgccgcatactccagcattctgtcctcactgggagaaaatccacagcgccaggggctcttgaaaactccttggagggccgcatccgctatgcagttcttcaccaagggataccaagaaactatcagcgatgtgttgaacgacgccattttcgatgaggaccacgacgaaatggtgatcgtgaaggatatcgacatgttctctatgtgcgaacatcacttggtgccttttgtgggaaaagtccacatcggctaccttccgaataagcaagtgctcggtctgtcgaaactggcgagaatcgtggaaatctactcgcgtagactccaggtccaggaacgcttgaccaagcagatcgccgtggcaatcaccgaggctttgcgcccggcgggagtgggagtggtcgtggaagcaacccatatgtgcatggtcatgcgcggagtgcagaagatgaacagcaagactgtcaccagcactatgctcggtgtgttcagggaagatcctaaaactcgcgaagagtttcttactctgatccgctcc

SEQ ID NO: 27605 - DNA, 750 bp, Artificial Sequence
  derived and/or modified sequence
atggagaagggccccgtccgagcacctgccgagaagcctcgcggagcccgatgctccaatggcttccccgagcgcgacccaccccgacctggaccttctcgaccagccgaaaagccacctaggccagaagcgaagtccgctcaaccagccgatggttggaagggagagcgcccacgaagtgaggaggacaatgagctgaatcttcccaacctggccgccgcttactcctcaatcctctcaagcctgggagagaacccgcaaagacaggggttactgaaaactccttggcgggcggcttccgccatgcagtttttcacaaaagggtatcaggagactatttccgatgttctgaacgacgcaatatttgatgaggaccatgatgaaatggttatagtgaaggacatcgatatgttcagcatgtgcgagcaccatctcgtgccattcgtgggcaaagtgcacattggatatttgcccaacaaacaggtgctgggactatccaagcttgcccggatcgtggagatttactcacgtaggcttcaggtacaggagaggctgactaaacagattgcagtagcgattacggaggctttgaggcctgctggagtgggagttgtggtagaggccacccatatgtgcatggtgatgagaggcgtccaaaaaatgaatagcaaaaccgtgacctctaccatgttgggcgtgttccgtgaggaccctaaaacccgcgaggaattcctgaccttgatccggagc

SEQ ID NO: 27606 - DNA, 750 bp, Artificial Sequence
  derived and/or modified sequence
atggaaaaggggccagtgcgggcgccagcggagaagcctcggggcgcacgatgctcgaatggattccccgagagagaccctcctcgacccggcccaagcagaccagcagagaaaccccccaggcccgaagctaagtctgcccagcccgccgatggctggaaaggcgaacggccgcggtctgaagaagacaacgagctcaatttgcctaacctcgcagctgcctatagctcaatcctttcatcactaggggagaatcctcagcgccagggactgctcaagactccatggcgagcagccagtgccatgcagttctttaccaagggctaccaggaaaccatctcagatgtcctaaacgatgccatttttgacgaagatcatgacgagatggtaatcgttaaggatattgacatgttctcaatgtgtgagcaccacctcgtgccattcgtcgggaaggtgcacattgggtatctgccaaacaagcaggtactgggcctctctaagctggcgcggattgttgagatttacagcaggcgtctccaggtgcaggaacgccttacaaaacagatcgccgtggccatcaccgaggctttgcggcccgccggcgtcggagtggttgtggaagccacgcatatgtgcatggttatgaggggagtccagaagatgaactctaagacagtgacctccactatgctcggtgtcttcagggaggatcctaagacgcgcgaagagtttctgacccttatccgcagc

SEQ ID NO: 27607 - DNA, 750 bp, Artificial Sequence
  derived and/or modified sequence
atggagaaaggcccagttcgcgccccagccgaaaagccgaggggtgccagatgtagcaatggcttcccggagcgtgacccgcccaggcctgggccgtcaagaccggccgagaaaccacctcgtcctgaggccaagtcggctcagccagctgacggctggaaaggggagagaccgaggtcggaggaggataacgagctgaatctgcccaacctggccgcagcgtatagctctattctatcctccctgggggaaaacccccagaggcagggactccttaagacaccatggcgtgccgcttctgcaatgcaattttttaccaagggctaccaggagacaatttcggatgttttaaacgacgcgatatttgacgaggaccacgatgagatggtgatcgtcaaggacattgacatgttctccatgtgtgagcaccaccttgtccccttcgtgggtaaggtgcatataggatatctcccaaacaagcaggtgctcgggttatcaaaactggccaggatagtggaaatttattcccggcgcctgcaagtccaagaaagactgaccaagcaaatcgccgtcgccataaccgaagcgctaagaccagccggggtcggtgttgtcgtggaggctacgcacatgtgtatggtcatgcgtggagtccagaaaatgaacagtaagaccgtgaccagtaccatgctcggggtgtttcgcgaggaccctaaaacacgcgaggaattcttgaccttgattagatca

SEQ ID NO: 27608 - DNA, 750 bp, Artificial Sequence
  derived and/or modified sequence
atggaaaaaggccccgtgagggcacctgccgaaaagcccaggggagccagatgtagcaacgggttccctgagagggatccacctaggcctggtccttccagaccggctgagaagccacctagaccagaagcgaagtccgcacaacccgcggatggatggaagggagaaagaccaaggtcagaagaggataatgaacttaaccttcccaatcttgcagccgcttacagctcgatcctgtcatccctgggagagaaccctcaacggcagggtctgctcaagactccttggagagcagcatccgcgatgcagttcttcaccaagggctaccaggaaacgatatcggatgtgcttaacgatgcgatttttgacgaagatcacgatgaaatggtgatcgtcaaagatattgatatgttttccatgtgcgaacaccatctcgtgccttttgtgggaaaggtccacattggctaccttccaaacaagcaagtgctggggttgtccaagctcgcccggattgtggagatttactccagacgtctccaggtgcaggagcggctgactaagcagatcgccgtggcaattaccgaagcacttagaccagctggcgtgggagtcgtcgtggaagcaactcatatgtgtatggtgatgcggggagtccagaaaatgaacagcaagactgtgaccagcaccatgcttggtgtgttccgtgaggacccaaagacccgtgaggaatttcttactctgatccgctcc

SEQ ID NO: 27609 - DNA, 750 bp, Artificial Sequence
  derived and/or modified sequence
atggagaaaggtcctgtgcgggcccccgctgagaaacctagaggggcccggtgcagcaacgggtttcctgaacgggacccaccaaggcccgggccaagtaggcccgccgagaaaccgcctaggccggaggctaagtctgcacagcccgccgacggttggaagggagagaggcccagatccgaggaagataatgaactcaacctcccaaatctggccgctgcctacagctcaattctgagcagtctgggcgagaacccgcaaaggcagggactgctgaagacaccctggcgcgcagcatccgcaatgcagttttttaccaagggttaccaggagaccatttcagacgtgttgaatgacgcaattttcgatgaggaccacgacgagatggtaatcgtcaaagacattgacatgttctctatgtgcgagcaccatctcgtgccgttcgtcggaaaggtgcacatcggctacctccccaacaagcaggttttgggcctttccaaacttgcccgcattgttgagatctactctcgccggctccaagtccaagagagattgacaaagcagattgccgtcgccatcactgaggcccttaggcccgccggggtgggggtggtggtggaggctactcacatgtgcatggtgatgaggggggtccaaaagatgaactccaagaccgtaacttccactatgctcggcgtcttccgcgaggacccgaaaacccgggaggagttcctcaccctcatccgcagt

SEQ ID NO: 27610 - DNA, 750 bp, Artificial Sequence
  derived and/or modified sequence
atggaaaagggtccagtcagagcacccgctgagaagccccgcggagccagatgtagcaacggttttccagagcgagaccctccaagacccggtcccagccggcccgccgagaaacctcctcgcccagaggctaagtcggctcagcccgcagacggttggaagggcgaaagaccaagatcagaggaggataatgagctgaatctgccgaaccttgccgccgcttatagttcaattctgtcctccttgggcgagaatccacagcgtcagggcctgctcaagaccccatggagagccgcaagcgcgatgcaattttttactaaaggctaccaggaaactatttcagatgtcctgaatgacgccatattcgatgaagatcatgacgaaatggttatagttaaggacatcgatatgttcagtatgtgcgagcaccatttagtgccctttgtgggcaaagtccatatcggttacctccccaataagcaggtgctcgggctgtccaagctggcacggatcgtcgagatatacagccgcagactccaggtgcaggagagactgaccaagcagattgcagtggcaatcaccgaagccttacggcctgccggagtgggagtggtggtcgaagctacacacatgtgtatggtcatgcgtggagtgcagaagatgaattcgaaaaccgtcacatcaacaatgctgggagtgttccgtgaggaccccaaaactcgagaagagttcctcacactgattcgaagc

SEQ ID NO: 27611 - DNA, 750 bp, Artificial Sequence
  derived and/or modified sequence
atggagaagggccccgtgagggcccccgcggaaaagcctcgcggtgcgcgctgttccaacggattcccagagagagacccccctcgtccgggcccgtcccgcccggctgaaaagccaccacgccctgaggccaagagcgcgcagcccgcggacggctggaagggtgaaaggcctcgcagcgaagaggacaatgaactgaatcttccaaatttggcggccgcctactctagcatcctgagcagcctgggtgaaaatccacagcgccaaggtctgcttaagaccccatggcgcgcagcaagcgccatgcaattcttcaccaagggctatcaggagactattagtgatgtcctgaacgacgcaatctttgacgaggaccatgatgagatggttatcgtgaaagatatcgatatgttttctatgtgcgaacatcacctggtcccatttgtgggtaaagtgcacattggctatctgcctaataagcaagttctaggcttgtcaaaactggcccgcatcgtagagatttactcccgacgtctgcaggtacaggagcgtctgaccaagcagatcgcggtggctatcaccgaggccctgcgcccagcaggagtgggcgttgtcgtggaggctactcacatgtgtatggtgatgcgtggcgttcagaagatgaatagcaaaacagtcacgagcactatgctgggtgtcttccgggaagatccaaagacgcgggaggagtttctcaccttaatccgcagt

SEQ ID NO: 27612 - DNA, 750 bp, Artificial Sequence
  derived and/or modified sequence
atggagaaaggccccgtccgcgctcctgctgaaaaaccacggggtgccaggtgcagtaatggtttccctgaacgggatccccccaggcctggcccatctcgtcccgcagagaaaccccccaggcctgaggctaaatccgcacagccggccgatggttggaagggcgagagacctcgtagcgaggaagacaacgaattaaacctgcccaatttggccgcagcttactccagcatcttgtcgagtctcggggaaaatccgcagcgacaagggttgctaaaaactccctggagggctgccagtgccatgcagttttttaccaaaggataccaggagaccatctcagatgtgcttaatgatgccatatttgatgaagatcatgacgagatggtcatcgtcaaggatatagatatgttcagcatgtgtgaacatcaccttgtgccctttgtaggcaaggttcatattggctatttacccaacaagcaggtactgggtttatctaagctggcccgtatagtcgagatatactcacggaggctccaggtccaggagagattgactaaacagattgcagtcgctatcacggaggcgctgcggcctgctggcgttggagtcgtggtggaggcaacacacatgtgcatggtgatgcggggtgtccagaaaatgaactcaaaaaccgtgactagcacaatgctgggagtttttcgggaggatccaaaaacccgcgaagagttcctgacactaattcggtca

SEQ ID NO: 27613 - DNA, 750 bp, Artificial Sequence
  derived and/or modified sequence
atggagaaggggcccgtcagggccccggctgaaaagccccggggagctagatgttcaaatggttttccagagagggatccacctagaccaggacctagcagacccgcggaaaaaccaccgagaccggaagccaaaagtgctcagcctgctgacggttggaagggggagagaccgaggagcgaagaagataatgaactcaacctgcctaatctggctgctgcttatagttccattctgagctctttaggggaaaatccccaaagacagggactcctgaagactccttggcgcgccgcttcggcaatgcaattctttaccaaaggttatcaagagaccatatccgacgtgctcaatgacgccattttcgatgaggatcatgatgaaatggttatcgtcaaggacatcgatatgttttccatgtgcgagcaccacttggtgccttttgtcgggaaggttcacattggatatctgccaaataaacaggtcctggggctgtcaaaattagcccgaattgtggagatatatagcagacgcctgcaggtgcaggaacgcctaacaaaacagatcgcggtagcgatcaccgaggccctgcggcctgccggcgtgggcgttgtagtagaggccactcacatgtgcatggttatgcggggggtgcagaaaatgaactctaagacagtgaccagtacaatgctcggagtatttagagaggatccaaaaacccgcgaggaattcctcacactcatccgatcc

SEQ ID NO: 27614 - DNA, 750 bp, Artificial Sequence
  derived and/or modified sequence
atggagaaagggccggtgagggctcctgccgaaaagccgcggggagcccgctgctcgaatggcttcccggaacgggacccgccgcggccggggccaagccggccggccgaaaaacccccacgcccagaagcgaaatccgctcagccggcggacggatggaaaggagaaagacctcgatcggaagaggataatgaacttaacctccctaacttggccgcggcatacagctcgatcctctcgagcctgggagaaaaccctcagcgccaaggacttctgaaaacgccatggcgggcggcgtcagcgatgcagtttttcactaagggataccaagagactatttccgacgtcctgaacgatgcgattttcgacgaggatcacgatgagatggtcatcgtgaaggacatcgacatgttctcgatgtgcgaacatcacctggtcccgttcgtggggaaggtccatatcggataccttccgaacaagcaagtcctcggactgtcgaagctggcacggattgtcgagatttactcgcggcggctgcaggtgcaggagcgcctgaccaaacaaatcgcagtcgccatcactgaagccctgcgacctgctggcgtgggcgtcgtggtggaagcaacccacatgtgtatggtgatgcggggagtgcagaaaatgaactcaaaaactgtcacttcaacgatgctcggcgtctttagagaagatccaaagactcgcgaagaattcctcactctcatccgctca

SEQ ID NO: 27615 - DNA, 750 bp, Artificial Sequence
  derived and/or modified sequence
atggaaaaggggccagttagggcaccagcagagaaaccaaggggtgcccgatgttctaacggattccctgagcgggacccgcccaggccagggccgtcccggcccgctgaaaaaccccccagacccgaggcaaagagcgcacagcccgcggacggctggaagggcgaaagaccccgatctgaggaggacaacgagcttaatcttccaaacttggccgcagcttacagctccattctcagtagcctgggggagaacccccaacgtcagggtctccttaagactccgtggagggccgcctctgccatgcaatttttcacaaaagggtatcaggagacaatttctgacgtgctgaatgacgctatcttcgacgaagatcacgatgagatggtgatcgttaaggacatcgacatgttttccatgtgtgagcatcatctcgtcccgttcgtgggcaaagtgcatatcgggtatctgcctaacaagcaagtcctgggactttcaaagttggcccgaatagtcgagatatattcaaggcgattgcaggtgcaggaacgcctgaccaagcagattgcggtagcaatcacggaggccctcagacctgcaggagtgggcgttgtggtggaagcaacccatatgtgcatggtgatgcggggcgtgcagaagatgaactcaaagactgtgaccagcacaatgcttggagtgttcagggaagacccaaagaccagagaggaatttttaaccttaatccggagt

SEQ ID NO: 27616 - DNA, 750 bp, Artificial Sequence
  derived and/or modified sequence
atggagaaaggaccggtgagagctcccgcagagaagcctcggggcgcccggtgtagcaatgggtttccagaaagggacccaccgcgccccgggccgtcacggccagctgagaagcccccccggcccgaagctaagtcagcacagccagcagacgggtggaagggcgaacgcccacgcagtgaggaggacaatgagctgaacctgccaaatttagctgccgcttacagttctatcttgtctagcctgggggagaacccacagcggcagggtttgctgaagacgccttggcgggcggcatccgccatgcagttctttaccaagggctatcaggagacaatatccgatgtgctgaacgacgccatattcgatgaggaccatgacgagatggttattgtcaaagacatagatatgttctcaatgtgcgagcaccatctagtgccgtttgtgggaaaggttcacatcggatatctgccgaacaagcaagtcctcgggctgagcaaactggcacgtattgtcgagatatatagccgtcgcctccaggtgcaggaacggctaacaaaacagatcgcagtcgccataacagaagctcttaggcctgcgggagttggcgttgtggttgaggctactcacatgtgtatggtaatgcggggggtccaaaaaatgaacagtaagacagtgaccagcaccatgctgggagtgttccgcgaggaccctaaaacacgcgaggaatttctgactctgatacgatct

SEQ ID NO: 27617 - DNA, 750 bp, Artificial Sequence
  derived and/or modified sequence
atggagaagggccctgtccgggctcctgccgagaaaccccgaggggctcgttgctccaacggcttcccggagagggatccaccccgacctggcccttcacggccagctgagaagccgcctcggccagaggcgaagtctgcccagcccgcagacggatggaagggtgaaagacctagaagcgaagaggacaatgaactcaacctcccaaaccttgcagcggcttacagctcaatacttagcagcctgggcgagaatccgcagaggcaaggcctcctcaaaacgccttggcgagcggcaagcgcgatgcagttcttcaccaaggggtatcaagaaaccatatctgacgtgctgaacgacgcgatttttgacgaagaccacgatgaaatggtcatcgtaaaggacattgacatgttctctatgtgcgagcaccacctggtaccctttgttggcaaggtccatatcgggtatctgcccaacaagcaggtactgggcctgagcaagctcgcccgaattgtcgaaatctatagtcgtagattacaagtgcaggaaaggttgacaaagcagattgccgtggctatcactgaggccctgcggcccgctggagtaggtgtggtggttgaggcgacccatatgtgtatggtcatgcgcggagtccagaaaatgaattctaaaacagtgacgtccaccatgctgggggtgttcagagaggatcccaaaacacgtgaagagtttcttaccctaattaggtct

SEQ ID NO: 27618 - DNA, 750 bp, Artificial Sequence
  derived and/or modified sequence
atggaaaagggaccagtgagggctcccgctgagaaacctaggggggccaggtgttctaacggctttcctgagagggacccgccacgccctggccctagcagacccgcggaaaagccacctcgtccagaagccaagtctgcccaacctgccgacggatggaaaggggagagaccaaggtccgaggaggacaatgaactcaatctcccaaatctggccgcagcctacagttccatactgtccagccttggggaaaaccctcagaggcaaggattgctgaaaactccgtggagagcggcttccgccatgcagttcttcacgaagggttaccaggaaactatttctgacgtcttaaacgatgccatcttcgatgaagaccacgatgaaatggtcatcgtaaaagacatcgatatgtttagcatgtgtgagcaccatctggtcccattcgtcgggaaggtgcacattggttatttgcccaacaagcaggtactcggcctgtcaaagctagcaaggattgtggagatctactcgcggagactccaggtgcaggagaggcttaccaagcagatagccgttgccatcaccgaggctctgcgacctgccggagtaggcgttgtggtagaggcaacacacatgtgcatggtgatgcggggagtgcagaagatgaattccaagaccgtaacgtccactatgctgggcgtattcagagaggaccccaagacacgcgaagagtttcttactctcattagaagc

SEQ ID NO: 27619 - DNA, 750 bp, Artificial Sequence
  derived and/or modified sequence
atggaaaagggtccggttagagcgccggctgaaaagccacgtggtgctagatgcagcaatggttttccggagcgtgatcctccgcgaccgggtccctcacgcccagccgaaaaaccaccgagacctgaggcgaaatcagcacaaccggcggatggttggaaaggcgaaagaccgcggagtgaagaagataatgaactgaatctccctaacttagccgcagcatatagcagtatcttgtctagcttaggtgaaaacccgcaaagacagggcctattgaaaacaccgtggcgcgctgcgagcgccatgcagttttttacgaaaggataccaggagacaatatctgatgtactgaacgacgcgatcttcgatgaggatcatgacgaaatggttatagtgaaagatattgatatgttctcgatgtgtgagcatcatcttgtgccgttcgttggcaaggtgcatataggctacctgccgaataaacaagtactgggtctaagcaaactggcccggatagtagaaatctacagtagacggcttcaggttcaagagcgtctgacaaagcaaatcgccgtggcgattacggaagctctcagacccgccggggttggagtggtggtagaggcaacgcatatgtgcatggtgatgagaggagtccagaaaatgaattctaagacagtgacatccaccatgcttggagtttttcgcgaggatccaaaaacgcgtgaggaatttctcacattgattcgttcc

SEQ ID NO: 27620 - DNA, 750 bp, Artificial Sequence
  derived and/or modified sequence
atggagaagggccccgtgcgcgcccccgccgagaaaccaaggggagcccggtgctcgaacggatttccggagagggatccgccgcgtccaggcccgagtcgccctgccgagaagccaccgcgcccagaggccaaaagcgcccagcctgccgatggctggaagggtgagcgcccgcgctccgaggaggataatgaactgaacctgcccaatctggcggctgcctactccagcattctctcgagtcttggcgagaacccccagcgacagggcctgctcaagacaccctggcgcgccgcctccgccatgcaattcttcacgaaaggataccaggagacaattagtgacgttctcaacgacgcgatctttgacgaggatcacgacgagatggtaattgtcaaggacatcgatatgttttcaatgtgtgagcaccacctcgttccattcgtgggcaaggtgcatattggctatttgcccaacaagcaggtgctcggacttagcaagctggctcgtattgtggagatttacagtcgtcgtctgcaagttcaggagaggctgacaaagcagattgcagtcgcgattaccgaggccctgcgcccggccggagtgggagtggtggtcgaggctactcacatgtgcatggtgatgcgaggcgtgcagaagatgaacagcaagacggtcacttccactatgctgggagttttccgcgaagatcctaagacgcgcgaggagttcctgaccctcattcgatcg

SEQ ID NO: 27621 - DNA, 750 bp, Artificial Sequence
  derived and/or modified sequence
atggagaagggaccggtgagggcgcccgcggaaaagccccggggtgcacgatgctctaacggtttccctgaacgagatccacctcggccgggcccctcgcggcctgccgagaagcccccgaggcctgaggccaagagcgcccagccagcggatggatggaagggagaaagaccacgcagcgaagaggacaatgaactgaatcttcccaacctcgcggcagcatactcgagcatcctgtcctcactcggagaaaaccctcaaagacaagggctgctgaaaaccccatggcgcgccgcgtcggcaatgcagttctttaccaagggataccaggagactatttccgatgtgctcaacgatgcaatattcgacgaggatcatgacgaaatggtgattgttaaggatatcgacatgttttcgatgtgtgaacatcatttggtcccattcgtgggtaaggtccacatcggatacctccctaacaaacaggtgctggggctgagcaagctcgcccgcatcgtggaaatctactcgcgaaggcttcaggtgcaggaacgacttaccaagcaaatcgcagtggccattaccgaggctctgcgccctgcaggagtgggtgtggtcgtcgaggccacccatatgtgtatggtgatgcgcggagtgcaaaagatgaacagcaagactgtcacctcaactatgcttggagtctttagggaagatcctaagaccagagaagaatttcttaccttgatacgatcc

SEQ ID NO: 27622 - DNA, 750 bp, Artificial Sequence
  derived and/or modified sequence
atggaaaagggaccggtgagagctcccgccgaaaagccacgcggcgcgaggtgctccaacggttttcccgaacgggatcctccacgacccggcccctctcgtcctgctgagaagcccccaaggccagaggcaaagagtgcacagccagccgacggatggaagggtgagcgaccgcgatctgaggaggacaacgaactgaatctgcccaatctggcagcagcctactctagtatactcagctcactgggggaaaatcctcagaggcagggcctgttgaaaactccatggagggctgcttcagcaatgcagttttttactaagggctatcaggaaaccatctccgatgtgctgaatgacgcgatcttcgatgaggatcatgatgagatggtgatcgtgaaggacatcgacatgttcagcatgtgtgaacatcaccttgtaccctttgtggggaaagtgcatattggttacctccccaataagcaggtacttggtttatctaaactcgcccggattgttgagatctattcccggcggctgcaggtgcaggagcgtttaactaagcagattgccgtggcaattactgaagcacttagacctgctggagtcggagtcgtcgtggaggcaactcacatgtgcatggtcatgagaggagtgcagaagatgaattctaagacagtgacctctaccatgttaggagtgttcagggaagatcccaaaacacgagaagaattcctcaccctcataagaagc

SEQ ID NO: 27623 - DNA, 750 bp, Artificial Sequence
  derived and/or modified sequence
atggaaaagggccccgtgagagcgccagctgaaaaacccagaggagccaggtgttctaacggattccccgagcgcgacccccctcggccagggccttccaggcctgcagagaagcccccgcggcccgaggccaaatctgcacagcccgctgacgggtggaagggcgagcgacctagaagcgaggaggataacgagctcaacctgcctaatctcgccgccgcttactccagcattctctctagcctgggtgaaaacccacagcgccagggtctgctgaaaactccttggagagccgcctccgcaatgcagttttttacaaaaggctatcaggaaacaatttccgacgtgctgaacgatgctatcttcgatgaggaccatgatgagatggttatcgtgaaggacattgatatgttcagcatgtgtgaacaccatttggtgccttttgtaggaaaggtgcacatcggctatctccccaataaacaggtgctcgggctgagcaagctggcgaggatcgtcgagatatatagccggaggctccaggtgcaagaacgcctgacgaagcagatcgccgtggctattaccgaggcattgagaccggctggcgtgggagttgtcgtggaggccacccatatgtgcatggtgatgcgcggagtccaaaaaatgaattctaaaacagtcacatctactatgctcggagtgtttagggaagacccaaaaacgagggaagagtttctgacactcatcagaagc

SEQ ID NO: 27624 - DNA, 750 bp, Artificial Sequence
  derived and/or modified sequence
atggaaaaggggccggtgagagctcctgccgaaaaaccgcgcggcgcgcggtgctccaacggattccccgagcgtgatccaccgaggccaggcccgtcgcggccagccgaaaagccaccgcggcccgaggccaagtcggcccaaccagccgacggatggaaaggagaacgccctagatccgaagaggacaatgaactgaacctgccgaaccttgccgcggcatattcctccatcctctcgtccctcggagaaaacccgcaacgccagggcctgctgaaaactccgtggagggcagcttcggcaatgcagttctttacgaaaggataccaagaaaccatctcggacgtgcttaatgatgctattttcgatgaggaccacgacgaaatggtgatcgtgaaggacattgacatgttttcgatgtgcgagcaccatttggtgccatttgtgggcaaggtccacatcggataccttccaaataagcaggttctcggtctgagcaagctcgcgcgaatcgttgagatttactcacgcagactccaggtgcaggagcggctcaccaagcagatcgcggtggccatcactgaggcccttagaccggctggagtgggagtggtcgttgaggcaacccacatgtgcatggttatgaggggggtgcagaaaatgaactcgaaaaccgtcacttctactatgctcggcgtgttccgcgaagatccaaagacccgggaggaattcctgactctcatccgcagc

SEQ ID NO: 27625 - DNA, 750 bp, Artificial Sequence
  derived and/or modified sequence
atggaaaaggggccggtccgggccccagcggaaaaaccgcgtggtgctcgctgctctaacggcttcccggagcgcgacccacctcgcccgggtccgtcgaggccggccgaaaaaccaccgaggcccgaagctaagtcagcacaaccagcggacggatggaagggagagcggccacgaagcgaagaggacaatgagctgaacctgccgaatttggccgccgcctactcctcaatcctctcgtccctgggcgaaaaccctcaacgccagggactgctcaagactccctggagagcagcgtccgccatgcagttcttcaccaaggggtaccaggaaaccattagcgacgtgctcaacgatgccatcttcgacgaggatcacgatgagatggtcatcgtgaaggatatcgacatgtttagcatgtgcgaacatcacctggtgccattcgtgggaaaggtgcacatcggatacctgcctaataagcaagtcctgggcctgtcgaaacttgcacggatcgtggaaatctactcccggagactgcaagtccaggagcggttgacgaagcagatcgcggtggcaattactgaggcgcttcgccctgctggagtcggcgtggtcgttgaagccacccatatgtgtatggtgatgcggggagtgcagaagatgaacagcaaaactgtgacttcgaccatgctcggagtgtttagagaggacccgaaaactagagaagaattcctcaccctgatccgctca

SEQ ID NO: 27626 - DNA, 750 bp, Artificial Sequence
  derived and/or modified sequence
atggaaaagggtcccgtcagagcaccagcagagaagcctaggggagccagatgttcaaacggatttccagaacgggatcctcctaggccaggtcccagcagaccagcggaaaagcctccccgtcccgaagcaaaatcagctcagccagccgatgggtggaagggagaaaggcccagaagcgaggaggacaacgaactgaacctcccaaacctggccgcagcgtactccagcattctttcctcgctgggcgagaacccccagaggcaagggcttctgaaaaccccatggcgtgccgcatcagccatgcaattcttcaccaagggataccaggaaactatttccgacgtgctcaacgatgcaatctttgatgaggaccacgacgagatggtgatcgtcaaggatattgatatgttttcgatgtgcgagcaccacctggtgcccttcgtgggcaaagtgcatatcggatacctcccaaataagcaggtgctgggcttgtcgaaacttgcaagaatcgtggaaatctacagcaggagactgcaagtgcaagaacgtttgactaagcaaatagcagtggccatcactgaggcccttcgtcctgcgggagtgggcgtggtcgtggaagccactcatatgtgcatggtgatgcggggagtccagaagatgaattcgaaaaccgtcacctcaactatgcttggagtgtttagagaggaccccaaaaccagagaagagtttctgacgctcattcgatcc

SEQ ID NO: 27627 - DNA, 750 bp, Artificial Sequence
  derived and/or modified sequence
atggagaaaggccccgttagagcccctgcagaaaaacccaggggcgctcgctgctcaaacggctttcctgagagagatcccccaaggcccgggccatcgagaccggccgaaaaacccccacgcccggaggccaagtctgcccagcccgcagacggctggaagggagaacgtccacgaagtgaggaggacaacgagctgaacctgcccaacctggctgcagcctatagtagtatcttatccagtctcggcgaaaacccacagcggcagggcttgttgaagaccccatggcgggctgcatcagctatgcagttctttaccaaggggtaccaagaaactatcagtgatgtgctaaatgacgccatcttcgatgaggaccacgatgagatggtgatcgttaaggatatcgatatgtttagtatgtgcgagcatcatctcgtacctttcgtggggaaagtgcatatcggatacctacctaataagcaagttctcgggctaagcaagctggctcgaatcgtggaaatatactctcggagattgcaagtccaagaaagactaaccaagcagattgccgtggcaatcactgaagcgctacggccagcgggagtgggagtggtggttgaagccacccacatgtgcatggtaatgcgcggcgtgcagaaaatgaactccaagaccgtcacatctaccatgctgggtgtttttagagaggaccccaagactcgggaggagttccttacacttatacggagt

SEQ ID NO: 27628 - DNA, 750 bp, Artificial Sequence
  derived and/or modified sequence
atggaaaaaggtccggttcgagcgccggcggaaaaaccgcgaggtgcgcgatgttcgaatggttttccggaacgagatccgccgcgtccgggtccgtcgcgtccggcggaaaaaccgccgcgtccggaagcgaaatcggcgcaaccggcggatggttggaaaggtgaacgaccgcgttcggaagaagataatgaactaaatttaccgaatctagcggcggcgtattcgtcgatactatcgtcgctaggtgaaaatccgcaacgacaaggtttattaaaaacgccgtggcgagcggcgtcggcgatgcaattttttacgaaaggttatcaagaaacgatatcggatgtattaaatgatgcgatatttgatgaagatcatgatgaaatggtaatagttaaagatatagatatgttttcgatgtgtgaacatcatttagttccgtttgtaggtaaagtacatataggttatttaccgaataaacaagtattaggtctatcgaaattagcgcgtatagtagaaatatattcgcgtcgattacaagtacaagaacgtctaacgaaacaaatagcggttgcgataacggaagcgttacgtccggcgggtgttggtgtagtagtagaagcgacgcatatgtgtatggtaatgcgtggtgtacaaaaaatgaattcgaaaacggtaacgtcgacgatgctaggtgtatttcgtgaagatccgaaaacgcgagaagaatttttaacgctaatacgatcg

SEQ ID NO: 27629 - DNA, 750 bp, Artificial Sequence
  derived and/or modified sequence
atggaaaagggtccggtgcgggcgcctgctgaaaagccgaggggtgcaagatgctcaaatggattccctgagcgtgatccgccccgcccaggcccctcgcgcccggccgaaaaaccaccaagacctgaagccaaatccgcacagcctgccgacggatggaagggcgaacggcctagatcggaggaggataacgagttgaacctgcctaacctcgctgctgcttacagctccatcctgtcatccctcggcgaaaatccacagcgccagggactgctcaagacgccgtggcgggctgcgtcggcgatgcaattcttcaccaagggatatcaggaaactatctccgatgtgcttaatgacgccatcttcgacgaggatcacgacgaaatggtcattgtcaaggacattgatatgttcagcatgtgcgaacatcacttggtgcccttcgtcggaaaggtccatattgggtacctgcctaacaaacaggtgctggggctttcgaaactcgcccgcatcgtggagatctactcgcggaggctgcaagtgcaggagcggcttactaagcaaatagccgtggcgatcaccgaagccctgcgtccggcgggcgtgggagttgtggtggaagccactcacatgtgtatggtcatgcgaggtgtgcaaaagatgaacagcaagactgttaccagcaccatgttgggagtgtttcgagaggacccaaagactcgggaggagtttctcaccctgatccgatca

SEQ ID NO: 27630 - DNA, 750 bp, Artificial Sequence
  derived and/or modified sequence
atggaaaagggtcccgtgagagcaccagccgaaaagcccagaggagcccgctgttccaacggctttcctgaacgagatcctccaagaccaggaccatccaggccagcagagaaacctcctcgccctgaagccaaatctgcacagcctgctgatggctggaaaggcgaacggcccaggtcggaagaggataacgagctgaaccttccaaaccttgccgcagcgtattccagcattctttccagcttgggagagaatcctcagcggcagggtctgctgaaaactccttggcgtgcagccagcgccatgcaattctttaccaaaggttaccaagagactatatcagacgtgcttaacgatgcgattttcgacgaggaccacgatgagatggtgattgtgaaggacattgacatgttcagcatgtgtgaacaccatttggtccctttcgtgggtaaggtgcatattgggtaccttcctaacaaacaagttcttggactttccaaacttgcccgcatcgtcgagatttactcaagacggctgcaagtgcaagagaggcttactaaacaaattgcggtggcaataaccgaagcactccgacctgccggtgtgggagtggtggtggaagcaacccacatgtgcatggttatgcgcggcgtccagaagatgaattctaagaccgtgacttcaaccatgcttggtgtgtttcgcgaagatccaaagaccagggaagaatttctcacgctgattcggtcc

SEQ ID NO: 27631 - DNA, 750 bp, Artificial Sequence
  derived and/or modified sequence
atggaaaagggaccagtccgagctcctgccgaaaagccacgtggcgcaagatgcagcaatggctttcctgagagagatccgccccggcccgggccctcgcgcccagccgagaagccgccaaggccagaggctaagagtgcccagcccgctgatgggtggaagggcgagcggcctagaagtgaggaggataacgagctgaatctgccaaatttggccgctgcttacagcagtattctgtcctctctaggagagaacccacagcgccaaggcctgctgaaaactccttggagggcagcctcagctatgcagttcttcactaagggttaccaagaaaccatctccgacgtgctcaacgatgctatttttgatgaagatcacgacgaaatggttattgtcaaagacatcgacatgttcagcatgtgtgagcaccatctcgtccctttcgtgggaaaagtgcatattggttatcttcctaacaagcaggttctaggtctgtccaagctcgctcgtatagtggaaatctattctcggcgcctccaggttcaggagcgtctgactaaacaaatcgcagtggctattacggaggccttgagaccagctggcgtgggcgttgttgtggaggctacacacatgtgtatggtgatgcgcggcgtgcaaaagatgaatagcaaaacagtcacttctaccatgctgggagtctttcgcgaagaccccaagacacgggaggaatttttgaccctaattcgatcg

SEQ ID NO: 27632 - DNA, 750 bp, Artificial Sequence
  derived and/or modified sequence
atggaaaagggaccagtgcgcgctccagccgagaaaccacggggagcaagatgcagtaatggattcccagaaagagatcctccaagacctggaccgtctcgaccggcggagaaaccacctcgaccagaagcaaagtccgctcagccagctgatgggtggaagggagaacgcccacgatcagaggaagacaacgagttgaacttaccaaacttggctgcagcatattcctcgattcttagttcgcttggagagaatccacagcggcaaggcctccttaagactccatggcgagcggctagtgcaatgcagtttttcactaagggatatcaagagacgatttctgatgttcttaacgatgcaatttttgatgaggatcacgatgaaatggtcatcgtgaaagacattgatatgttctccatgtgcgagcatcatctcgtgcctttcgtaggaaaagtgcatatcggatatcttcctaataaacaagttttaggactctcgaaactcgctcgcatagtagagatttactctcggagattacaagtacaagaaagacttactaagcaaatcgctgtcgctattactgaagctcttcgtccagcaggagtcggtgtggttgttgaggctacccatatgtgtatggtgatgagaggagttcaaaagatgaacagcaaaacagttaccagtactatgctcggtgtgttccgtgaagatccgaaaaccagagaagagttcctgacgttaatcagatca

SEQ ID NO: 27633 - DNA, 750 bp, Artificial Sequence
  derived and/or modified sequence
atggagaagggaccggtgcgagcgccggcggaaaaaccacgcggggcccggtgcagcaacggatttcccgagcgcgaccccccgcggcctggtccgtcgaggcctgcagaaaagccccccagacccgaagctaaatccgcacaaccagccgacggatggaagggggagcgcccacgctcggaggaggacaatgaacttaacctgcctaacttggccgccgcgtattcttcgatcttgtcgagcctgggagagaatccacagaggcaaggcctccttaaaactccctggcgtgccgctagcgccatgcagttcttcaccaagggatatcaggaaaccatctcggacgtcctcaatgatgcaatcttcgatgaggatcatgacgagatggtgatcgtgaaagatattgacatgttctcaatgtgtgaacatcatctcgtgccatttgtcggaaaggtgcatatcggatacttgccaaacaaacaggtcctgggcctctcaaagctggcccggatcgtggagatttactcaaggagactgcaggtccaagagcggctgaccaaacagatcgccgtggccatcactgaagccctccgcccggcaggggtgggcgtggtggtcgaagctactcacatgtgcatggtaatgcgtggagtgcagaagatgaacagcaagactgtcacctcaaccatgcttggagttttccgcgaagatcctaaaactcgcgaagaattcctgacgctgatccgaagc

SEQ ID NO: 27634 - DNA, 750 bp, Artificial Sequence
  derived and/or modified sequence
atggaaaaaggacctgtcagagcccctgccgaaaaacctcgaggggcgagatgttccaatggatttcccgaaagagatccaccaaggcctggaccaagtcgacccgccgaaaaaccccccaggccagaggctaaatccgcccagccagcagatggatggaaaggagaacgccctcgatcagaagaagataacgaattaaatcttcctaatcttgcagctgcctactcctcgatcctgtcttcactcggggaaaaccctcagaggcaggggctcctgaaaactccttggcgggctgccagtgcaatgcagttctttacaaaaggatatcaggaaacaataagtgatgtcctgaacgatgctatatttgatgaagatcacgatgaaatggtgatcgtaaaagacatcgatatgttctctatgtgtgaacatcatctcgtcccattcgtgggaaaagtgcatatcgggtatttacctaacaaacaggtattagggctcagtaaactcgctcgcatcgtggagatctattcccgtcgcttgcaggtccaggagcggctcactaaacagatcgctgtagctatcacagaagctctcagaccagcaggggttggagtagtcgtagaagccactcatatgtgtatggttatgcgaggggtgcagaaaatgaactcgaaaactgtgacatccactatgttaggggtattcagggaagatccaaaaactcgcgaggaattccttactctcatcagatca

SEQ ID NO: 27635 - DNA, 750 bp, Artificial Sequence
  derived and/or modified sequence
atggagaagggaccggtgcgcgcgccggccgaaaagccgagaggggcgcgctgttccaacggcttcccagaaagagatccaccaagaccgggaccctctaggcctgcggaaaaaccaccacgcccggaagccaagtcggcacagccggcggacggctggaagggagaacgcccaagaagcgaggaagataatgagttgaacctgccgaaccttgccgccgcgtactcgtcaatcctctcgagcctgggagaaaacccccagagacagggactgttgaaaaccccgtggcgtgcggcatcggctatgcagtttttcactaaaggataccaagaaactatttcggacgttctgaatgatgccatctttgacgaagatcacgacgaaatggtcatcgtaaaggacatcgatatgttctcgatgtgcgaacatcaccttgtaccattcgtgggaaaggtgcacatcggttaccttcctaacaaacaggtgctgggtctgtcaaagctcgcaaggatcgtggagatctattccagacggctgcaagtgcaagagcgattgaccaaacagatcgccgtcgcgatcactgaggctctcaggccggccggagtcggtgtggtggtcgaagccactcatatgtgtatggtgatgcgcggggttcaaaagatgaattcgaaaactgtcacttccactatgctgggcgtgttccgggaggaccctaagactcgcgaagaattcctcaccctcattcgctca

SEQ ID NO: 27636 - DNA, 750 bp, Artificial Sequence
  derived and/or modified sequence
atggaaaaggggccggttcgtgctcccgcagagaagccccgcggcgcgcgctgctccaatgggttcccggagcgagatccaccccgcccgggaccctcccgccccgccgagaagccgcctcgtccagaggctaagagcgcccagccagcggatggctggaagggtgaacgcccccgctccgaggaggacaacgagcttaacctgcccaacctcgctgctgcatattcctctatcctgtcttcgcttggtgagaacccccagcgacagggcctgctgaagacgccgtggagggctgcctcggctatgcaattcttcactaagggttaccaagagaccatctctgatgtccttaacgatgcgatctttgacgaagaccacgatgagatggttatcgtcaaggatatcgatatgttttctatgtgcgagcaccatctcgtccctttcgttgggaaggtgcatatcggttatctgccgaataagcaggtgttgggtctttcgaaattagcgcgcattgtcgagatctacagccgccggctgcaagttcaggagcgactcacgaagcagatcgccgtcgctatcacggaggccttgcgtccggccggtgtaggtgtcgtggtcgaggcaacccatatgtgcatggtcatgcgtggtgtgcagaagatgaactcgaagaccgtcacctctacgatgttgggcgtctttcgcgaggatccgaagacgcgtgaggagtttcttacccttattcgttct

SEQ ID NO: 27637 - DNA, 750 bp, Artificial Sequence
  derived and/or modified sequence
atggaaaagggtcctgtgagggccccggcagagaaaccacggggagctagatgttccaacggattcccagagcgcgacccaccaagaccgggaccatcccggccggcagagaagcccccgcggccggaggcgaagtccgcacaaccggctgatggatggaaaggagaacgaccgagatctgaggaagataatgaactcaatctcccaaatttggccgcagcctactcatcgatactgagctcattgggtgagaacccgcagcgccaagggctcctcaagactccatggagagctgcaagcgcgatgcagttcttcacgaagggttatcaggaaaccatctcggatgtgctgaacgatgccatcttcgacgaagatcatgacgagatggttatcgtgaaggacattgatatgttctcgatgtgcgaacaccacctggtgcccttcgtgggcaaggtgcatatcggttacctcccaaacaagcaggtcctgggactctccaagctcgccaggatcgtggagatctactcacggcggctgcaagtgcaggagaggctgacgaaacagatcgctgtggctattaccgaagcccttagacccgccggcgtcggagtcgtggtggaagccacccacatgtgcatggtcatgcggggagtgcagaagatgaattcgaaaaccgtgactagcaccatgcttggggtgtttcgggaagatccaaagactcgcgaagagtttctgactctgatcagatcg

SEQ ID NO: 27638 - DNA, 750 bp, Artificial Sequence
  derived and/or modified sequence
atggaaaagggtcctgtgagagccccagcagaaaagcctcgcggtgcgcgctgctcaaacggttttccagaaagagatccgccccgtccgggaccaagcagaccagcagagaagccacctagaccggaggcaaaatccgcgcagcctgcagatggatggaagggagaacgcccacgtagcgaagaggataacgagttgaacctcccaaatctggccgcagcctattcttcgatactgtcctcgcttggggaaaatcctcagcggcaaggccttcttaagaccccttggcgggctgcttcagccatgcagtttttcactaagggttaccaagagacgatctcagacgtgctgaacgatgccatttttgatgaagatcatgacgagatggtgatcgtgaaggacatcgacatgttttcgatgtgtgagcatcatcttgtgcctttcgtgggcaaggtgcacataggatacttgccgaacaagcaggtgcttggcctctccaagctggcgcgcattgtggagatctattcccgcagactgcaggtgcaggagcgactgaccaagcagatcgcagtggcaatcaccgaagcccttcgacctgctggcgtcggtgtcgtggttgaagcaactcatatgtgcatggtcatgaggggcgtgcaaaagatgaattccaagacggtcaccagcaccatgctcggagtctttcgtgaggatcctaagactagagaggaatttcttacccttatcagatcc

SEQ ID NO: 27639 - DNA, 750 bp, Artificial Sequence
  derived and/or modified sequence
atggagaaaggaccagttagagcgccagccgaaaagcctcgcggtgcgcgctgctccaacggattcccggaacgagatccgcctaggccaggcccgagcagaccggctgagaagccccctagacccgaagccaagagtgcccagcctgcagatggatggaaaggcgaaagaccgaggtcggaagaggacaacgaactcaaccttcctaaccttgcggccgcctatagctcgatcttgagcagcctgggagaaaaccctcaacgtcaagggctgctgaaaactccatggcgggcggcttcggccatgcagttctttactaagggataccaggagacgatctcggatgtcctgaatgacgcgatctttgacgaggatcacgacgagatggtcatagtgaaggacatcgatatgttctcgatgtgtgaacatcatctggtgccattcgtggggaaggtgcacatcggctacctcccaaacaaacaagtcctcggactgtctaagctggcccgcatcgtagaaatctactcgaggcggctgcaggtgcaggaacggctcactaagcagattgcggtggcgatcactgaggcgctccgccctgcgggggtcggcgtcgtggtggaagccacccacatgtgcatggtcatgcgaggagtgcagaaaatgaattcaaagactgttacctcaaccatgctgggagtgttccgggaggaccctaagacgagagaggaattcctgaccttgattcgctcg

SEQ ID NO: 27640 - DNA, 750 bp, Artificial Sequence
  derived and/or modified sequence
atggagaagggacccgtgagggctccggccgagaagcctaggggagcaagatgctcaaacggcttcccagagagggaccctccgcgcccagggccttcgcgcccagccgaaaagccaccgcgccctgaagcgaagtcggcccaacctgccgatggatggaagggcgaaagacctaggtcggaggaagataatgaacttaacctgccgaacctggccgccgcgtactcctcaatcctcagctcgctgggagaaaaccctcagcggcagggactccttaagaccccgtggcgggccgcatcggcgatgcagttctttactaagggataccaggaaactatctcggacgtcctcaacgatgccattttcgatgaggaccacgatgaaatggtaatcgtgaaagatatcgacatgttttcgatgtgtgagcaccatctggtgccattcgtgggaaaggtgcacatcggctacctcccgaacaagcaggtgctcggcttgagcaagctggcccggatcgtcgaaatctactcccgccgcctccaagtgcaagaacgcctgacgaagcaaattgcggtcgccatcaccgaggctctcagaccagcgggagtcggtgtcgtggtggaagctactcacatgtgcatggtgatgcggggggtgcagaagatgaactccaagactgtgacgtcaacgatgctgggggtgttcagagaggacccgaaaacgcgggaggaattcttgactcttatccgctca

SEQ ID NO: 27641 - DNA, 750 bp, Artificial Sequence
  derived and/or modified sequence
atggaaaagggccccgtcagagccccagcggaaaaacctcgcggcgctaggtgcagcaacggatttccggagagggatcctcctcgcccaggccccagtcgcccggctgaaaaacctccccgccccgaggccaagagcgctcagcctgctgatggctggaagggagagaggcctaggtctgaggaagataacgagctcaatctcccaaatttggctgcagcctattccagcattttgtctagcctgggcgagaacccacagaggcagggcctgttgaagactccctggagagcggcgagcgccatgcagttctttactaagggatatcaggaaactatcagcgacgttcttaatgatgccatttttgatgaagaccatgacgagatggtgatcgtgaaggatattgacatgttcagcatgtgtgaacaccacttggtccccttcgtaggcaaggttcatattggatatctgccaaacaagcaggtgctgggcctctcaaaactggcccgcatcgtggagatatactctagacgcctgcaggtgcaagaacgcctgactaagcagattgccgtggcaataacggaagctctccgccccgctggtgtcggagtggttgtcgaggccactcacatgtgtatggtcatgagaggagttcagaaaatgaacagtaaaactgtgacttccacgatgcttggcgtttttagagaagaccctaagacacgcgaggagttcctcaccctgatccgctca

SEQ ID NO: 27642 - DNA, 750 bp, Artificial Sequence
  derived and/or modified sequence
atggaaaaaggccccgtccgtgcgcctgccgaaaagccccggggagcacgttgtagcaacggttttccagagagagatccgcctagaccaggacctagcagacctgccgaaaaacctccccgccccgaggcaaagagcgctcaaccagccgatggatggaaaggtgaacggcctaggtcggaagaagataacgagttgaatcttcccaatcttgcggcagcctattcgagcatcctgtccagcctgggcgagaaccctcaaaggcaaggattgcttaagaccccctggcgggccgcatcagcaatgcaattctttacgaagggctaccaggaaacgatttctgacgtgctcaatgatgcaatattcgacgaagatcatgacgaaatggtgattgtgaaggatattgatatgttctcgatgtgtgaacaccatcttgtgccttttgtgggcaaagtgcacattggatacctgccaaacaagcaggtgctcggactgtccaaacttgcgaggatcgtggagatttactcgcgcaggcttcaggtgcaggaacgcctgaccaagcagattgccgtggcaatcacggaagcactgcgaccagccggggtcggggtcgtggtggaggcgacccatatgtgcatggtgatgagaggtgtgcagaagatgaattccaagactgtcacttccactatgctgggcgtctttagagaggaccctaagactcgcgaggaatttctgacgctcattagatcc

SEQ ID NO: 27643 - DNA, 750 bp, Artificial Sequence
  derived and/or modified sequence
atggaaaagggtccagtccgtgcgcccgctgagaaaccaaggggggctcgatgttcgaatggattcccagagcgggacccaccacggccaggccccagcaggccagccgaaaaacctcccaggccggaggccaagagcgcccagccagcggacggttggaagggggaacggccaagaagcgaggaagacaacgaactgaatttgccaaacctggctgccgcctactcatccattctgagcagcctgggggaaaatccgcagagacaaggcttgttgaaaacaccgtggcgggcagcctctgcgatgcagtttttcacgaagggttaccaggagaccatctccgacgtcctgaacgacgccatttttgacgaagaccacgacgagatggtcattgtgaaagatattgacatgttcagcatgtgcgagcaccacctagtgcccttcgtcgggaaggtacacatcggctacctgccaaacaagcaggtattgggactttctaaacttgccaggatcgtggaaatatattctcgcagattgcaggtgcaggaaagactgacaaagcaaattgccgtggcaataacagaggctctgcgccctgcaggagttggcgtcgttgtggaggccacccatatgtgtatggtaatgcgcggggttcagaagatgaacagtaaaactgttacgtccactatgctgggagtgttccgtgaggaccccaagacacgggaagaatttttgacactcatcagaagc

SEQ ID NO: 27644 - DNA, 750 bp, Artificial Sequence
  derived and/or modified sequence
atggagaagggtcctgtgagagcaccagcggaaaagcctcgaggagcacgctgctccaatggttttcccgagcgagatcctccgaggccagggccatccagacctgccgaaaaaccgccgaggccggaagcaaagtcggcccagccggctgatggctggaagggtgaaagacctcgctctgaagaagataacgaacttaaccttcccaacctggcggccgcatactcgagcattctgtcgtctctcggagagaacccccaacgccaagggctccttaagaccccctggcgagccgcatcagctatgcagtttttcactaagggttaccaagagactataagcgatgtcctgaacgatgccattttcgatgaggaccatgacgagatggtcattgtcaaagacatcgatatgttctccatgtgtgaacatcacctggtcccttttgtggggaaggtccatattggatacctgcccaacaaacaggtgctgggtcttagcaaacttgcaagaattgtcgagatttacagccgtagactccaggtgcaggagcgccttacgaagcaaattgcagtcgcgatcaccgaagcacttaggccagccggagtcggtgtggtggtcgaagccactcacatgtgtatggtgatgagaggtgtgcaaaagatgaacagcaagaccgtgacgagcacgatgttgggagtgttcagagaggatccaaaaactcgggaggagttcctgaccctgatccgttcg

SEQ ID NO: 27645 - DNA, 750 bp, Artificial Sequence
  derived and/or modified sequence
atggaaaagggaccagttagagcaccagctgaaaaaccaagaggagcaagatgtagtaatggattccctgaaagagatccacctaggcctggtccatcaagaccagctgaaaaacctccaagacctgaagctaaatcagctcaaccagcagatggatggaagggagaacgtccaaggtctgaagaagataatgaattaaatttaccaaatcttgctgcagcatattcatctattcttagttcattaggagagaatccacagaggcaaggacttcttaaaacaccttggagagcagcatcagcaatgcaattttttacaaaaggatatcaagaaacaatttctgatgttcttaacgatgctattttcgatgaagatcatgatgagatggttattgtcaaagatattgacatgttttcaatgtgtgaacatcatttagtaccatttgttggaaaagttcatattggatatttaccaaacaaacaagttttaggtcttagtaaattagctcgtattgtggaaatttactctagaagactacaagttcaagaaagattaactaaacaaattgcagttgcaattactgaagcattgagacctgcaggagttggagtggtagttgaagcaactcatatgtgtatggtaatgcgaggagtacaaaaaatgaattcaaaaactgttacaagtacaatgttaggagttttcagagaggatccaaaaacccgagaagaattcttaactttaataagatca

SEQ ID NO: 27646 - DNA, 750 bp, Artificial Sequence
  derived and/or modified sequence
atggaaaaaggaccagtaagagctcccgctgaaaagccccgaggggctaggtgttctaatggattccccgaaagagatccgcctcggcctgggccaagtcgacctgcagagaaacctcctcgccctgaggctaaatcagcccagccagcagatggatggaagggggaacgaccacgctcagaagaagataacgaactcaaccttccaaacctcgcagcagcatattcctcgatacttagttctctcggggagaatccacagagacaggggcttcttaaaactccatggcgggccgcatctgccatgcaattttttacgaagggatatcaggaaactatctccgatgttctaaacgatgccatttttgatgaagatcacgacgaaatggtgatcgtgaaagacatagacatgttttctatgtgtgaacaccacctcgtcccattcgtggggaaagtccacataggatatcttccaaataaacaggtgttggggctctcaaaattagctcggatagtagaaatctactctaggagattacaagtccaggaacggctaacaaaacagattgccgtcgcaataactgaagccctaaggccagctggggtaggagtggtagtagaagccactcatatgtgcatggtgatgaggggagtgcagaaaatgaattcaaaaactgtgacatctactatgctaggggtgtttagggaggatccaaaaacaagagaagaattcctcacactgatcagatct

SEQ ID NO: 27647 - DNA, 750 bp, Artificial Sequence
  derived and/or modified sequence
atggagaagggccctgtgcgcgcacctgccgagaaaccccgcggagcaaggtgttctaacgggttcccagagagggaccctccccgcccggggccttcccgacctgccgaaaaaccgcctaggccagaggccaaatctgcccagcctgccgacggatggaaaggcgaaagaccgcgctctgaagaggacaacgaactgaatctaccaaatcttgccgctgcctactcgtccatcctctcgtctctaggagagaatccccagaggcaggggctgttaaagactccttggagggcagcaagtgcgatgcagtttttcaccaaggggtaccaagagacaatttcagatgttctaaatgacgccatctttgacgaggatcacgatgaaatggtgatcgttaaggacatcgacatgttttccatgtgtgagcatcacctcgtgcctttcgtgggaaaggttcacatcggatatctgcctaataagcaagtattagggctatctaagctagctaggatagtggaaatctactcgaggcgtctgcaggtgcaggaaaggcttaccaagcagatcgccgttgcgatcactgaagccctacgccccgcaggcgttggggtggtggttgaagccacacacatgtgcatggtgatgcgaggggtacagaagatgaattccaagaccgtcaccagtaccatgttgggggtgtttcgggaggaccctaagacacgtgaggaattcctcactctgatcaggtca

SEQ ID NO: 27648 - DNA, 750 bp, Artificial Sequence
  derived and/or modified sequence
atggaaaaagggccagtgagggcccctgccgagaaaccacggggggcacgctgttctaacggtttcccagaacgcgatccccctcgacctggccctagtagaccagctgagaagccccctcggccagaggcaaaatccgcacagcctgctgacgggtggaaaggggagcggcctcggagcgaggaagacaacgaactgaatctaccaaacctggccgcagcatactctagcatactatctagcctaggagaaaaccctcagagacagggcctgctgaaaacaccctggagagctgcctccgctatgcagtttttcaccaagggttatcaggagaccatttccgatgtgctgaatgacgccatttttgacgaagatcatgatgagatggttattgtgaaggatattgacatgttcagcatgtgcgaacaccacctagtgccattcgtgggcaaggtgcacattggttacctacctaataagcaagtgctgggactctccaagctggcccgcatcgtggaaatctactcccgaaggctgcaggtgcaggagaggctcacaaagcagattgccgttgctattactgaagccctgcggcccgccggagtgggtgtcgtggtggaagccacacacatgtgcatggtcatgcgaggagtgcagaaaatgaacagcaagaccgtgactagcaccatgctgggcgtgtttagagaagatcctaagacacgcgaggaattcttaaccttgattcggtcc

SEQ ID NO: 27649 - DNA, 750 bp, Artificial Sequence
  derived and/or modified sequence
atggagaaaggcccggtgagagcacccgctgaaaaaccgaggggagcacggtgctctaacgggtttcccgagagggatccccctaggcccggacccagcagacctgcggagaagccccctcgccccgaggcgaagtctgcccagcctgcagatggttggaagggggaacggccgcggagcgaggaggataacgagctgaatttacctaacctagccgcagcatattcctcaatactttcctctctgggagagaatccacagcgccagggtctactcaaaacgccctggcgggctgcttcagctatgcagttctttaccaagggttatcaggagaccattagtgacgtcctaaacgacgccatttttgatgaggaccatgatgaaatggttatcgtcaaggacattgatatgttttctatgtgtgaacaccatctggtccccttcgtgggcaaggtccatattggctacttgcccaacaaacaggtgctgggactcagcaaattagcacgaatcgtggagatctacagtagacggctgcaggttcaggagcggcttaccaaacagattgctgtggccataacggaggcattaaggcctgcaggtgttggcgttgttgtggaggccacacacatgtgtatggtgatgcgcggtgtccagaagatgaacagcaagacagtcacttcaacaatgctgggagtcttccgtgaggacccaaaaaccagagaggaatttcttactctcatccggtcg

SEQ ID NO: 27650 - DNA, 750 bp, Artificial Sequence
  derived and/or modified sequence
atggagaagggccctgtgcgcgcgcctgcagaaaagcctcgtggagcaaggtgttcgaacgggtttcctgaacgagatccaccacgccctggaccatcaagaccagcagaaaagccaccaagacctgaggccaagagtgctcaaccagcggacggatggaagggggaaagacctcgctcggaagaagataatgaactcaatctccctaacctcgccgcagcatactcctcaatcctgagctcactgggtgaaaatccacaacgacaaggtctgcttaaaaccccctggcgggcagcgagcgcaatgcagttcttcactaaaggttaccaggaaactatttccgatgtcctgaatgacgcaatctttgatgaagatcatgatgagatggtgattgtgaaggatattgacatgttttccatgtgtgaacatcacctggtaccttttgtcggcaaagtgcatattggttacttgccgaataagcaggtccttggccttagcaagttggctcgcattgttgagatttacagccgccgactgcaggtccaggaaagactcactaagcagatagccgtcgccataactgaagccctgaggcctgccggggtcggtgtggtggtggaagctacccacatgtgcatggtcatgcggggggtgcagaagatgaattcgaaaaccgtgacttcaaccatgctgggtgtgtttagagaagatccaaagactagagaggaattccttacccttattcgttcg

SEQ ID NO: 27651 - DNA, 750 bp, Artificial Sequence
  derived and/or modified sequence
atggaaaaaggacccgtcagagcccctgctgagaaacctcgcggtgcacgctgcagcaacggctttcccgagcgcgatcctcctagaccaggacccagccggcctgccgaaaagccacctaggccagaggcaaaaagcgcacaaccagctgacggctggaaaggcgagcgccccaggtctgaggaagacaacgaactgaacctgccaaaccttgcagccgcatatagcagcatcctctctagcttaggcgagaaccctcagaggcagggactccttaaaacaccttggcgtgctgcatccgctatgcagttttttacaaagggataccaggagaccatcagcgacgtgcttaacgacgccatttttgacgaagaccacgacgagatggtgatcgtcaaggacatcgacatgttttcaatgtgcgagcaccatctggttcctttcgtcgggaaggttcacattgggtacttgcccaacaaacaggtactgggcctgtctaagctggctcggatcgtggagatttatagtcgcaggcttcaagttcaagagagacttaccaaacaaattgcggtcgcgatcacagaagcactgcgtccagctggcgttggtgtggtggtggaagcaactcatatgtgcatggtgatgcgcggcgttcagaaaatgaacagcaagacagtgacctctaccatgttgggagtgtttagggaggatcccaagacaagggaagagttcctgactctgatcaggagt

SEQ ID NO: 27652 - DNA, 750 bp, Artificial Sequence
  derived and/or modified sequence
atggagaaagggcccgtgcgagcaccagcggagaaaccccggggcgcgcgctgttccaatggcttcccagaaagagatcctccgcgcccgggtccttcgcggcctgccgaaaagccccctagacctgaggctaagtcggcccagcctgcggacggttggaagggagagcgtcctaggtccgaagaagataacgagttgaatttgccgaacctggctgccgcgtattcgtcaatcctgtcctcactgggagaaaatccgcaacgccaaggcctgctgaaaaccccatggcgcgctgcatcagccatgcagtttttcactaaagggtaccaggaaacgatctccgacgtcctgaacgacgcgatttttgatgaggaccatgatgaaatggtgattgtcaaggacatcgatatgtttagtatgtgcgaacatcacctggtcccatttgtgggaaaagtgcacatcggttacctgcccaacaagcaggttctcggactctcgaagctggctagaatcgtggaaatctactcgaggagacttcaagtccaggaaagactgaccaagcagatcgctgtggctataactgaggccctgcgccccgccggagtgggagtcgttgtggaggccactcacatgtgcatggtgatgcgcggagtgcagaagatgaactcaaagacggtgacctcgactatgctgggagtgttcagagaggatccaaagactcgggaagagttcctgactctgatccggtca

SEQ ID NO: 27653 - DNA, 750 bp, Artificial Sequence
  derived and/or modified sequence
atggagaagggaccagtgagggcccccgcagagaaacctcgcggtgcaagatgtagcaacggatttccagaaagagatccgccaaggccgggtcctagcagacccgcagaaaagccgccccggcctgaagccaaatcggcccagcctgcagatggatggaagggtgagcggccgaggtccgaggaggataatgaactcaaccttccaaacctggcagcggcatactcctcaattctgtcgtcgctcggagaaaatccgcagcggcaaggacttctcaagacgccttggcgagccgccagcgcaatgcaattcttcactaagggttaccaggagactatctccgatgtgctcaatgacgcaatcttcgatgaggaccatgacgagatggtgatcgtcaaggacatagatatgttttcaatgtgcgagcatcacctcgttccttttgtgggaaaggtgcatatcggctacctccctaacaagcaagtgctgggtcttagcaaactggcaagaattgtcgaaatctacagcaggaggcttcaggtgcaggagcgcttgaccaaacaaatagccgtggcgatcaccgaagcgctgcggccagcaggagtgggagtcgtggtggaagcaacccacatgtgtatggtgatgcggggagtgcaaaagatgaactccaagacggtgacctcgactatgctcggggtctttagggaggaccctaaaactcgggaggaatttctgactctgattcggtcc

SEQ ID NO: 27654 - DNA, 750 bp, Artificial Sequence
  derived and/or modified sequence
atggaaaagggccctgtacgggcacccgcagagaaaccgcggggagcacgatgcagtaatggtttccccgaacgagatcctcctagaccaggaccatcaaggccggccgaaaagcctccgcgccctgaggcgaagtcggcacagccagcagacggttggaagggggagcggccgcggagcgaagaggataacgaattgaacttgcccaaccttgcagcagcgtacagctccatactctcgtcgcttggagaaaacccacagaggcagggcttgcttaagaccccttggagggcagcatcagctatgcagttctttaccaaagggtaccaggagactatctccgatgtcctcaatgacgccatttttgatgaagatcacgatgagatggtgattgtgaaggacatcgacatgttttcgatgtgtgagcatcacctcgtgccctttgttggaaaggtccatataggttaccttcctaataagcaagtcctgggactgtccaaactcgcgagaattgtggaaatctatagcagaaggctgcaagtccaggaacgtcttaccaaacaaattgctgtggcgatcaccgaggcgcttcgccccgccggtgtgggcgtggtggttgaagcaacgcatatgtgtatggtcatgaggggagtgcaaaagatgaatagcaaaactgtgacttcgactatgctgggagttttcagagaagatccaaagacgcgagaggaatttctcaccctgattcgttca

SEQ ID NO: 27655 - DNA, 750 bp, Artificial Sequence
  derived and/or modified sequence
atggaaaagggacctgtgcgggcaccagcagaaaagccacgcggagcgcgctgtagcaacggctttcctgaacgtgatcctcccagacctggtccgagtcggcctgccgaaaaacctcctagacccgaagccaaatcggcacaaccagcagacggctggaaaggtgaacggcccagatcggaggaggacaacgaattgaacctgcctaacctggcagcggcatacagctccatactgtcatccctcggagaaaacccgcaaaggcaagggctgttgaaaacgccttggcgagcagcaagcgcaatgcagttctttactaagggttaccaggagactatctcggatgtcctgaacgacgcgatctttgatgaagatcatgatgaaatggtgatcgtgaaggacatcgatatgttctccatgtgtgagcatcacctggtgcctttcgtgggaaaagtccatattggatacctccccaacaagcaagtgcttgggctctcaaagctcgccaggatcgtggagatttactcgagacgacttcaggtgcaggagcgccttacgaagcagattgccgtcgcaatcactgaagcacttcgaccggcaggagtgggagtggtcgtggaagcaactcatatgtgtatggtgatgcgtggtgtgcagaagatgaactcaaagactgtgacttcaaccatgcttggagtttttagagaggatcccaagactagagaggaattccttacgttgattagatcg

SEQ ID NO: 27656 - DNA, 750 bp, Artificial Sequence
  derived and/or modified sequence
atggagaagggcccagtgagggccccagccgagaaacctaggggggcacgatgctccaacggcttccccgaaagagacccccctcggcctggtccctcaagacctgctgaaaagccccccaggcctgaagctaaatccgcccaacccgcagatggttggaagggagagaggcctagatccgaagaagataacgagctcaacctgcccaacctagccgcggcctactcaagtatcctgagctccctgggggagaacccacagcgccaggggctgctgaagacaccatggcgggctgccagtgcaatgcagttctttactaaggggtaccaggaaacgataagcgatgtgctgaatgatgcgatattcgacgaggaccacgacgagatggtgattgtgaaggatatcgacatgttctctatgtgcgaacatcacttagtgccttttgttggcaaagtgcacatcggctatttgcccaataaacaggtactcggcttgagtaagctggccaggatcgtcgagatttattctcggcgcctacaagttcaggagcgacttacaaagcagatagccgtcgctatcactgaggcactacgacctgcaggggtaggagtcgttgtggaagcgacacacatgtgcatggtgatgaggggggtacagaaaatgaattctaaaaccgttacgagtacaatgttgggcgttttcagagaggatccaaagactcgggaagagtttctgacccttattcgttca

SEQ ID NO: 27657 - DNA, 750 bp, Artificial Sequence
  derived and/or modified sequence
atggaaaagggtccagtccgggccccagcggaaaaacctcggggcgcaaggtgtagcaacggtttcccggagcgcgacccgccgcggccagggccttctcgccccgccgagaagccgcctaggccagaggcaaagagcgcccagccggccgacggatggaagggggaacggccacggtcggaggaggacaacgagctcaacctcccgaacctggcagcagcgtactcgtctatcctgagctcccttggagagaacccacagcgccaaggactgctcaagaccccatggcgcgcggcctccgccatgcagttcttcaccaaggggtaccaggagactatctcggatgtgctgaatgatgcgatttttgatgaggaccacgacgaaatggtgatcgtgaaggacatcgatatgtttagcatgtgcgagcaccatctggtgcctttcgtcgggaaggtgcacatcggatacctccctaacaaacaagtcctgggactctccaagctggctcgaatcgtggaaatctactcacggcggctccaagtgcaagagagacttacgaagcagatcgcagtcgccatcaccgaagctctccggcctgcaggagtgggtgtggtggtcgaagctacccacatgtgcatggtcatgagaggagtccagaagatgaactcgaaaactgtgaccagcactatgttgggcgtctttagggaagatccgaaaacgcgggaggaattcctgaccctgatcagatcc

SEQ ID NO: 27658 - DNA, 750 bp, Artificial Sequence
  derived and/or modified sequence
atggaaaaagggccggtgcgggcccctgccgaaaagccgcgcggagccaggtgtagcaatggtttcccagaacgggatccacccagacctgggccttccaggcccgccgagaagccgccaagaccggaggctaagagcgcgcagccggctgacggatggaagggagaacgccctagatcggaggaggacaatgaactgaacctgccgaatctggccgcagcctacagctcaatcctgagcagcttgggagaaaatccgcagaggcagggactccttaagactccgtggcgcgccgcatctgccatgcaattcttcaccaagggttaccaggaaaccatctccgatgtcctgaatgacgctatcttcgacgaagatcacgacgaaatggtgattgtgaaggatatcgacatgttctcgatgtgtgaacatcacctggtgccgttcgtgggaaaagtgcacattggatacctgccaaacaagcaggtcctgggactgtcgaagctcgcccgcatcgtcgaaatctactcccggcggctccaggtgcaagaacggttgactaagcagatcgcggtggccatcactgaagcacttaggcctgctggcgttggagtggtggtggaagcaacccacatgtgcatggtcatgagaggcgttcagaagatgaattcgaaaacggtgacctccactatgcttggagtctttcgcgaggaccctaagacgcgggaagagttccttaccctgatcaggtcg

SEQ ID NO: 27659 - DNA, 750 bp, Artificial Sequence
  derived and/or modified sequence
atggagaagggccctgtacgcgcccccgcagagaaaccgcgcggggcaaggtgttctaatggtttcccagaaagagatccacctaggccaggaccatcccggcctgccgaaaagccaccgcgccctgaggccaaaagtgctcagccggcagacggctggaaaggcgagcgaccccgcagcgaagaagataacgaacttaatctgcctaacctggccgccgcctattcatctatactgagttctctgggggaaaaccctcagcggcagggactcctgaaaacgccttggcgcgccgcctccgccatgcagttcttcactaaggggtatcaagagaccatctcagacgtgcttaacgatgctatcttcgacgaagaccacgatgaaatggtgatagtgaaagacatcgacatgtttagtatgtgcgagcaccatcttgttcccttcgtcgggaaggttcacattggctacctgcccaataaacaagtgctgggcctgtctaaacttgccaggattgtggaaatttacagcaggaggttgcaggttcaggagcgcctgacaaagcagatcgcggtggctattaccgaagcgctgaggcccgccggggtgggagttgtagttgaggccacacacatgtgtatggtgatgcgcggggtccaaaaaatgaacagtaaaactgtgacctcaaccatgctcggcgtatttagagaggatccgaagactagggaggaatttctgacactcatccggtcc

SEQ ID NO: 27660 - DNA, 750 bp, Artificial Sequence
  derived and/or modified sequence
atggaaaaagggcctgtcagagcccctgcagagaagccgcggggagcccggtgctcgaatggattcccagagcgcgacccaccgcgcccaggaccgtcccgcccggccgaaaagccgccacgccccgaagcgaagagcgctcagccggccgatgggtggaagggcgagcgcccacggtccgaagaagataatgagctcaacttgcccaacctcgccgcggcatactcgtcaattctctcatcgcttggagaaaacccacagcgccaaggcctcctgaaaacgccgtggcgggcagcatccgcaatgcagttcttcactaagggctaccaggaaaccatctcggacgtgctgaacgacgcgatcttcgatgaagaccatgatgaaatggtgatcgtgaaggacattgacatgttttcaatgtgcgagcaccatctggtgccattcgtcgggaaggtgcacattggatacctgccgaacaaacaggtgctcggattgtctaaacttgccaggatcgtggaaatctactcgcgacggctgcaagtccaagagagactgactaagcagattgccgttgccatcaccgaggctcttcgcccggccggcgtgggagtggtggtggaggcgacccacatgtgcatggtgatgcgcggagtgcagaagatgaattcgaagactgtcactagcactatgctcggagtgttccgcgaagaccctaaaacccgggaggaattcctgactctcatcagatca

SEQ ID NO: 27661 - DNA, 750 bp, Artificial Sequence
  derived and/or modified sequence
atggaaaagggtcctgtgcgtgcccccgctgaaaagcctcgaggagctagatgcagtaatggcttccccgaacgagacccccctagaccaggcccgtctagacctgctgaaaagcctcctcgacctgaggccaagtcagcccagccagcggatgggtggaagggggagagacccaggagcgaggaagacaacgaactcaacctacctaatttggcggccgcttacagctcaatactgagctctttgggggaaaatcctcagaggcagggcctgctgaagacaccatggcgagcagcgagtgctatgcagtttttcactaaaggctaccaagagacaattagtgatgttttaaatgatgccatttttgacgaagaccatgatgagatggttatcgtgaaagatattgatatgttcagcatgtgcgaacaccacctggttccctttgtcggtaaagttcacattgggtatctcccgaacaaacaggtgctgggcctgtcgaagttggcgcgaatagtcgaaatttactcccggaggctccaggttcaagaacgacttacgaagcagatcgcagtggctatcactgaggccttgcgcccagctggcgtaggagtggtcgtggaagctacccacatgtgtatggtgatgcgtggcgttcagaaaatgaacagtaagacagtcacgagtaccatgctcggagtcttcagagaggaccccaaaaccagagaggaattcctgaccctgatccgatcc

SEQ ID NO: 27662 - DNA, 750 bp, Artificial Sequence
  derived and/or modified sequence
atggagaagggaccagtccgagcgccggccgaaaagccgcggggcgcgagatgctccaatggattcccagaacgcgatccgccacggcctggcccatcaagaccggcagagaaaccaccccgccctgaggccaaatcggcccagccggccgatggctggaagggcgagcgcccgagatcggaggaggacaacgagctgaacttgccgaacctggccgcggcttacagctcgatcctgtcgtcgcttggggaaaaccctcagcggcaaggcctgcttaagactccttggagggcggcgtccgctatgcagttcttcactaagggataccaggagactatcagcgatgtgctcaatgatgcgatatttgacgaggaccatgatgagatggttatcgtgaaggacattgacatgtttagtatgtgcgaacatcacctggtgcccttcgtgggtaaagtccacatcggttacctgcccaataagcaggtgctgggcctcagcaagttggcgcgcatcgtggagatctactcccgcagactgcaggtgcaggaacgcctcacgaagcagatcgctgttgctattactgaagcccttcggcctgccggagtgggcgtggtggtggaggccacgcacatgtgtatggtgatgcgtggtgtgcaaaagatgaacagcaaaaccgtgacttctaccatgctgggagtgttccgagaagatcccaaaacccgagaagagttcttgactctcatcaggtcg

SEQ ID NO: 27663 - DNA, 750 bp, Artificial Sequence
  derived and/or modified sequence
atggaaaaggggcccgtgcgggccccagccgaaaaaccgcgaggcgctagatgctcgaacggatttccagaacgcgatccaccgcggcctgggccatccagaccagctgagaaaccaccgcgccctgaggccaaatcggctcagccggccgacggatggaagggagagcgcccccggagcgaggaagataacgagctgaaccttccaaacctggcagcggcgtactcctcaatcctgtcgagcctgggcgaaaatccccagaggcagggactgctcaagaccccttggcgtgctgcatcagcgatgcaattctttaccaagggttaccaggaaactatctccgacgtgttgaatgacgccatcttcgacgaggatcacgatgagatggttattgtcaaggacattgatatgttcagcatgtgtgagcatcacctcgtgcccttcgtgggaaaggtgcatatagggtacttgccgaacaagcaggtcctcggcctctcaaagctggccaggatcgttgaaatctacagccggcgccttcaagtccaagaacgattgacgaagcaaatcgcggtggcaatcaccgaagcgctcaggcctgccggagtcggagtggtcgtcgaggctactcacatgtgcatggtgatgaggggggtgcagaagatgaattcgaaaactgtcacctcaactatgctgggtgtgttccgcgaggaccccaaaactcgcgaagagttccttactctgatacgctcg

SEQ ID NO: 27664 - DNA, 750 bp, Artificial Sequence
  derived and/or modified sequence
atggaaaagggacccgttcgagctcccgctgagaaaccaagaggagccagatgcagtaacggattcccagagagagatccgcctagacctgggcctagcagacccgctgaaaaacccccaaggcctgaagcaaagtccgctcaacccgcggacggatggaagggcgaacgccccagaagtgaagaggataatgaactcaatctgcctaatctggccgcagcgtattcctctattctgtcatcgctcggcgagaatccccagcgacaaggcctgttgaaaaccccgtggcgggcagcttccgccatgcagtttttcactaaaggatatcaggaaaccatcagcgacgtgctgaatgacgccatattcgatgaagatcacgatgagatggtcatcgtgaaagatatagatatgttttcgatgtgcgagcatcatctggtcccttttgtggggaaagtgcacattggttatttgcctaataaacaggtgctgggcttaagtaaactggctcgaattgtggaaatctattcccggcgtctgcaagtgcaggagcgtcttacaaaacaaatcgctgtggcgataaccgaagcattgcgccctgccggagtgggcgtcgtggtggaagccacacacatgtgcatggtcatgcgcggagtgcagaagatgaattctaagaccgtcacaagcaccatgttgggtgtgtttagggaggacccgaaaacacgagaagaatttctgacactcatccgatct

SEQ ID NO: 27665 - DNA, 750 bp, Artificial Sequence
  derived and/or modified sequence
atggagaaggggcctgttagggctccggctgaaaaaccacgaggagcgcggtgttccaatggcttccctgaaagagaccccccacggcctggcccatctagacccgccgagaagcctccacgtccggaggccaaatctgcccagcccgccgatggatggaagggcgagcgtcccaggtccgaggaggacaatgagctgaatcttcctaacctggctgcagcgtattcaagtatccttagcagtctgggggagaacccacagcgccaggggttgctgaagaccccgtggcgagcagcatcagctatgcaattcttcaccaagggctaccaggagacaatttctgacgttctcaatgacgccatttttgacgaagaccatgacgagatggtcatagtcaaggacatcgacatgttcagtatgtgcgagcaccatctggtgcccttcgtgggcaaggtccatattggatatcttccaaataagcaggttctgggcctatcaaaactcgcgcggatcgtcgagatttattctcggcggttacaggtccaggaaaggttaacgaagcagatagccgtagctattacagaggctttgcgccccgccggcgtcggggtggtcgttgaggctacccacatgtgtatggtaatgcggggtgtccagaaaatgaactccaagacagttaccagtaccatgcttggggtgtttcgagaagaccctaaaacgcgggaagagttcctgactttgattcgcagc

SEQ ID NO: 27666 - DNA, 750 bp, Artificial Sequence
  derived and/or modified sequence
atggaaaagggccctgtcagagcgccagctgagaaaccacgcggagctcgatgcagcaacggattccctgagcgagacccaccacggcccggaccatcccggcctgctgagaagccccctcgccctgaagcaaagtctgcccaaccagctgatggctggaaaggagaaagacctaggtccgaagaggacaacgaactcaatctgcctaacctggccgcagcatactccagtatcctcagcagtcttggcgagaatccccagcgacagggtcttcttaagaccccctggcgcgctgcttcggcgatgcaattcttcaccaagggttatcaggaaacaatctccgatgttcttaacgacgccattttcgacgaggatcatgacgaaatggtgatagttaaggacatcgacatgttcagtatgtgcgagcatcaccttgtccctttcgtcggaaaggtccacatcgggtacctgcccaacaagcaggtcttgggactgtcgaaactcgcaaggatcgtggaaatatacagcagaaggcttcaagtgcaggagaggctgaccaagcagatagccgtggccataacagaagccctgcgcccagccggggtgggagtggtagtcgaggcaacgcatatgtgtatggtgatgcgtggcgtacagaagatgaattctaaaaccgtgacatcaaccatgctgggcgtattccgagaggatcccaagaccagagaggaatttctgacattgattcggagc

SEQ ID NO: 27667 - DNA, 750 bp, Artificial Sequence
  derived and/or modified sequence
atggaaaaaggccctgtacgtgccccagccgagaaaccacggggggcgagatgttcaaacggattcccggaacgcgaccccccccgccccgggccgagtcgccctgcagagaaacccccgagaccagaagctaagagcgctcagcccgccgatggctggaagggtgaacgccctcggtctgaagaggacaacgagctaaatctgccaaacttggctgcagcttatagcagcatcttatctagcctcggcgaaaatccacagcgacaagggcttctaaagactccatggcgggcagcgtctgccatgcagttctttaccaaggggtaccaggagactatctctgatgtccttaacgatgctatttttgatgaagatcacgacgagatggtgatagtgaaagacattgatatgttcagtatgtgtgagcatcacctggttccctttgtgggaaaagtgcatattggatacttgcctaataaacaggtccttggtttgtccaagctggcgcggatagtggagatttactccaggagactccaggtgcaggaacgtttgactaaacaaatcgccgttgccatcacggaggcccttcgcccagccggggtgggagttgtggttgaagctactcacatgtgcatggtgatgaggggggttcagaaaatgaatagtaagactgttacaagcacgatgttgggggtgtttagagaggaccccaaaacacgtgaggagtttcttaccttaatcaggtcc

SEQ ID NO: 27668 - DNA, 750 bp, Artificial Sequence
  derived and/or modified sequence
atggagaagggccccgtgcgcgcacccgctgagaaacctcgcggcgcacgatgttccaatggcttccctgagagagaccctccacgaccgggtccttctagacccgcagaaaaaccccctcgacccgaggcaaagtccgcacagccggccgacggctggaagggggagcggccccgtagcgaagaggacaatgagttgaacttgccaaacctggctgccgcctactcaagcatcctctccagtctgggggagaacccacaacgccaggggctcctgaaaaccccttggcgcgccgcttcagctatgcagttttttacgaaaggttaccaggagaccataagcgatgtactcaacgacgccattttcgatgaagaccatgacgaaatggtgatcgtaaaggacatcgacatgttctcaatgtgcgaacaccacttggtgccattcgtaggaaaggtgcatattggatacttgcctaacaagcaagttctgggactgtcgaagcttgctagaatcgtggaaatttactcccggcggctccaggtgcaggagcggctgacaaagcaaattgccgttgccatcacagaggcccttcgcccagctggggtgggtgtggtggtggaggccacacacatgtgtatggtgatgagaggagtgcagaagatgaactcaaagaccgtcaccagcaccatgctaggagtctttcgagaagaccctaaaactcgagaggagttcttgacgcttataagaagt

SEQ ID NO: 27669 - DNA, 750 bp, Artificial Sequence
  derived and/or modified sequence
atggagaaaggcccagtccgcgcaccggcggagaagcctcgaggggctcgctgctccaacggattcccagagcgtgaccctccccgacctggacctagcagaccagccgagaagccacccagaccggaagcgaaatcagcgcagcccgcagatggatggaaaggagagcggccacgctccgaagaggataatgagttgaacctgcctaatttggcggcagcctactcgtccatactctcttctcttggggaaaaccctcaacgccaaggcctgcttaagaccccctggcgagcagcatcagcaatgcagtttttcactaagggttaccaggaaactatttcagacgtgcttaatgatgcaattttcgatgaggaccacgacgagatggtcatagtgaaggatatcgacatgttttcaatgtgtgaacaccatcttgttccctttgtgggcaaggtgcatatcggttacctcccaaacaagcaagtgctcggcctttccaaacttgcaagaattgttgaaatctactcaaggcgcctccaagtgcaggaacggctcacgaagcaaattgccgtggccattactgaggctcttaggccagcaggtgtgggggtcgtggtggaagcaacccatatgtgtatggtgatgcgtggcgtccagaagatgaactcgaaaacggtgacctctaccatgctgggtgtctttagagaagatccaaaaactcgggaagaatttctgacgctgataagaagc

SEQ ID NO: 27670 - DNA, 750 bp, Artificial Sequence
  derived and/or modified sequence
atggagaagggaccagtgagagcccccgccgaaaagccgcggggagcacgctgttcgaatggtttccctgagcgcgaccctcctaggccaggacccagccggcccgcggagaagccgccacgcccagaggcaaagtcggcacaacctgcagatgggtggaagggggaacggccacgctccgaggaagataatgagctgaacttgcctaaccttgctgccgcctatagctcgattctctcctcccttggcgagaatccacaacgacaaggtttgcttaaaactccgtggcgtgccgcatccgcaatgcagttctttactaaaggatatcaggaaactattagcgacgtgctgaacgatgcgatatttgatgaagatcatgatgaaatggtcatcgttaaggatatcgatatgttttcaatgtgtgaacaccacctggtgccattcgttggcaaggtgcatattggatacctgccgaataagcaagtgctgggattgtcgaagctggcgagaattgtggaaatctattctcgcaggctccaggtgcaggaacgacttactaagcagatcgcagtggcaattaccgaagcacttagacctgccggggtcggtgtggtggtggaggcaacccacatgtgtatggtgatgcggggagtgcaaaagatgaactcaaagaccgtcacctcaactatgctgggagtctttagagaggaccctaagaccagggaagagttccttactctcattagatcc

SEQ ID NO: 27671 - DNA, 750 bp, Artificial Sequence
  derived and/or modified sequence
atggaaaagggcccagtcagggcccctgccgagaagccgagaggggctagatgctcaaacggtttcccagagagggatcctccccggcccggaccaagcagaccagctgaaaaacctccacgacctgaggctaagagcgctcagcccgcagatggctggaagggagaaagacccagatctgaggaagacaacgaactgaacctgccaaacttggctgccgcttatagttcaatcctcagttccttgggcgagaatcctcaaagacaaggcctcctcaagactccatggcgtgcggcgtctgcaatgcagtttttcaccaaagggtatcaggagaccatctcagacgtgttgaacgatgctatcttcgatgaggatcacgacgaaatggtgattgtgaaagacatcgatatgttttccatgtgtgaacaccacttggtgccttttgttggaaaagtccatattggatacctccctaacaagcaagtcttagggcttagcaaattagcccgaatagtggaaatttattctagaaggctgcaagttcaagagaggttgaccaaacagatcgctgtagctatcacggaggcgctcaggcctgccggcgtgggggtggtcgtggaggcgacccatatgtgcatggtgatgaggggagttcaaaagatgaacagcaagaccgtcaccagtacgatgcttggagtcttcagagaggaccctaagactcgggaggagtttttaaccctgatccgatct

SEQ ID NO: 27672 - DNA, 750 bp, Artificial Sequence
  derived and/or modified sequence
atggagaagggcccggtccgagcgcccgcagagaagccccggggggccagatgttcaaatggcttcccagagagggatcccccaaggcccgggcctagtcgaccggcggaaaaacccccaagacctgaggcgaagtctgcccagccagcggatggttggaaaggcgagcggcccagatccgaggaagacaacgagctgaacttgccaaacctagccgccgcctattcctcaattttatcaagtctaggagagaatcctcagcgtcagggactgttaaagacgccctggcgggcggcgagtgctatgcagttctttacgaaaggctaccaagagaccatcagcgacgtgttgaatgacgccattttcgacgaggatcatgacgagatggttattgtcaaggacatcgacatgttctccatgtgtgagcaccaccttgtaccatttgtgggcaaggtccacattggctaccttcccaacaaacaggtgttgggcctctccaaattggcccgtatcgtggaaatctactctaggcgactccaggtgcaggagaggctcactaagcagattgccgttgccatcacagaggcacttcggcctgctggcgtcggggttgtcgtagaggccacgcatatgtgtatggttatgcgcggcgtgcagaaaatgaattcgaagaccgtgacaagcactatgttgggggtgttccgtgaagacccgaagacccgcgaggagttcttgaccctgatccgtagc

SEQ ID NO: 27673 - DNA, 750 bp, Artificial Sequence
  derived and/or modified sequence
atggaaaagggaccggtacgagcgccagcggaaaaacctcgtggagccaggtgttctaacggcttccctgagagagatcctcctagaccaggaccctcacggcctgcggagaagccaccaagacctgaggcgaagtcagcacagccggctgatggttggaagggggagcgccctcgcagtgaagaggacaacgagctgaaccttccaaacctggctgcggcttacagtagtattctttctagtttaggcgaaaaccctcagcgtcaaggattgctgaagacgccgtggcgggcagctagcgctatgcaattctttacaaagggctatcaggaaacaatctccgatgttcttaacgatgctattttcgacgaggatcatgacgaaatggtcatcgtcaaagacatcgatatgttcagcatgtgcgagcaccatctcgtgccgttcgtcggtaaagtgcatatcggatatcttcctaataagcaagttcttggtctttcaaaactcgcccggattgtggaaatctatagtagacgcctccaagtccaggaacgactcacaaagcaaatcgctgtcgcaataacagaggctctaagaccggcgggcgtcggagtcgttgtggaagcgacccatatgtgtatggtgatgcgcggcgttcaaaagatgaattccaagaccgtaacatcgactatgttgggtgtctttcgcgaggaccccaagacgcgcgaggagttcctcacactgattcgctca

SEQ ID NO: 27674 - DNA, 750 bp, Artificial Sequence
  derived and/or modified sequence
atggagaagggaccggtgagggccccagcagagaagcctcggggcgcacggtgttcaaatggattccctgaaagggatcctccacgccctggcccatcaagacctgcagaaaaaccccctcgtccagaggcgaaatcagcacagccagctgatggttggaagggtgaaagaccacggtcagaagaggacaacgaactcaacttgcctaacctcgcagcagcatactcgtcaatcctgagctcactcggagagaatccacaacgtcaaggcttgcttaagactccctggcgcgcagcttccgccatgcagttctttactaagggataccaggaaaccattagcgacgtgctcaatgacgctattttcgacgaagatcacgatgaaatggtgatcgtgaaggatattgatatgttctccatgtgtgagcatcatctggtgcctttcgtgggaaaggtccatattggttacctccctaacaagcaggtccttgggctcagcaagctggcaaggatagtcgaaatctatagccggagattgcaggtgcaagaaagactgaccaagcaaatcgcagtggcaattaccgaagcacttcgacccgccggtgtgggtgtggtggtcgaagcaacccatatgtgtatggtgatgagaggagtccaaaagatgaattccaaaactgtgacgtcaactatgctgggagtgtttagggaagatcctaagactcgtgaggagttccttacccttatccgttcg

SEQ ID NO: 27675 - DNA, 750 bp, Artificial Sequence
  derived and/or modified sequence
atggagaagggcccagtgcgggcacccgcagaaaagccgcgcggcgcccggtgtagcaacggatttcctgaacgggatcccccccggcctggacctagcaggcctgctgagaaaccacccaggccggaggcgaaaagcgcacagcccgctgacggttggaagggggagagacctagaagcgaggaagataatgagttgaatctgccaaatctcgccgcagcatacagctcgatcctgagctctctgggggagaacccccagagacaagggcttctgaaaacgccatggcgagccgcatctgcgatgcagttcttcacaaagggataccaggagaccattagtgacgtgctgaatgacgctattttcgatgaggaccatgacgagatggtgatcgtgaaggacattgatatgttttctatgtgtgagcatcacttggtcccgttcgtggggaaagtccacattggctatctgcccaacaaacaggttctgggtctatcaaaactcgcacggattgtggaaatatactcacgccgactacaagttcaagaacgtctgacgaagcagatcgccgtggccatcactgaggcattacggccagcaggagtgggcgtagtggttgaggccactcacatgtgtatggtgatgcgtggtgtgcaaaagatgaactccaagaccgtcacctctactatgctcggcgtctttagagaggatcctaaaacaagggaagagttcctcaccttgatccgctcc

SEQ ID NO: 27676 - DNA, 750 bp, Artificial Sequence
  derived and/or modified sequence
atggagaaggggcccgtgcgtgcccccgcagaaaaacctagaggtgcaagatgttccaacgggttccccgagcgcgaccccccacgcccaggcccatcaagaccggccgaaaagccaccccgtcctgaggcaaagtcggcacaacctgcggacggttggaaaggcgaacgtcctaggtccgaagaagataacgagcttaacttgccaaaccttgctgcagcctactcttctatcctgagtagcctgggggagaaccctcaacggcaggggttgcttaagactccgtggcgagcagcatcagctatgcagttcttcaccaagggataccaggaaactatcagcgatgtgctgaatgacgcgatttttgatgaggaccatgatgaaatggtcattgtgaaggatattgacatgttttccatgtgcgaacaccatcttgtgccctttgttgggaaggtgcatattggttacctgccaaacaagcaggtgcttggactctcaaaactggctagaatcgtggagatttactcgcggcggctgcaggtccaagaacgtctgactaagcagattgcagtggcgatcacggaagcgctgcgcccggccggagtgggcgtggtggtggaagctacccatatgtgcatggtgatgcggggcgtgcagaaaatgaattccaagactgttacttccaccatgcttggtgtctttcgcgaggatcctaaaacgagagaagaatttcttactttgatccggagc

SEQ ID NO: 27677 - DNA, 750 bp, Artificial Sequence
  derived and/or modified sequence
atggaaaaggggccggtgagagccccggccgaaaaacccagaggagcacgctgttcgaatggcttccccgaacgggacccgccgcgccccggtcctagccggccggccgagaaacccccgcgccccgaagccaagtcggcacagccagctgatggatggaagggagaacgaccccggagcgaggaagataatgagctgaatctcccaaatctggccgcagcctacagctcaattctcagctccctgggggagaatcctcagaggcaagggctcctgaaaaccccttggagggcagcctcggctatgcaattctttactaaaggataccaagaaaccatctcggacgtgctgaatgatgcgattttcgacgaggaccatgacgagatggtcatcgtgaaggacatcgacatgtttagcatgtgcgagcatcatctggtgcccttcgtgggaaaggtgcacatcggatacctgccaaacaagcaggtgctgggactgtccaagctggcgcgcatcgtcgaaatctattcccggagacttcaggtccaggaacgcctgactaagcagatcgcggtggccattaccgaagccctgcgcccagctggggtgggcgtggtggtggaggccacgcatatgtgcatggtgatgcgtggagtgcaaaagatgaactccaagactgttacctctaccatgctgggcgtctttcgggaagatccaaaaactcgggaagaattcctgaccctcatccgctcg

SEQ ID NO: 27678 - DNA, 750 bp, Artificial Sequence
  derived and/or modified sequence
atggaaaaaggacccgtgcgcgcaccggccgagaagcctaggggcgctcggtgtagcaatgggttcccagaaagggatccacctcgccccggcccatcccggcccgccgagaagccgcccagacctgaagcaaagagcgcccaaccggccgatggatggaagggtgagcggccccgatccgaagaagacaatgagctgaatttgcccaacctcgccgccgcatattcctctatccttagctccttgggtgaaaaccctcaacggcaggggctactgaagacaccctggagagccgcctccgccatgcagttctttaccaagggttatcaagagactattagcgacgtgctgaatgatgccatttttgacgaggaccacgatgagatggtgattgtgaaggatatagacatgttcagcatgtgtgaacaccatctcgtgccatttgtgggtaaagtgcacattggatacctgccgaataagcaggtacttggtttaagcaagcttgctaggatcgtcgaaatctatagcagaagactccaggtccaagaaagactcacgaaacaaattgcagtggcaatcactgaggccttacgccctgcaggtgtaggggtcgtcgtggaagcaacacacatgtgtatggtcatgagaggcgtgcaaaagatgaacagcaagactgtcaccagtactatgttaggtgtgttccgtgaggaccccaagacacgggaagaattcttgacactgattcggagt

SEQ ID NO: 27679 - DNA, 750 bp, Artificial Sequence
  derived and/or modified sequence
atggagaagggacctgtacgggctccagccgagaagccccggggtgcccgctgcagtaatgggttcccggagcgcgaccccccaagacccggacccagccgaccggcagagaaacctcccaggcccgaagccaagtctgctcagcccgccgatggttggaagggcgagcgacccaggtcagaagaggacaacgagctgaacttgcccaatcttgcagccgcttattcttctatcctgtcaagccttggggaaaatccgcagagacagggactactgaaaacaccctggcgggccgctagcgccatgcagttcttcacaaagggctaccaggaaaccatcagcgacgtattgaatgacgcaatttttgatgaagaccacgacgagatggtgattgtgaaagacattgatatgttctccatgtgtgagcatcacctcgttcctttcgtgggaaaagttcatataggatacttgccaaacaaacaagttctgggactgtccaagttggcgcgcatagttgagatttacagtcgtaggctgcaggtacaggaaaggcttacgaaacaaattgcggtggctatcactgaagccctgagacccgcaggcgtcggagtggtcgtggaagcaacccatatgtgcatggtcatgcggggcgtccagaagatgaatagtaagacggtgacgtccacaatgttgggagtgttccgcgaggacccgaagaccagagaggagttcctgactctgatccgcagc

SEQ ID NO: 27680 - DNA, 750 bp, Artificial Sequence
  derived and/or modified sequence
atggagaagggtcccgtcagggccccagcagagaagccacgcggagcaagatgttcaaacggttttcctgagcgggatcctccccggccaggcccaagcagaccagccgagaagccacccagacccgaagcaaaatcggctcagccggcagatggttggaaaggagaaaggccacgaagcgaagaggacaacgagctgaacctgcccaaccttgctgccgcgtactcgtccatcctcagctcccttggagagaaccctcaacgccaaggccttcttaagacgccgtggagagcagcgtccgcaatgcagtttttcacgaagggctaccaggaaaccatttcggatgtgttgaacgatgccattttcgatgaggatcacgacgaaatggtcatagtgaaggacattgacatgttttcaatgtgtgagcaccatctcgtccctttcgtcgggaaagtccatattgggtaccttccgaataagcaggtgctcggtctttcaaaactggcccggatagtcgaaatctatagcaggcgtctgcaggtgcaagaaaggctcactaaacaaattgccgtggcaattaccgaagcgctccggccagccggggtgggtgttgtggtggaggccacccatatgtgtatggtgatgcgaggtgttcaaaagatgaactctaagactgtgaccagcacgatgcttggcgtctttagagaggatcctaagactcgggaggagtttctcactctcattaggtcg

SEQ ID NO: 27681 - DNA, 750 bp, Artificial Sequence
  derived and/or modified sequence
atggagaaaggcccagtccgagccccagcagagaaacccaggggcgctcggtgtagcaacgggtttcccgaacgggaccctccgcggccaggtccttcacgccccgctgaaaagcccccccggccagaggctaagtccgcacagccagctgatggatggaagggagagagacctcgatccgaggaggacaacgaactgaatctacccaatttagctgcggcgtattcctccatcctttcttccctcggagaaaatcctcaacgtcagggcctgctcaaaactccatggcgcgcagcctccgccatgcagttcttcacaaaaggttaccaggagacaatctccgacgtcctgaatgacgccatcttcgacgaagaccatgatgagatggtaatagtgaaggacattgatatgttctccatgtgtgagcatcatctggtgccctttgtcggcaaagttcacatcggctatctgcctaataagcaggttctcggcctgtccaagctggctagaatcgtcgagatatattcacgccgcctgcaagtgcaggaacgcctgacaaaacagatcgctgttgccatcacggaggcactgagacctgccggtgtcggcgtagtggttgaagcgacgcatatgtgtatggtgatgaggggtgtgcaaaagatgaactctaaaacagttactagtaccatgctgggggtttttagagaagatccgaagacacgggaggaattcctcaccctcattcggtca

SEQ ID NO: 27682 - DNA, 750 bp, Artificial Sequence
  derived and/or modified sequence
atggagaagggacccgttagggcccctgcagagaaaccaaggggcgccaggtgtagtaatggtttccctgagagggatccaccccgccccggcccttctaggccagccgagaagccaccaaggcccgaggctaaatccgctcagccagcagatggttggaaaggtgaaaggccacgcagtgaggaggacaacgaactgaacctgcctaaccttgccgcagcctatagcagtatcctttcctcattgggcgagaaccctcagcgtcaaggactgctcaagactccctggcgtgcagctagtgccatgcagtttttcaccaaaggctatcaggagaccatctctgacgtacttaacgacgctatcttcgacgaagaccatgatgagatggtaatcgtcaaagatatcgacatgttcagtatgtgtgagcaccatcttgtcccattcgttggtaaggtccacatcggttacctgcccaacaaacaggtgctgggtctgagcaagctcgctcgcattgtcgagatctattctcgtcgtctgcaggtgcaggagaggctgacaaaacagattgctgtagctataaccgaagccttgcgtcccgccggtgtaggtgtcgtggtggaggccacacatatgtgcatggtaatgaggggcgtgcagaaaatgaacagcaagacagttaccagcaccatgctgggcgtcttcagggaagacccaaaaaccagggaggagttcctgaccttgattaggtcc

SEQ ID NO: 27683 - DNA, 750 bp, Artificial Sequence
  derived and/or modified sequence
atggaaaagggaccagttcgggcccccgctgaaaaacctcggggtgcccggtgctcaaatgggtttccagaacgcgatcctcccagaccggggcctagccgcccagcagagaaacctccgaggcccgaggccaagtctgcgcagccagccgatggctggaaaggcgaaaggcctcggtcagaggaggataatgagctcaatctccccaatctggccgccgcgtacagcagcattcttagctccctcggcgaaaatccccaacgccagggcctgctgaagacgccttggcgagccgcatcagcaatgcagttctttacaaaggggtatcaagagacaatttctgacgtactgaacgatgccatttttgacgaggaccacgatgagatggtgatcgttaaagacattgatatgttctctatgtgcgaacaccacctggtcccatttgttgggaaagtccacattggttaccttccgaataagcaggtgttaggactgtctaagctcgcaagaatcgtcgaaatctattccaggagactacaggtgcaagaacggctaaccaagcaaatcgccgtagcaatcacagaagcactccggcctgctggcgtgggcgtggtggtggaagctacacacatgtgcatggtgatgcgcggagtccagaaaatgaacagtaagactgtgacatcaacaatgctaggtgtttttagggaagacccaaaaactagggaggagtttcttacgcttattcgttcc

SEQ ID NO: 27684 - DNA, 750 bp, Artificial Sequence
  derived and/or modified sequence
atggaaaaggggccagtgagggcgcccgctgaaaaacctaggggtgctagatgctcgaatggattccctgagcgcgatcctcctagaccgggaccaagtagaccagccgaaaaacctcctcgccctgaagctaaaagcgcgcaaccagctgatggttggaaaggtgagagaccccgttcagaggaagataatgaacttaacttacctaatctagcagccgcatacagttcaattttatcctccttgggtgaaaacccacagaggcaaggattgctcaagactccatggcgggcagcttctgcaatgcagttctttaccaaaggatatcaggaaactatttctgacgttttgaacgatgcgattttcgacgaagatcacgatgaaatggtgattgtaaaagatatcgacatgttctctatgtgtgagcatcatctggtaccatttgtcggcaaagtccacattggttacctccctaataagcaggtgttgggtctatcaaaattggcaaggatcgtggagatctattctagacgtctccaggtccaggagaggttaacgaagcagatcgcggtcgctattactgaagccttgcgtccagctggcgtgggtgtggtggtggaggctacccatatgtgtatggtaatgagaggagtgcaaaagatgaactctaagacagtgacttccactatgctaggagtttttagggaagatccgaagaccagggaagagttcctaactctgataagaagc

SEQ ID NO: 27685 - DNA, 750 bp, Artificial Sequence
  derived and/or modified sequence
atggaaaagggaccggtacgcgcacccgccgaaaaaccccggggggcccgctgcagcaacggctttcctgaaagggatcctccacggccaggcccctcacgcccagctgagaaaccaccaagaccggaagctaagtcagcgcagcccgcggatggatggaagggcgagcgcccgcggtcggaagaggataatgaactgaacctgcccaacctggccgccgcctactcgtcaatcctcagcagcctcggagaaaatccgcaaagacaaggactcctcaagactccctggcgcgccgcttccgccatgcaattcttcacgaaggggtaccaagagactatctcagacgtcttgaacgacgcgatctttgacgaggaccatgacgagatggtgatcgtcaaggacatcgatatgttctcgatgtgcgaacaccatctggtgccgtttgtgggaaaggtgcacattggatatctgccaaacaaacaggtcctcggcctgtctaagttggccagaatcgtcgaaatctactcccggcggctccaagttcaggaaaggctcactaaacagatcgccgtggctattactgaagcactccggccagcgggcgtgggagtcgtggtggaggccacccatatgtgtatggttatgcggggagtgcagaaaatgaacagcaagaccgtgactagcaccatgctgggggtgtttcgcgaggacccaaagacccgggaggaatttctgactctcatccgaagc

SEQ ID NO: 27686 - DNA, 750 bp, Artificial Sequence
  derived and/or modified sequence
atggagaagggacccgtccgcgctccggcagaaaaaccaagaggagcccggtgttccaacggattcccagaacgcgaccctccccggccgggcccgtcccgcccggccgaaaagcctcctagaccggaagctaagtcggcgcagcctgcggatggatggaagggagaaagaccgagaagcgaagaggataacgaactgaacctcccaaatctggcagccgcttactcttccatcctgtcgtccctgggcgaaaacccacaacggcaggggctgctcaagaccccatggagagccgcaagcgcaatgcagttctttactaagggatatcaagagactatctcggacgtgctgaacgatgcgatcttcgacgaggaccatgatgagatggtgatcgtgaaagacatagacatgttctcgatgtgtgaacatcacctggtgccattcgtcggaaaggtgcatatcggttacctcccaaacaagcaggtgctcgggctttcgaagctcgctcgcatcgtggagatttactccaggcggctgcaggtgcaggaaagactcaccaagcagatcgccgtggcgatcactgaggcactgcgccctgctggtgtgggagttgttgtggaagcgacccatatgtgcatggtgatgcgtggagtccagaaaatgaattcaaagaccgtcacctccaccatgctgggcgtgttcagggaggacccaaagacccgagaagaattccttacgcttattcgctcc

SEQ ID NO: 27687 - DNA, 750 bp, Artificial Sequence
  derived and/or modified sequence
atggaaaaaggtccggtcagagctcctgccgagaaaccacggggagcacgttgttcaaacggattcccggagagggacccccctcgtccaggccctagtcggcctgcggagaagccgcctcggccggaagcgaaatccgcccagcccgcggatggctggaaaggggagaggccgcgttccgaagaggacaatgagttgaatctgccaaatttagccgctgcttactcttctatcctgtctagcctgggtgaaaatccccagcgtcagggattgctgaaaactccctggcgcgcagctagcgcgatgcaatttttcaccaagggctatcaagaaaccatttccgacgtgcttaacgatgcgatcttcgacgaggatcatgatgagatggtcattgtgaaggatatcgatatgttttcaatgtgcgagcaccatctggtgccatttgttgggaaggttcacatcggatatcttcccaataaacaggtgctgggtttatctaagttggcacgaatagtggaaatttactcccggagattacaagtccaggagaggttgacaaagcagatcgcagtggctatcacagaggccttgcggccagccggggttggggttgtcgttgaggccacgcacatgtgtatggtgatgaggggcgtccaaaaaatgaacagcaagacggttacatctaccatgttgggtgtgttccgggaagatccaaaaacccgagaggagtttttgacccttatccgatcg

SEQ ID NO: 27688 - DNA, 896 bp, Artificial Sequence
  derived and/or modified sequence
gggaaataagagagaaaagaagagtaagaagaaatataagagccaccatggaaaaagggcccgtccgagcacccgcggagaagccgagaggtgcacggtgcagcaatggcttcccggagcgggacccacctcggccaggacccagcagaccggcggagaaaccgcctaggcccgaggccaagtcagcgcaacccgcggacggatggaagggagagcgccctcgatccgaagaagataatgagctgaaccttcctaatcttgctgcagcgtattcctcaatcctctcgtcgctgggtgaaaacccccagcgccagggactgttgaaaacgccgtggagagccgcgtcagcaatgcagtttttcacgaaagggtaccaggaaaccatttcggacgtgctcaacgatgccatctttgacgaagatcacgatgagatggtaattgtgaaagacattgacatgttttccatgtgtgaacaccatctggtcccgttcgtcggtaaagtgcatatcgggtatttgccgaacaagcaagtgttgggattgtcgaagcttgcgaggatcgtagagatctactcacggcgactgcaggtgcaggagagactcactaaacagattgcggtcgccatcacggaagccttgcggccagcgggggtgggggtggtagtcgaggctacacacatgtgcatggtcatgcgcggagtgcaaaagatgaattccaagacagtcacctcgacgatgttgggcgtattcagggaagatcccaagactcgcgaggagtttcttacactcatcagatcatgataagctgccttctgcggggcttgccttctggccatgcccttcttctctcccttgcacctgtacctcttggtctttgaataaagcctgagtaggaag

SEQ ID NO: 27689 - DNA, 753 bp, Artificial Sequence
  derived and/or modified sequence
atggagaagggccccgtgagagcccccgccgagaagcccagaggcgccagatgcagcaacggcttccccgagagagacccccccagacccggccccagcagacccgccgagaagccccccagacccgaggccaagagcgcccagcccgccgacggctggaagggcgagagacccagaagcgaggaggacaacgagctgaacctgcccaacctggccgccgcctacagcagcatcctgagcagcctgggcgagaacccccagagacagggcctgctgaagaccccctggagagccgccagcgccatgcagttcttcaccaagggctaccaggagaccatcagcgacgtgctgaacgacgccatcttcgacgaggaccacgacgagatggtgatcgtgaaggacatcgacatgttcagcatgtgcgagcaccacctggtgcccttcgtgggcaaggtgcacatcggctacctgcccaacaagcaggtgctgggcctgagcaagctggccagaatcgtggagatctacagcagaagactgcaggtgcaggagagactgaccaagcagatcgccgtggccatcaccgaggccctgagacccgccggcgtgggcgtggtggtggaggccacccacatgtgcatggtgatgagaggcgtgcagaagatgaacagcaagaccgtgaccagcaccatgctgggcgtgttcagagaggaccccaagaccagagaggagttcctgaccctgatcagaagctag

SEQ ID NO: 27690 - DNA, 753 bp, Artificial Sequence
  derived and/or modified sequence
atggaaaagggcccagttcgcgccccagctgaaaagccccgcggcgcacggtgttccaatgggtttcctgaaagggatccccctaggcctgggcccagccggcctgccgagaagccaccccgcccggaggccaagtccgctcagccagccgatggttggaagggagagcggccccgttccgaagaagacaacgagcttaacctccctaatctagcagcagcctatagctccattcttagctcacttggtgaaaacccgcagcgccaagggctcctgaaaactccctggagagccgcctcagccatgcaatttttcacaaaaggttaccaggagactatctcagacgtactgaacgacgcaatcttcgacgaagatcacgacgagatggttattgtaaaggatatagacatgttcagcatgtgcgagcaccaccttgtccctttcgtcggtaaggttcacatcgggtatctgccaaacaaacaggtgctgggactgtctaaattagcccgaatcgtcgaaatctacagccggcgactacaggtccaagagcgactaaccaagcaaattgccgtggccataacagaggccctccgaccagcaggagttggagtggttgtcgaagccacccatatgtgcatggtcatgagaggtgtccagaaaatgaatagcaagaccgtcaccagtaccatgctcggagttttccgagaggatcctaaaacccgagaagaattcctaaccctaatccggtcctag

SEQ ID NO: 27691 - DNA, 753 bp, Artificial Sequence
  derived and/or modified sequence
atggagaaaggcccggtccgcgccccagccgagaagccccgtggcgcgaggtgtagcaacggtttcccagaacgcgacccaccgagaccagggcccagtagacctgcagagaagccccctcggccagaggcaaagtctgcgcagccagccgacggttggaaaggagagcgccctaggagtgaggaagataatgaacttaacttgcccaacctggcagccgcatacagcagcatactgtcgtcacttggcgagaatccacagagacaggggctgctgaagaccccgtggagagccgccagcgctatgcaattctttaccaagggctatcaagaaacaataagcgacgtgctgaatgacgcaattttcgatgaggaccacgacgagatggtgatcgtcaaagacattgatatgttcagcatgtgtgagcaccatttggtgccgttcgtgggaaaagtgcacataggctaccttcccaataagcaggtgcttggcctgtcaaagctggcccgtattgtcgaaatctattcaagaaggcttcaggtacaagagcgacttaccaaacagatcgctgtggcaatcactgaggccttgcgcccggcgggagtaggggttgtggtggaggccactcacatgtgtatggttatgaggggagtccagaagatgaacagtaagaccgtgaccagcacaatgctgggcgtgtttcgagaggacccaaaaacaagggaagagttccttactctgatacggtcatag

SEQ ID NO: 27692 - DNA, 753 bp, Artificial Sequence
  derived and/or modified sequence
atggagaagggccctgtgcgggccccagctgagaagcccaggggggcccgctgcagcaatggcttccctgagcgggaccccccccggcccggccccagcaggcctgctgagaagccacccaggcctgaggccaagagcgcccagcctgcagatggctggaagggggagcggcccaggtctgaggaggacaatgagctgaacctgcccaacctggccgccgcctacagcagcatcctgagcagcctgggggagaacccccagaggcagggcctgctgaagaccccctggagggctgccagcgccatgcagttcttcaccaagggctaccaggagaccatcagtgatgtgctgaatgatgccatctttgatgaggaccatgatgagatggtgattgtgaaggacatcgacatgttctccatgtgtgagcaccacctggtgccctttgtgggcaaggtgcacatcggctacctgcccaacaagcaggtgctgggcctgagcaagctggccagaattgtggagatctacagccggcggctgcaggtgcaggagcggctgaccaagcagattgctgtggccatcacagaggccctgcggcctgctggggtgggcgtggtggtggaggccacccacatgtgcatggtgatgagaggagtgcagaagatgaacagcaagacagtgaccagcaccatgctgggcgtcttccgggaggaccccaagacccgggaggagttcctgaccctcatccgctcctag

SEQ ID NO: 27693 - DNA, 753 bp, Artificial Sequence
  derived and/or modified sequence
atggagaagggccccgtgcgggcccccgccgagaagccccggggcgccaggtgcagtaacggcttccccgaacgggaccctccacgtccaggtccatcacgccctgcggagaagccccctagacctgaagcgaaatctgctcagccagctgacggatggaagggcgaacggccccggtccgaggaagacaatgagctgaatttgcctaacttagcagccgcatatagttccatcctgtccagcctaggggagaaccctcagcggcagggtctactgaaaacaccgtggcgtgccgcaagcgccatgcaattcttcaccaagggatatcaggagactatctctgatgtgctcaacgatgcaatctttgatgaggaccacgatgaaatggtgatagtgaaggatatcgacatgttcagcatgtgcgagcatcacctggtgccctttgttgggaaagtgcacattgggtacctgcccaataaacaagtcctcggactatccaagctggcccgcattgtcgagatttattcacggcgcctgcaggttcaagagcggctgacaaaacagatcgctgtcgcgattacggaggcactgcggcctgcaggcgtcggagtcgttgtggaggccacgcacatgtgtatggtgatgaggggtgtccagaagatgaatagcaagactgtgacatcgaccatgctaggagtgtttcgagaggatcccaaaacaagagaggagttcctgacactcattagatcttag

SEQ ID NO: 27694 - DNA, 753 bp, Artificial Sequence
  derived and/or modified sequence
atggagaagggccccgtgcgggcccccgccgagaagccccggggcgcaaggtgttctaatggatttcctgaacgcgatcctcctcgccctggacctagtcgccccgcagagaagccccctcgacccgaggccaagtccgcccagcccgccgacggttggaagggcgaaaggccgcgaagcgaggaagataacgaattaaatttgccgaacctagcggcggcctactctagtattctttcttccctgggagagaatccccagcgacagggattactgaaaactccttggagggccgcgtctgcgatgcagtttttcacaaagggatatcaggagacaatttctgatgtgctaaatgatgcaattttcgacgaagatcatgacgagatggtgattgtgaaagacatcgatatgttcagcatgtgcgagcaccacctggtcccttttgtggggaaggtgcatatcgggtatttacccaataagcaggttttaggactctcaaaattagcccgaatcgtggaaatatatagtagaagactgcaggtccaggaaagactaacaaagcaaatagcagtcgctatcactgaagctctgcgacccgccggagtaggagtcgtcgtcgaagctacccatatgtgtatggttatgcgaggtgtacaaaagatgaactcaaagactgttacctcgactatgctcggagtgttccgggaggatcccaaaacgcgagaagagttcctgacactgattaggtcgtag

SEQ ID NO: 27695 - DNA, 1977 bp, Artificial Sequence
  derived and/or modified sequence
cctgtggccgctcccggctcggagtgtgatctaagcaggttgcgtaccttcctcaggtgactccggccacagcccattgtccgcggccaccggcggagtttagccgcagacctcgaagcgccccggggtccttcccgaacggcagcggctgcggcgggtccatggagaagggccctgtgcgggcaccggcggagaagccgcggggcgccaggtgcagcaatgggttccccgagcgggatccgccgcggcccgggcccagcaggccggcggagaagcccccgcggcccgaggccaagagcgcgcagcccgcggacggctggaagggcgagcggccccgcagcgaggaggataacgagctgaacctccctaacctggcagccgcctactcgtccatcctgagctcgctgggcgagaacccccagcggcaagggctgctcaagacgccctggagggcggcctcggccatgcagttcttcaccaagggctaccaggagaccatctcagatgtcctaaacgatgctatatttgatgaagatcatgatgagatggtgattgtgaaggacatagacatgttttccatgtgtgagcatcacttggttccatttgttggaaaggtccatattggttatcttcctaacaagcaagtccttggcctcagcaaacttgcgaggattgtagaaatctatagtagaagactacaagttcaggagcgccttacaaaacaaattgctgtagcaatcacggaagccttgcggcctgctggagtcggggtagtggttgaagcaacacacatgtgtatggtaatgcgaggtgtacagaaaatgaacagcaaaactgtgaccagcacaatgttgggtgtgttccgggaggatccaaagactcgggaagagttcctgactctcattaggagctgagcttcattcagtgtgtgtctgcagaaccatagcttccacgcacctgaacgagcacagaatgaactgacggtggaagacattatgagctgtgtccaacgttttaaccaaagcgtatcgtaccaacgatctgtgaaaatgcactggaagcttctggtcccggtttcctttgtggtctatgtgggtcttgtcctcattgtaactccgtatagatggtataggtattttaatcctggaagctgttgccttattaatgattatcttaaaatttcctccattggggcagcgtgggccaaattaaaacaaacaaaaccgcaactcctccacagaaacacaaacacagttattccatgaagtttagtatttggttgacatagtgctcttcaaattcatcccattaccctaaaagtaataactttgatgcttgctttaactttagtcccatctctgccactttgatgctatttgggttatgatggggcaagatggcagaggtattgggtttttttgtttttttccattcctctctacttctgtttcctagctttttctttctggagtttaagtacagtgatggttggcttgagtacctttttaaatctagcccagtataaacattagcctgcttaatatttagacatttataggtagaattctgagcactcaactcatgtttggcattttaaagtaaaaacaagtgtgacttcgaggaccaaagaaattgtcagctatacatttatctttatgaactcatttatattcctttttaatgactcgttgttctaacatttcctagaagtgttcttataaaggtctaatgtatccacaggctgttgtcttattagtaaatgcaaagtaatgactttgtctgttttactctagtctttagtacttcaaaattaccttttcatatccatgatcttgagtccatttgggggatttttaagaatttgatgtatttcaatacactgttcaaaattaaattgtttaattttatgtatgagtatgtatgttcctgaaggtggtcctatttaaattattaaactattgtaactttgttcttgtg

SEQ ID NO: 27696 - DNA, 2943 bp, Artificial Sequence
  derived and/or modified sequence
aaaaaggaggcgcggccgggctttccagcctgtggccgctcccggctcggagtgtgatctaagcaggttgcgtaccttcctcaggtgactccggccacagcccattgtccgcggccaccggcggagtttagccgcagacctcgaagcgccccggggtccttcccgaacggcagcggctgcggcgggtccatggagaagggccctgtgcgggcaccggcggagaagccgcggggcgccaggtgcagcaatgggttccccgagcgggatccgccgcggcccgggcccagcaggccggcggagaagcccccgcggcccgaggccaagagcgcgcagcccgcggacggctggaagggcgagcggccccgcagcgaggaggataacgagctgaacctccctaacctggcagccgcctactcgtccatcctgagctcgctgggcgagaacccccagcggcaagggctgctcaagacgccctggagggcggcctcggccatgcagttcttcaccaagggctaccaggagaccatctcagatgtcctaaacgatgctatatttgatgaagatcatgatgagatggtgattgtgaaggacatagacatgttttccatgtgtgagcatcacttggttccatttgttggaaaggtccatattggttatcttcctaacaagcaagtccttggcctcagcaaacttgcgaggattgtagaaatctatagtagaagactacaagttcaggagcgccttacaaaacaaattgctgtagcaatcacggaagccttgcggcctgctggagtcggggtagtggttgaagcaacacacatgtgtatggtaatgcgaggtgtacagaaaatgaacagcaaaactgtgaccagcacaatgttgggtgtgttccgggaggatccaaagactcgggaagagttcctgactctcattaggagctgagcttcattcagtgtgtgtgcgttggttgccgatcgtactgccagtagcattgtctgtctgtccggtcttgtttgtacattccattttcaattgttacagatgtgaactttattccttgtcactaattatatttaaaattatttctaggaagtcaaataaatataataaagggttgagccctctactttcttcttgccacctttttgtggcaatattaaagtgaactgctaatagtgtaagtacgtgcacaaaaccactgccagataaccagaggggcctgggaagggagaagaattagtgtatttttttcaaatagtacagtaatttgcctcataagcataggagcattgggaatgagagggaactgtgcccagtatactgttttttttcttcctccaataaaagtggtgtagtgccgaaagtgctaaaatatttagtgcggtattgctctgtgaattcaagttcaacagacttcactttggtcatgtttattaaaccaccagtgacatttaaaaatatatttttagcagtcgtaatgttagtcaccaagggaaggtggtggaatgtctatgtttttgattttactgtgagttaaaaaggcacatttctaccttctattgtttttaaattcaagaatagggaattagttcctggtgttgtttacgagtgtattctcgtgtcaacatacagggatttagacatttaactctctgtgccttgataagaatatcatttagagtgtagatacttttgcctttttaaaaaagccattattttatgagacttagtactcacactgcaaataactagtcagctcagttttaactttataggtttattgagtttcctttgtgtgatccatgtagatgcctcaaaatgtttcttcttcttcttttttttaatcttataagatatttttctaagtatttccagaaacatttgagagtgcccatcattttcaggtctgcagaaccatagcttccacgcacctgaacgagcacagaatgaactgacggtggaagacattatgagctgtgtccaacgttttaaccaaagcgtatcgtaccaacgatctgtgaaaatgcactggaagcttctggtcccggtttcctttgtggtctatgtgggtcttgtcctcattgtaactccgtatagatggtataggtattttaatcctggaagctgttgccttattaatgattatcttaaaatttcctccattggggcagcgtgggccaaattaaaacaaacaaaaccgcaactcctccacagaaacacaaacacagttattccatgaagtttagtatttggttgacatagtgctcttcaaattcatcccattaccctaaaagtaataactttgatgcttgctttaactttagtcccatctctgccactttgatgctatttgggttatgatggggcaagatggcagaggtattgggtttttttgtttttttccattcctctctacttctgtttcctagctttttctttctggagtttaagtacagtgatggttggcttgagtacctttttaaatctagcccagtataaacattagcctgcttaatatttagacatttataggtagaattctgagcactcaactcatgtttggcattttaaagtaaaaacaagtgtgacttcgaggaccaaagaaattgtcagctatacatttatctttatgaactcatttatattcctttttaatgactcgttgttctaacatttcctagaagtgttcttataaaggtctaatgtatccacaggctgttgtcttattagtaaatgcaaagtaatgactttgtctgttttactctagtctttagtacttcaaaattaccttttcatatccatgatcttgagtccatttgggggatttttaagaatttgatgtatttcaatacactgttcaaaattaaattgtttaattttatgtatgagtatgtatgttcctgaaggtggtcctatttaaattattaaactattgtaactttg

SEQ ID NO: 27697 - DNA, 753 bp, Artificial Sequence
  derived and/or modified sequence
atggagaaaggtccagtgagagccccagcagagaaaccacggggagccagatgctcaaatggcttcccagagcgggacccccctagaccaggaccatctcgcccagccgagaagcccccacggcctgaggctaagagtgcccagcctgcagatggttggaaaggagagcggccaagatctgaggaagataatgagctgaacctgccgaatctcgccgctgcctactctagtatactgtcttcactcggagagaatccccagcgccaaggtctgctcaagacaccatggagggcagcctctgctatgcaattttttacgaagggataccaggagacgatcagtgatgtgctgaacgacgccatctttgacgaggaccacgatgaaatggtaattgtgaaagatatcgatatgttttcaatgtgcgaacaccatctggtgcctttcgtcggcaaagtgcacattggctatctgcccaacaaacaggtgctggggctatcaaaattggccagaatcgttgagatctactctcgcaggctgcaggtccaggaacgcctgacaaagcagatagccgtcgccatcacggaggccctcagacccgcaggagtgggggttgttgttgaggcaacccacatgtgcatggtcatgagaggggtgcagaagatgaactccaaaaccgtgacctccaccatgctgggcgtttttcgagaggacccaaaaacacgcgaggaatttctaacacttatccgtagttag

SEQ ID NO: 27698 - DNA, 753 bp, Artificial Sequence
  derived and/or modified sequence
atggagaaaggacctgttcgcgcaccggcagagaaaccaaggggcgctaggtgcagcaatgggttcccagaacgcgacccgccaagaccagggccttcccgtccagccgagaaacccccacgcccagaagcaaagagcgcacagcctgccgatggctggaaaggcgagcgaccccgtagtgaggaggataatgagctaaatctcccaaatttggctgctgcctattcgtcaatactcagcagcctcggcgaaaatcctcagcggcagggtctcctgaaaacaccttggcgcgctgcaagtgcaatgcagttttttaccaaaggatatcaagagactatctccgacgtgctgaacgacgctatctttgatgaggatcatgacgagatggtgatcgttaaagatatcgatatgttctccatgtgcgaacaccacttggttccgttcgtgggtaaggtgcacattggctacctccccaacaaacaagtcctgggtctgtccaaactggccagaattgtagaaatctacagccgacgcctccaggtacaagagcggcttacgaagcagattgccgtggccataacagaagccctgcgccctgctggcgtgggtgtggtcgtcgaggcaactcacatgtgcatggtaatgcggggagttcagaagatgaactccaaaactgtgacttccacgatgctgggagtcttccgcgaggacccgaagactagggaagagttcctcaccttgattcggtcctag

SEQ ID NO: 27699 - DNA, 753 bp, Artificial Sequence
  derived and/or modified sequence
atggaaaagggacctgttagggcgcccgctgagaagccaaggggcgcaagatgttcaaatggctttccagagagagatcccccccgcccagggccatcccggccagcagagaaaccaccccgcccagaagctaaaagtgcccaacccgcggatggttggaagggagagaggccccggagtgaagaggacaacgaactaaatctgcctaatttggctgctgcatactcctcgattttgtcaagcctgggcgaaaatccacagcggcaaggcttactgaaaacaccctggagggctgcatctgctatgcaattctttacaaagggctatcaggaaaccatatccgacgtactcaacgatgctattttcgatgaagaccacgatgagatggtgatagtgaaagatatcgatatgttctccatgtgtgagcatcatctcgtaccattcgtagggaaagtgcacatcggctatctccccaacaagcaggtgctaggactgagtaagctggccagaatcgtagagatttattcacgaaggctccaggttcaagaacgccttacaaagcagattgctgtggcgataacggaagctttgcgccccgcgggggtgggcgtcgtggtcgaagctacccacatgtgtatggtaatgaggggagtgcagaagatgaattccaagaccgtgacaagcaccatgctcggagtgttccgtgaggaccctaagacccgagaggagtttcttactctgataaggagttag

SEQ ID NO: 27700 - DNA, 753 bp, Artificial Sequence
  derived and/or modified sequence
atggaaaaaggaccagtaagagccccagctgaaaaaccaaggggggctaggtgcagtaacgggttcccagagagagatccacctaggcctggaccttcccgacctgccgagaaaccccccaggccagaagcaaaatccgcacagccagccgacggctggaagggggaaagaccgagaagcgaggaggataacgaattaaaccttcctaacctggccgcagcttattccagcatcctatcatccctcggagaaaacccacagcgccaggggctgctcaaaacaccctggagagcagcttctgctatgcagttctttactaaaggctaccaggaaaccatttcagacgtgttgaatgatgccattttcgacgaagaccacgacgagatggtgatagtaaaagacatagacatgttttcaatgtgcgaacaccacttagtgccctttgtgggaaaggtacacattggctacctgccaaataaacaggttctcggcctgtctaagctggcaagaatagtcgagatctatagcaggagactccaggttcaggaaagactcactaagcaaatcgccgtagccattacagaagcccttaggccagctggcgtgggagtagtggttgaggctacacatatgtgtatggtgatgcggggggtacagaaaatgaatagcaagactgtgacaagcaccatgcttggcgtgttccgggaggatcccaaaacccgtgaagagtttctgaccctcattagaagttag

SEQ ID NO: 27701 - DNA, 753 bp, Artificial Sequence
  derived and/or modified sequence
atggaaaagggacctgttagggcgcccgctgagaagccaaggggcgcaagatgttcaaatggctttccagagagagatcccccccgcccagggccatcccggccagcagagaaaccaccccgcccagaagctaaaagtgcccaacccgcggatggttggaagggagagaggccccggagtgaagaggacaacgaactaaatctgcctaatttggctgctgcatactcctcgattttgtcaagcctgggcgaaaatccacagcggcaaggcttactgaaaacaccctggagggctgcatctgctatgcaattctttacaaagggctatcaggaaaccatatccgacgtactcaacgatgctattttcgatgaagaccacgatgagatggtgatagtgaaagatatcgatatgttctccatgtgtgagcatcatctcgtaccattcgtagggaaagtgcacatcggctatctccccaacaagcaggtgctaggactgagtaagctggccagaatcgtagagatttattcacgaaggctccaggttcaagaacgccttacaaagcagattgctgtggcgataacggaagctttgcgccccgcgggtgtcggcgtagtggtagaggccacacacatgtgtatggtgatgaggggtgtgcagaaaatgaattccaaaacggtgacctcaaccatgctgggcgtctttcgagaggacccaaaaacacgggaggaatttctaaccttgattagatcatag

SEQ ID NO: 27702 - DNA, 753 bp, Artificial Sequence
  derived and/or modified sequence
atggaaaaagggccagtccgtgcccccgccgagaaacctcgcggcgcccgatgttctaatggatttcctgaacgtgatccacccaggcctggacctagtagacccgcagaaaagcctcccaggccagaagctaagagcgctcagcccgcagatggttggaagggggaaagaccccgttcagaagaggataacgagttgaatcttccaaatctggccgccgcttattcttccattttaagttccctgggcgagaacccacaacggcaaggacttcttaaaactccatggcgcgcagcatctgcaatgcagttcttcacaaaagggtaccaagaaactatatctgacgttctaaatgatgccattttcgacgaagatcacgatgaaatggtaattgtcaaggatatcgatatgttcagcatgtgcgagcaccacttagtcccattcgtgggcaaggttcatattgggtatttgcctaataaacaggttctcggcctttctaaactagcacggattgtggaaatctattcaaggcgtcttcaggtacaggaaagacttacaaagcagattgccgttgcaatcactgaggccctcagaccggcaggcgtgggggtcgttgtcgaagcaactcacatgtgcatggttatgaggggcgtacagaaaatgaattctaaaacagttactagcacaatgcttggcgtctttcgggaggatcccaagactcgagaggaattcctaacattaattcgatcatag

SEQ ID NO: 27703 - RNA, 896 nt, Artificial Sequence
  derived and/or modified sequence
gggaaauaagagagaaaagaagaguaagaagaaauauaagagccaccauggaaaaagggcccguccgagcacccgcggagaagccgagaggugcacggugcagcaauggcuucccggagcgggacccaccucggccaggacccagcagaccggcggagaaaccgccuaggcccgaggccaagucagcgcaacccgcggacggauggaagggagagcgcccucgauccgaagaagauaaugagcugaaccuuccuaaucuugcugcagcguauuccucaauccucucgucgcugggugaaaacccccagcgccagggacuguugaaaacgccguggagagccgcgucagcaaugcaguuuuucacgaaaggguaccaggaaaccauuucggacgugcucaacgaugccaucuuugacgaagaucacgaugagaugguaauugugaaagacauugacauguuuuccaugugugaacaccaucuggucccguucgucgguaaagugcauaucggguauuugccgaacaagcaaguguugggauugucgaagcuugcgaggaucguagagaucuacucacggcgacugcaggugcaggagagacucacuaaacagauugcggucgccaucacggaagccuugcggccagcgggggugggggugguagucgaggcuacacacaugugcauggucaugcgcggagugcaaaagaugaauuccaagacagucaccucgacgauguugggcguauucagggaagaucccaagacucgcgaggaguuucuuacacucaucagaucaugauaagcugccuucugcggggcuugccuucuggccaugcccuucuucucucccuugcaccuguaccucuuggucuuugaauaaagccugaguaggaag

SEQ ID NO: 27704 - RNA, 753 nt, Artificial Sequence
  derived and/or modified sequence
auggaaaagggaccuguuagggcgcccgcugagaagccaaggggcgcaagauguucaaauggcuuuccagagagagaucccccccgcccagggccaucccggccagcagagaaaccaccccgcccagaagcuaaaagugcccaacccgcggaugguuggaagggagagaggccccggagugaagaggacaacgaacuaaaucugccuaauuuggcugcugcauacuccucgauuuugucaagccugggcgaaaauccacagcggcaaggcuuacugaaaacacccuggagggcugcaucugcuaugcaauucuuuacaaagggcuaucaggaaaccauauccgacguacucaacgaugcuauuuucgaugaagaccacgaugagauggugauagugaaagauaucgauauguucuccaugugugagcaucaucucguaccauucguagggaaagugcacaucggcuaucuccccaacaagcaggugcuaggacugaguaagcuggccagaaucguagagauuuauucacgaaggcuccagguucaagaacgccuuacaaagcagauugcuguggcgauaacggaagcuuugcgccccgcgggggugggcgucguggucgaagcuacccacauguguaugguaaugaggggagugcagaagaugaauuccaagaccgugacaagcaccaugcucggaguguuccgugaggacccuaagacccgagaggaguuucuuacucugauaaggaguuag

SEQ ID NO: 27705 - RNA, 753 nt, Artificial Sequence
  derived and/or modified sequence
auggaaaaaggaccaguaagagccccagcugaaaaaccaaggggggcuaggugcaguaacggguucccagagagagauccaccuaggccuggaccuucccgaccugccgagaaaccccccaggccagaagcaaaauccgcacagccagccgacggcuggaagggggaaagaccgagaagcgaggaggauaacgaauuaaaccuuccuaaccuggccgcagcuuauuccagcauccuaucaucccucggagaaaacccacagcgccaggggcugcucaaaacacccuggagagcagcuucugcuaugcaguucuuuacuaaaggcuaccaggaaaccauuucagacguguugaaugaugccauuuucgacgaagaccacgacgagauggugauaguaaaagacauagacauguuuucaaugugcgaacaccacuuagugcccuuugugggaaagguacacauuggcuaccugccaaauaaacagguucucggccugucuaagcuggcaagaauagucgagaucuauagcaggagacuccagguucaggaaagacucacuaagcaaaucgccguagccauuacagaagcccuuaggccagcuggcgugggaguagugguugaggcuacacauauguguauggugaugcgggggguacagaaaaugaauagcaagacugugacaagcaccaugcuuggcguguuccgggaggaucccaaaacccgugaagaguuucugacccucauuagaaguuag

SEQ ID NO: 27706 - RNA, 753 nt, Artificial Sequence
  derived and/or modified sequence
auggaaaagggaccuguuagggcgcccgcugagaagccaaggggcgcaagauguucaaauggcuuuccagagagagaucccccccgcccagggccaucccggccagcagagaaaccaccccgcccagaagcuaaaagugcccaacccgcggaugguuggaagggagagaggccccggagugaagaggacaacgaacuaaaucugccuaauuuggcugcugcauacuccucgauuuugucaagccugggcgaaaauccacagcggcaaggcuuacugaaaacacccuggagggcugcaucugcuaugcaauucuuuacaaagggcuaucaggaaaccauauccgacguacucaacgaugcuauuuucgaugaagaccacgaugagauggugauagugaaagauaucgauauguucuccaugugugagcaucaucucguaccauucguagggaaagugcacaucggcuaucuccccaacaagcaggugcuaggacugaguaagcuggccagaaucguagagauuuauucacgaaggcuccagguucaagaacgccuuacaaagcagauugcuguggcgauaacggaagcuuugcgccccgcgggugucggcguagugguagaggccacacacauguguauggugaugaggggugugcagaaaaugaauuccaaaacggugaccucaaccaugcugggcgucuuucgagaggacccaaaaacacgggaggaauuucuaaccuugauuagaucauag

SEQ ID NO: 27707 - RNA, 753 nt, Artificial Sequence
  derived and/or modified sequence
auggaaaaagggccaguccgugcccccgccgagaaaccucgcggcgcccgauguucuaauggauuuccugaacgugauccacccaggccuggaccuaguagacccgcagaaaagccucccaggccagaagcuaagagcgcucagcccgcagaugguuggaagggggaaagaccccguucagaagaggauaacgaguugaaucuuccaaaucuggccgccgcuuauucuuccauuuuaaguucccugggcgagaacccacaacggcaaggacuucuuaaaacuccauggcgcgcagcaucugcaaugcaguucuucacaaaaggguaccaagaaacuauaucugacguucuaaaugaugccauuuucgacgaagaucacgaugaaaugguaauugucaaggauaucgauauguucagcaugugcgagcaccacuuagucccauucgugggcaagguucauauuggguauuugccuaauaaacagguucucggccuuucuaaacuagcacggauuguggaaaucuauucaaggcgucuucagguacaggaaagacuuacaaagcagauugccguugcaaucacugaggcccucagaccggcaggcgugggggucguugucgaagcaacucacaugugcaugguuaugaggggcguacagaaaaugaauucuaaaacaguuacuagcacaaugcuuggcgucuuucgggaggaucccaagacucgagaggaauuccuaacauuaauucgaucauag

SEQ ID NO: 27708 - protein, 213 aa, Artificial Sequence
  derived and/or modified sequence
MEKGPVRAPAEKPRGARCSNGFPERDPPRPGPSRPAEKPPRPEAKSAQPADGWKGERPRSEEDNELNLPNLAAAYSSILSSLGENPQRQGLLKTPWRAASAMQFFTKGYQETISDVLNDAIFDEDHDEMVIVKDIDMFSMCEHHLVPFVGKVHIGYLPNKQVLGLSKLARIVEIYSRRLQVQERLTKQIAVAITEALRPAGVGVVVEATSAEP

SEQ ID NO: 27709 - DNA, 642 bp, Artificial Sequence
  derived and/or modified sequence
atggagaagggccccgtgagagcccccgccgagaagcccagaggcgccagatgcagcaacggcttccccgagagagacccccccagacccggccccagcagacccgccgagaagccccccagacccgaggccaagagcgcccagcccgccgacggctggaagggcgagagacccagaagcgaggaggacaacgagctgaacctgcccaacctggccgccgcctacagcagcatcctgagcagcctgggcgagaacccccagagacagggcctgctgaagaccccctggagagccgccagcgccatgcagttcttcaccaagggctaccaggagaccatcagcgacgtgctgaacgacgccatcttcgacgaggaccacgacgagatggtgatcgtgaaggacatcgacatgttcagcatgtgcgagcaccacctggtgcccttcgtgggcaaggtgcacatcggctacctgcccaacaagcaggtgctgggcctgagcaagctggccagaatcgtggagatctacagcagaagactgcaggtgcaggagagactgaccaagcagatcgccgtggccatcaccgaggccctgagacccgccggcgtgggcgtggtggtggaggccaccagcgccgagccctag

SEQ ID NO: 27710 - DNA, 642 bp, Artificial Sequence
  derived and/or modified sequence
atggaaaaagggcctgtcagagcaccggcagaaaaaccacggggagctcgctgctctaacgggtttcctgagagggatcccccccgacccgggccgtctcgtcccgctgagaagcctccccggccggaggccaagtctgctcagcctgctgatgggtggaaaggggaacggccgcggtcagaggaggacaatgaactgaatttgccaaatctggccgccgcttacagctctatactgtcaagcctgggtgagaacccacagcggcagggattgcttaagactccctggagagctgctagtgccatgcagttttttacaaaaggatatcaggagaccatttcggatgtgctgaacgacgccatattcgatgaagaccatgatgagatggtgatcgtaaaggatatagacatgttctccatgtgtgagcaccacctggtccctttcgtcggcaaggtacacatcgggtatctccccaacaagcaggtgcttggcttgagcaagctggctcgtattgtggagatatattcccggcgactccaggtgcaagagagactgaccaagcagatcgctgtcgcaatcacagaggctttacgcccagctggtgtcggcgttgtcgtcgaagcaacgtctgcggagccttag

SEQ ID NO: 27711 - DNA, 642 bp, Artificial Sequence
  derived and/or modified sequence
atggagaagggccctgtgcgggccccagctgagaagcccaggggggcccgctgcagcaatggcttccctgagcgggaccccccccggcccggccccagcaggcctgctgagaagccacccaggcctgaggccaagagcgcccagcctgcagatggctggaagggggagcggcccaggtctgaggaggacaatgagctgaacctgcccaacctggccgccgcctacagcagcatcctgagcagcctgggggagaacccccagaggcagggcctgctgaagaccccctggagggctgccagcgccatgcagttcttcaccaagggctaccaggagaccatcagtgatgtgctgaatgatgccatctttgatgaggaccatgatgagatggtgattgtgaaggacatcgacatgttctccatgtgtgagcaccacctggtgccctttgtgggcaaggtgcacatcggctacctgcccaacaagcaggtgctgggcctgagcaagctggccagaattgtggagatctacagccggcggctgcaggtgcaggagcggctgaccaagcagattgctgtggccatcacagaggccctgcggcctgctggggtgggcgtggtggtggaggccaccagcgctgagccctag

SEQ ID NO: 27712 - DNA, 642 bp, Artificial Sequence
  derived and/or modified sequence
atggagaagggccccgtgcgggcccccgccgagaagccccggggcgcgcgctgttccaatgggttcccggagagagacccccctcgccccggtccctctcggccagccgagaaacctccccggccagaggccaaaagtgcgcagcctgctgatggttggaagggagagcggcccaggagcgaggaggataacgaactgaacttgcctaatctggcagctgcatacagcagcatcttgtcctccttaggggaaaatccccagaggcagggactgctgaaaacgccttggagagccgcctctgcgatgcagtttttcacaaagggatatcaagagactattagcgacgttcttaacgatgcgattttcgatgaggatcatgatgaaatggtaatagtgaaggacatcgacatgttctctatgtgcgagcaccacctggtcccgttcgtcggcaaggtgcacattggctatcttccaaataagcaagtgctcggcctcagcaagttggcacgtatcgtagaaatctacagccgccgtctccaagtgcaggaacggctgaccaaacaaattgccgttgcgatcactgaagcgctcaggcctgcaggggtcggtgtggtcgtggaagccacttcagcggaaccttag

SEQ ID NO: 27713 - DNA, 1805 bp, Artificial Sequence
  derived and/or modified sequence
cgctcccggctcggagtgtgatctaagcaggttgcgtaccttcctcaggtgactccggccacagcccattgtccgcggccaccggcggagtttagccgcagacctcgaagcgccccggggtccttcccgaacggcagcggctgcggcgggtccatggagaagggccctgtgcgggcaccggcggagaagccgcggggcgccaggtgcagcaatgggttccccgagcgggatccgccgcggcccgggcccagcaggccggcggagaagcccccgcggcccgaggccaagagcgcgcagcccgcggacggctggaagggcgagcggccccgcagcgaggaggataacgagctgaacctccctaacctggcagccgcctactcgtccatcctgagctcgctgggcgagaacccccagcggcaagggctgctcaagacgccctggagggcggcctcggccatgcagttcttcaccaagggctaccaggagaccatctcagatgtcctaaacgatgctatatttgatgaagatcatgatgagatggtgattgtgaaggacatagacatgttttccatgtgtgagcatcacttggttccatttgttggaaaggtccatattggttatcttcctaacaagcaagtccttggcctcagcaaacttgcgaggattgtagaaatctatagtagaagactacaagttcaggagcgccttacaaaacaaattgctgtagcaatcacggaagccttgcggcctgctggagtcggggtagtggttgaagcaacgtctgcagaaccatagcttccacgcacctgaacgagcacagaatgaactgacggtggaagacattatgagctgtgtccaacgttttaaccaaagcgtatcgtaccaacgatctgtgaaaatgcactggaagcttctggtcccggtttcctttgtggtctatgtgggtcttgtcctcattgtaactccgtatagatggtataggtattttaatcctggaagctgttgccttattaatgattatcttaaaatttcctccattggggcagcgtgggccaaattaaaacaaacaaaaccgcaactcctccacagaaacacaaacacagttattccatgaagtttagtatttggttgacatagtgctcttcaaattcatcccattaccctaaaagtaataactttgatgcttgctttaactttagtcccatctctgccactttgatgctatttgggttatgatggggcaagatggcagaggtattgggtttttttgtttttttccattcctctctacttctgtttcctagctttttctttctggagtttaagtacagtgatggttggcttgagtacctttttaaatctagcccagtataaacattagcctgcttaatatttagacatttataggtagaattctgagcactcaactcatgtttggcattttaaagtaaaaacaagtgtgacttcgaggaccaaagaaattgtcagctatacatttatctttatgaactcatttatattcctttttaatgactcgttgttctaacatttcctagaagtgttcttataaaggtctaatgtatccacaggctgttgtcttattagtaaatgcaaagtaatgactttgtctgttttactctagtctttagtacttcaaaattaccttttcatatccatgatcttgagtccatttgggggatttttaagaatttgatgtatttcaatacactgttcaaaattaaattgtttaattttatgtatgagtatgtatgttcctgaaggtggtcctatttaaattattaaac

SEQ ID NO: 27714 - DNA, 642 bp, Artificial Sequence
  derived and/or modified sequence
atggaaaaaggccctgtgcgcgctcctgccgaaaaaccgagaggagcgagatgttccaatggcttcccggagagagacccaccaagaccaggtccctccagaccagccgagaaacctccccgaccggaggcaaagagcgcccagccagccgatggctggaaaggagaacgacccagatccgaggaggataatgagctgaatttgccgaatctggctgcagcctacagttccatcctcagtagcctaggcgagaatccgcagaggcagggcctgctgaagactccttggcgagcagcttcggccatgcagttctttaccaaggggtatcaggagaccatatccgatgtcttaaatgatgccattttcgatgaggaccacgatgagatggtcatcgtaaaggacatcgacatgttctcaatgtgcgagcaccacctggtccctttcgtggggaaggtgcacattggctacctgccaaataagcaggtgctgggattgtccaagctggccaggattgttgagatttattcccgccgtctgcaggtacaggaacggctcacaaagcagatcgctgtggcaattaccgaggcactgcgtcctgccggagtcggggtggtggtggaagcaacatctgccgaaccctag

SEQ ID NO: 27715 - DNA, 642 bp, Artificial Sequence
  derived and/or modified sequence
atggaaaagggtcccgtgcgggccccggccgaaaaaccaagaggagcccgatgttctaacggcttcccagaacgcgacccaccaagaccgggaccaagccgacccgcagaaaagcctccccggcccgaggctaagagtgcccagcccgctgacggctggaaaggcgaacggcctcggtcagaagaagataatgagctaaatctgccaaacctggccgccgcctactcctccatcctgtccagtctaggggaaaacccacagaggcagggactgctaaagacgccctggagagctgcatcagctatgcaatttttcacgaagggatatcaggagacaatcagtgatgtgttgaacgacgcaatcttcgacgaagatcacgacgagatggtgatcgtgaaagatatcgatatgttttcaatgtgcgaacatcacctggtgccatttgtcggcaaagtgcacatcggatatctacctaacaaacaggttctcggactgagcaaactggcgcgtattgtcgaaatctatagcaggcgactgcaggttcaggaaaggttgaccaaacaaatcgccgtggccataaccgaggcgctcaggccagctggagtaggcgtggttgtggaagctacttccgcggagccatag

SEQ ID NO: 27716 - DNA, 642 bp, Artificial Sequence
  derived and/or modified sequence
atggagaaaggccccgtgcgagcccctgcagaaaaacccagaggagcccgatgttccaacggatttcccgagcgggacccaccaaggcctgggccatctcgtccagcagagaaacccccacgtcccgaggccaagagtgcccagcctgcagacggctggaagggagaaagacctaggtccgaggaggacaacgaactgaatctgcctaacctggctgctgcctactcatccatactttcctcacttggagaaaacccacagagacaaggcctgctgaaaacaccttggagagctgcctccgctatgcaatttttcacgaagggatatcaggagacaatcagtgatgtgttgaacgacgcaatcttcgacgaagatcacgacgagatggtgatcgtgaaagatatcgatatgttttcaatgtgcgaacatcacctggtgccatttgtcggcaaagtgcacatcggatatctacctaacaaacaggttctcggactgagcaaactggcgcgtattgtcgaaatctatagcaggcgactgcaggttcaggaaaggttgaccaaacaaatcgccgtggccataaccgaggcgctcaggccagctggggttggggtcgtcgtcgaagcaactagtgctgagccatag

SEQ ID NO: 27717 - RNA, 642 nt, Artificial Sequence
  derived and/or modified sequence
auggaaaagggucccgugcgggccccggccgaaaaaccaagaggagcccgauguucuaacggcuucccagaacgcgacccaccaagaccgggaccaagccgacccgcagaaaagccuccccggcccgaggcuaagagugcccagcccgcugacggcuggaaaggcgaacggccucggucagaagaagauaaugagcuaaaucugccaaaccuggccgccgccuacuccuccauccuguccagucuaggggaaaacccacagaggcagggacugcuaaagacgcccuggagagcugcaucagcuaugcaauuuuucacgaagggauaucaggagacaaucagugauguguugaacgacgcaaucuucgacgaagaucacgacgagauggugaucgugaaagauaucgauauguuuucaaugugcgaacaucaccuggugccauuugucggcaaagugcacaucggauaucuaccuaacaaacagguucucggacugagcaaacuggcgcguauugucgaaaucuauagcaggcgacugcagguucaggaaagguugaccaaacaaaucgccguggccauaaccgaggcgcucaggccagcuggaguaggcgugguuguggaagcuacuuccgcggagccauag

SEQ ID NO: 27718 - RNA, 642 nt, Artificial Sequence
  derived and/or modified sequence
auggagaaaggccccgugcgagccccugcagaaaaacccagaggagcccgauguuccaacggauuucccgagcgggacccaccaaggccugggccaucucguccagcagagaaacccccacgucccgaggccaagagugcccagccugcagacggcuggaagggagaaagaccuagguccgaggaggacaacgaacugaaucugccuaaccuggcugcugccuacucauccauacuuuccucacuuggagaaaacccacagagacaaggccugcugaaaacaccuuggagagcugccuccgcuaugcaauuuuucacgaagggauaucaggagacaaucagugauguguugaacgacgcaaucuucgacgaagaucacgacgagauggugaucgugaaagauaucgauauguuuucaaugugcgaacaucaccuggugccauuugucggcaaagugcacaucggauaucuaccuaacaaacagguucucggacugagcaaacuggcgcguauugucgaaaucuauagcaggcgacugcagguucaggaaagguugaccaaacaaaucgccguggccauaaccgaggcgcucaggccagcugggguuggggucgucgucgaagcaacuagugcugagccauag

SEQ ID NO: 27719 - protein, 51 aa, Artificial Sequence
  derived and/or modified sequence
MASSMRSLFSDHGKYVESFRRFLNHSTEHQCMQEFMDKKLPGIIGRYQNCC

SEQ ID NO: 27720 - DNA, 156 bp, Artificial Sequence
  derived and/or modified sequence
atggcttctagtatgagatccttattttctgaccacggaaagtacgtagagagtttccggagatttcttaatcatagcaccgagcaccagtgcatgcaggagtttatggataagaagctccccggcatcatcgggcggtatcagaactgctgttag

SEQ ID NO: 27721 - DNA, 504 bp, Artificial Sequence
  derived and/or modified sequence
ctttctcagaaaaccaaatatggcatcttccatgaggagcttgttttctgaccacgggaaatatgttgaatctttccggaggtttctcaaccattccacggaacaccagtgcatgcaggaattcatggacaagaagctgccaggcataataggaagataccagaattgctgttaacaaataaaatactggccagatgtgttggttcacgcctgtaatcctagcacttcgggaggctgaggcgggaggattacttgagcctaggagtttgagaccagcctgggcaacatagcaagatcccatctctacaaaaaagtgaaaaagttagctgaacaaggcggcatgcacatgctactccagacgctgaagtgggaagatcacttaagtccgagagatcgaggcttcagtgagatatggctgagacactgctctcagcctggatgacagagtgagaacctgtctcaaacaagagaaaaaaataaatcaaatgctactcaaaattctca

SEQ ID NO: 27722 - DNA, 156 bp, Artificial Sequence
  derived and/or modified sequence
atggccagctccatgaggagcctcttcagtgaccacggcaagtatgtggagagcttccgccgcttcctgaaccacagcacagagcaccagtgcatgcaggagttcatggacaagaagctgcccggcatcatcggccgctaccagaactgctgctag

SEQ ID NO: 27723 - DNA, 156 bp, Artificial Sequence
  derived and/or modified sequence
atggccagcagcatgcggagcctgttcagcgaccacggcaagtacgtggagtcattcaggcgcttccttaaccattcaacagaacaccagtgtatgcaggaattcatggacaaaaagctacccggtatcattggcagataccagaactgctgctag

SEQ ID NO: 27724 - DNA, 156 bp, Artificial Sequence
  derived and/or modified sequence
atggccagctcaatgaggagcctgttcagtgatcatggaaagtacgttgaatcttttcgcagatttctgaatcattctacagaacaccaatgcatgcaggagttcatggacaaaaaactgccgggaattatcggacggtaccaaaactgctgctag

SEQ ID NO: 27725 - DNA, 156 bp, Artificial Sequence
  derived and/or modified sequence
atggccagcagcatgagaagcctgttcagcgaccacggcaagtacgtggagagcttcagaagattcctgaaccacagcaccgagcaccagtgcatgcaggagttcatggacaagaagctgcccggcatcatcggcagataccagaactgctgctag

SEQ ID NO: 27726 - protein, 126 aa, Artificial Sequence
  derived and/or modified sequence
MASSMRSLFSDHGKYVESFRRFLNHSTEHQCMQEFMDKKLPGIIGRIGDTKSEIKILSIGGGADCLIRGSSRVLKRNSCFILCSTRQKDKPGMRIHDERSSELPFGAARLESKSAFPSFLVSFILF

SEQ ID NO: 27727 - DNA, 381 bp, Artificial Sequence
  derived and/or modified sequence
atggcgtcttccatgagaagtttgtttagcgaccacggcaagtacgttgaatcctttaggcgctttctgaaccattccacggagcatcagtgtatgcaagaattcatggacaaaaagctgcctggcatcatcggcaggattggcgacacaaagtccgagatcaaaatcctgtccattggcggcggagccgattgcctgatccggggaagctctcgcgttcttaaaaggaattcatgcttcattctctgttcaacaaggcagaaagacaagccagggatgcgtatacacgacgaaaggagcagcgaactgcccttcggagccgcccgcttggaatctaaaagcgcatttccgtcctttctggtgtcgttcatcctgttttag

SEQ ID NO: 27728 - DNA, 835 bp, Artificial Sequence
  derived and/or modified sequence
gactcagtaatgagctctacaagccagcctttgtggcatgttaaattcaaaacaagcttagcatttttttttttttttttggatagaaactggtgggggtggggaaagaaagagggaactgggaagagaaggaggggaacttaaaccttgcttcctgctctgtctttctcagaaaaccaaatatggcatcttccatgaggagcttgttttctgaccacgggaaatatgttgaatctttccggaggtttctcaaccattccacggaacaccagtgcatgcaggaattcatggacaagaagctgccaggcataataggaaggattggagacacaaaatcagaaattaagattctaagcataggcggaggtgcagattgtctcattcggggaagctccagggttctcaagcggaattcgtgtttcattttgtgtagcacccgtcagaaagacaagccaggcatgaggatccatgatgagcgctcttctgagttgccatttggagctgcccgtttagaaagcaaatctgcatttccctcattcctagtttccttcatcctcttttaagtgtcatcttttccatgaagcctactagatcacacagttgaaaattgcaaagtcttcacaccgcagcttcccctttctttgttgctttggttttctccgtgggacttcccaccatccgtaaaattaggtgtttttgcctgttttattcactgctacgtctccaatggttagaacctgacatttagtgggtgctcaataatatttgttgaagtaatgtataataacttcactttcttgagtaattactatatatcatgaactgtggtaaatta

SEQ ID NO: 27729 - DNA, 381 bp, Artificial Sequence
  derived and/or modified sequence
atggccagctccatgaggagcctcttcagtgaccacggcaagtatgtggagagcttccgccgcttcctgaaccacagcacagagcaccagtgcatgcaggagttcatggacaagaagctgcccggcatcatcggcagaattggagacaccaagtctgagatcaagatcctgagcattggaggcggcgctgactgcctgatccggggcagcagccgggtgctgaagaggaacagctgcttcatcctgtgcagcacccggcagaaggacaagccaggcatgagaattcatgatgagaggagcagcgagctgccctttggagctgcccggctggagagcaagagcgccttccccagcttcctggtgtccttcatcctcttctag

SEQ ID NO: 27730 - DNA, 381 bp, Artificial Sequence
  derived and/or modified sequence
atggccagcagcatgcggagcctgttcagcgaccacggcaagtacgtcgaaagcttcaggagattcctgaatcacagcaccgaacatcaatgcatgcaagagtttatggataagaagctccccgggatcattgggcgtatcggcgatacaaaatccgagatcaagatactttcaattggaggaggtgcagactgtctgatacgcggaagctcccgcgtgctgaaacggaattcatgcttcatactttgttccactcgtcaaaaggataaaccaggaatgaggatccacgacgagcgcagttcggaactgcccttcggtgctgcgaggcttgaatctaagtcggcgtttccttcatttttggtgtctttcattctcttctag

SEQ ID NO: 27731 - DNA, 381 bp, Artificial Sequence
  derived and/or modified sequence
atggcaagctctatgaggagcctttttagtgatcatggtaaatacgttgagtccttcagaagattcttaaatcattctaccgaacaccagtgtatgcaagaatttatggacaaaaagttgccagggataattggtaggatcggcgacactaagagtgaaattaaaattctaagcatagggggtggcgctgattgcctgataaggggcagcagtagggtcttaaaaagaaatagctgttttatcctttgttctactcgccagaaagacaaacctggaatgagaatccacgatgaacgatcttcagaactccctttcggggcagccaggttggaatccaaatctgcttttccgagttttctggtctcattcattcttttctag

SEQ ID NO: 27732 - DNA, 381 bp, Artificial Sequence
  derived and/or modified sequence
atggccagcagcatgagaagcctgttcagcgaccacggcaagtacgtggagagcttcagaagattcctgaaccacagcaccgagcaccagtgcatgcaggagttcatggacaagaagctgcccggcatcatcggcagaatcggcgacaccaagagcgagatcaagatcctgagcatcggcggcggcgccgactgcctgatcagaggcagcagcagagtgctgaagagaaacagctgcttcatcctgtgcagcaccagacagaaggacaagcccggcatgagaatccacgacgagagaagcagcgagctgcccttcggcgccgccagactggagagcaagagcgccttccccagcttcctggtgagcttcatcctgttctag

SEQ ID NO: 27733 - protein, 778 aa, Artificial Sequence
  derived and/or modified sequence
MDSKESLTPGREENPSSVLAQERGDVMDFYKTLRGGATVKVSASSPSLAVASQSDSKQRRLLVDFPKGSVSNAQQPDLSKAVSLSMGLYMGETETKVMGNDLGFPQQGQISLSSGETDLKLLEESIANLNRSTSVPENPKSSASTAVSAAPTEKEFPKTHSDVSSEQQHLKGQTGTNGGNVKLYTTDQSTFDILQDLEFSSGSPGKETNESPWRSDLLIDENCLLSPLAGEDDSFLLEGNSNEDCKPLILPDTKPKIKDNGDLVLSSPSNVTLPQVKTEKEDFIELCTPGVIKQEKLGTVYCQASFPGANIIGNKMSAISVHGVSTSGGQMYHYDMNTASLSQQQDQKPIFNVIPPIPVGSENWNRCQGSGDDNLTSLGTLNFPGRTVFSNGYSSPSMRPDVSSPPSSSSTATTGPPPKLCLVCSDEASGCHYGVLTCGSCKVFFKRAVEGRQHNYLCAGRNDCIIDKIRRKNCPACRYRKCLQAGMNLEARKTKKKIKGIQQATTGVSQETSENPGNKTIVPATLPQLTPTLVSLLEVIEPEVLYAGYDSSVPDSTWRIMTTLNMLGGRQVIAAVKWAKAIPGFRNLHLDDQMTLLQYSWMFLMAFALGWRSYRQSSANLLCFAPDLIINEQRMTLPCMYDQCKHMLYVSSELHRLQVSYEEYLCMKTLLLLSSVPKDGLKSQELFDEIRMTYIKELGKAIVKREGNSSQNWQRFYQLTKLLDSMHEVVENLLNYCFQTFLDKTMSIEFPEMLAEIITNQIPKYSNGNIKKLLFHQK

SEQ ID NO: 27734 - DNA, 2337 bp, Artificial Sequence
  derived and/or modified sequence
atggacagcaaggagagcctgacccccggcagagaggagaaccccagcagcgtgctggcccaggagagaggcgacgtgatggacttctacaagaccctgagaggcggcgccaccgtgaaggtgagcgccagcagccccagcctggccgtggccagccagagcgacagcaagcagagaagactgctggtggacttccccaagggcagcgtgagcaacgcccagcagcccgacctgagcaaggccgtgagcctgagcatgggcctgtacatgggcgagaccgagaccaaggtgatgggcaacgacctgggcttcccccagcagggccagatcagcctgagcagcggcgagaccgacctgaagctgctggaggagagcatcgccaacctgaacagaagcaccagcgtgcccgagaaccccaagagcagcgccagcaccgccgtgagcgccgcccccaccgagaaggagttccccaagacccacagcgacgtgagcagcgagcagcagcacctgaagggccagaccggcaccaacggcggcaacgtgaagctgtacaccaccgaccagagcaccttcgacatcctgcaggacctggagttcagcagcggcagccccggcaaggagaccaacgagagcccctggagaagcgacctgctgatcgacgagaactgcctgctgagccccctggccggcgaggacgacagcttcctgctggagggcaacagcaacgaggactgcaagcccctgatcctgcccgacaccaagcccaagatcaaggacaacggcgacctggtgctgagcagccccagcaacgtgaccctgccccaggtgaagaccgagaaggaggacttcatcgagctgtgcacccccggcgtgatcaagcaggagaagctgggcaccgtgtactgccaggccagcttccccggcgccaacatcatcggcaacaagatgagcgccatcagcgtgcacggcgtgagcaccagcggcggccagatgtaccactacgacatgaacaccgccagcctgagccagcagcaggaccagaagcccatcttcaacgtgatcccccccatccccgtgggcagcgagaactggaacagatgccagggcagcggcgacgacaacctgaccagcctgggcaccctgaacttccccggcagaaccgtgttcagcaacggctacagcagccccagcatgagacccgacgtgagcagcccccccagcagcagcagcaccgccaccaccggccccccccccaagctgtgcctggtgtgcagcgacgaggccagcggctgccactacggcgtgctgacctgcggcagctgcaaggtgttcttcaagagagccgtggagggcagacagcacaactacctgtgcgccggcagaaacgactgcatcatcgacaagatcagaagaaagaactgccccgcctgcagatacagaaagtgcctgcaggccggcatgaacctggaggccagaaagaccaagaagaagatcaagggcatccagcaggccaccaccggcgtgagccaggagaccagcgagaaccccggcaacaagaccatcgtgcccgccaccctgccccagctgacccccaccctggtgagcctgctggaggtgatcgagcccgaggtgctgtacgccggctacgacagcagcgtgcccgacagcacctggagaatcatgaccaccctgaacatgctgggcggcagacaggtgatcgccgccgtgaagtgggccaaggccatccccggcttcagaaacctgcacctggacgaccagatgaccctgctgcagtacagctggatgttcctgatggccttcgccctgggctggagaagctacagacagagcagcgccaacctgctgtgcttcgcccccgacctgatcatcaacgagcagagaatgaccctgccctgcatgtacgaccagtgcaagcacatgctgtacgtgagcagcgagctgcacagactgcaggtgagctacgaggagtacctgtgcatgaagaccctgctgctgctgagcagcgtgcccaaggacggcctgaagagccaggagctgttcgacgagatcagaatgacctacatcaaggagctgggcaaggccatcgtgaagagagagggcaacagcagccagaactggcagagattctaccagctgaccaagctgctggacagcatgcacgaggtggtggagaacctgctgaactactgcttccagaccttcctggacaagaccatgagcatcgagttccccgagatgctggccgagatcatcaccaaccagatccccaagtacagcaacggcaacatcaagaagctgctgttccaccagaagtag

SEQ ID NO: 27735 - DNA, 2337 bp, Artificial Sequence
  derived and/or modified sequence
atggatagcaaggaatcactcaccccaggcagggaagaaaacccctcttcggtgctggcgcaggagagaggagacgtgatggatttctataagacgctgcgtgggggtgccaccgtcaaggtgtctgcctccagtccgtcactggccgtggcaagtcagtccgactctaaacagagacgtctcctggtggatttccctaaaggctctgtgtccaacgcacagcagcccgatctatccaaagccgtgtctctgagcatggggctttatatgggcgagacagagacgaaggtcatggggaatgatcttggtttcccgcagcagggccagatttccctcagcagcggcgaaactgatctgaaactgctggaggaaagcatcgctaacttgaaccgctccaccagcgtgcccgaaaatcccaagagctcggctagcacagcagtctcagctgcccccacagaaaaagaattccctaaaacacactcagacgtcagctccgagcaacaacacttaaagggccagacagggacgaatggcgggaatgtgaaactgtacacaactgatcagagcacgttcgacatccttcaggacttggaattttcaagcggaagtcctgggaaggaaactaatgagagcccatggaggagcgatctgttaattgatgagaattgtctgctcagtccgctcgctggagaagacgattcgttccttctcgaaggtaacagtaatgaggattgtaaaccactcattctgccagacactaagccaaaaatcaaagacaacggagatcttgtcctgtcttcccctagtaatgtgacactacctcaggtgaagactgagaaagaggatttcattgaactgtgcactcctggcgtaataaagcaggaaaaactgggtaccgtctactgccaggcatcattccccggcgcgaatatcataggaaataagatgtcagcaatcagcgttcatggggtctccacatctggcggacagatgtatcactatgatatgaataccgcatctttgtcgcaacagcaggatcagaaaccaatcttcaatgtgatccctcctattcccgtggggtccgagaactggaataggtgccagggttccggagacgacaatctgactagcctcggcacactgaactttccagggcgcaccgtgtttagtaacggttactcgagtccatcaatgcgccccgacgtgtcttctcctccctcttcctcctctaccgcaaccaccggtcctccccctaaactgtgcttagtgtgctccgatgaggcgtctggctgtcactacggcgtcttgacatgcggttcttgcaaagtgttctttaagcgtgctgtggagggtagacaacacaattacctgtgcgcaggtcgtaacgactgcatcatcgataagattaggcgcaaaaactgtcccgcctgccgctatcgaaaatgcctgcaggccggaatgaacctagaagcccgcaaaacaaagaagaagatcaagggaatccaacaggctaccactggggtgagccaggaaacaagcgaaaatcccggaaacaaaacaatcgtgccagctacactccctcaattaacacctacactcgtctccctactggaggtgattgagcccgaggtgctgtatgctggctatgactccagcgtccctgacagcacctggcggattatgactacattgaacatgctgggcgggaggcaagtgatcgccgctgtgaagtgggcaaaggccattccaggttttagaaatctccatctcgatgatcagatgactctgctccagtactcctggatgttccttatggcgttcgcgctgggctggaggagctaccggcagtctagtgccaacttgctgtgttttgccccagacctgataattaacgaacaaagaatgaccctaccctgcatgtatgaccagtgcaaacacatgctgtacgttagctctgagctgcatcgcctgcaagtgtcttatgaagagtacctctgtatgaaaaccctgctcctgctcagcagcgtccctaaggatggcctcaaatctcaggagttattcgacgagatccggatgacctatattaaagagctcggtaaagcgatcgtaaagagagaggggaactcctcccagaactggcagcggttctatcaactgacaaagctacttgactcgatgcacgaggtggtagaaaatttactcaactattgttttcagacttttctggacaagacaatgtccatcgaatttcccgagatgctggcggaaataattactaaccagatccccaaatatagtaatggtaacataaagaaacttttatttcatcagaagtag

SEQ ID NO: 27736 - DNA, 2337 bp, Artificial Sequence
  derived and/or modified sequence
atggacagcaaggagagcctgaccccaggccgggaggagaaccccagctctgtgctggcccaggagagaggagatgtgatggacttctacaagaccctgcggggcggggccaccgtgaaggtgtctgccagcagccccagcctggccgtggccagccagagcgacagcaagcagaggcggctgctggtggacttccccaagggctctgtgtccaatgcccagcagcctgacctgagcaaggctgtgtccctgtccatgggcctgtacatgggagaaacagagaccaaggtgatgggaaatgacctgggcttcccccagcagggccagatcagcctgagcagcggggagacagacctgaagctgctggaggagagcatcgccaacctgaacagaagcacctctgtgcctgagaaccccaagagcagcgccagcacagctgtgtctgctgcccccacagagaaggagttccccaagacccacagtgatgtgtcctctgagcagcagcacctgaagggccagacaggcaccaatggaggaaatgtgaagctgtacaccacagaccagagcacctttgacatcctgcaggacctggagttcagcagcggcagccctgggaaggagaccaatgaaagcccctggaggagtgacctgctgattgatgagaactgcctgctgagccccctggccggagaagatgacagcttcctgctggagggcaacagcaatgaagactgcaagcccctcatcctgcctgacaccaagcccaagatcaaggacaacggggacctggtgctgagcagccccagcaatgtgaccctgccccaggtgaagacagagaaggaggacttcatcgagctgtgcaccccaggagtcatcaagcaggagaagctgggcaccgtgtactgccaggccagcttccctggggccaacatcatcggcaacaagatgtctgccatctctgtgcacggcgtgtccaccagcggcggccagatgtaccactatgacatgaacacagccagcctgagccagcagcaggaccagaagcccatcttcaacgtcatcccccccatccctgtgggcagcgagaactggaaccgctgccagggcagcggagatgacaacctgaccagcctgggcaccctgaacttccctggccgcacagtgttcagcaatggctacagcagccccagcatgaggccagatgtgagcagcccccccagcagcagcagcacagccaccaccggccccccacccaagctgtgcctggtgtgcagtgatgaggccagcggctgccactatggagtgctgacctgtggcagctgcaaggtgttcttcaagagagctgtggagggccggcagcacaactacctgtgtgccggcagaaatgactgcatcatcgacaagatccggaggaagaactgcccagcctgccgctacaggaagtgcctgcaggccggcatgaacctggaggccaggaagaccaagaagaagatcaagggcatccagcaggccaccaccggggtgtcccaggagaccagcgagaaccctggcaacaagaccatcgtgcctgccaccctgccccagctgacccccaccctggtgtccctgctggaggtgattgagcctgaggtgctgtatgccggctatgacagctctgtgcctgacagcacctggaggatcatgaccaccctgaacatgctgggcggccggcaggtgattgctgctgtgaagtgggccaaggccatccctggcttcaggaacctgcacctggatgaccagatgaccctgctgcagtacagctggatgttcctgatggcctttgccctgggctggaggagctaccggcagagcagcgccaacctgctgtgctttgccccagacctgatcatcaatgagcagaggatgaccctgccctgcatgtatgaccagtgcaagcacatgctgtatgtgagcagcgagctgcaccggctgcaggtgtcctatgaggagtacctgtgcatgaagaccctgctgctgctgagctctgtgcccaaggatggcctgaagagccaggagctgtttgatgagatccgcatgacctacatcaaggagctgggcaaggccatcgtgaagcgggagggcaacagcagccagaactggcagcgcttctaccagctgaccaagctgctggacagcatgcatgaggtggtggagaacctgctgaactactgcttccagaccttcctggacaagaccatgagcattgagttccctgagatgctggccgagatcatcaccaaccagatccccaagtacagcaatggaaacatcaagaagctgctcttccaccagaagtag

SEQ ID NO: 27737 - DNA, 2337 bp, Artificial Sequence
  derived and/or modified sequence
atggacagcaaggagagcctgacccccggccgggaggagaaccccagttccgttttagcccaagagcgtggagatgttatggatttctacaagactttgcggggcggcgccacagtaaaggtctccgcctccagcccatctctcgccgtggcctctcagtcagatagtaagcagcgccgcctactagttgacttccccaaaggctccgtctctaacgctcagcagcctgacttgtcaaaagccgtctccctgtctatgggcctctatatgggtgaaacagaaaccaaggtgatgggcaacgacctgggcttcccacagcagggtcaaataagcctctctagcggggagaccgacctgaagttgctcgaagaaagcattgctaacctgaaccgctccactagcgtgcctgagaatcctaaatcttccgcgtcaaccgctgtctccgcagctccgacagagaaggagttccccaaaactcattcagatgtttcttcggagcagcagcatttgaagggccagacgggcacaaatggcggcaacgttaaactctataccacagatcagtctacatttgacatcttacaagacctcgagtttagtagcggctcccctggcaaggaaactaacgaatccccctggaggagcgatttattaatcgacgaaaattgtctgctctcccctttggctggtgaagacgactctttcctgctggagggcaatagtaacgaggattgtaagcctctgatcttgccggatacgaaacccaaaatcaaggataatggcgaccttgtgctatccagcccctcaaatgtgacactgcctcaggttaagaccgagaaggaagatttcattgaactttgcactcctggcgtaatcaaacaggaaaaattaggcaccgtgtactgccaggcgtctttccccggagccaatataattggtaataaaatgagtgctatttctgtgcatggggtgtctaccagcggcggccagatgtaccactacgacatgaataccgccagcctttctcagcagcaggatcaaaaacccattttcaatgtcataccgccaattcccgtcggtagcgaaaactggaataggtgtcagggatccggcgacgacaatctaacctccctaggcactctgaatttccccggaaggactgtttttagtaatgggtacagcagcccaagcatgaggccagatgtgagcagtccaccctcgagctcttccacggcgactaccggtccccctcccaagctgtgcctggtctgttccgacgaagccagcggatgccactacggggtgctaacttgtgggagctgtaaggttttctttaagcgcgcagtggaagggcgacagcacaattacctctgcgcagggagaaacgattgcattattgacaagattcgaaggaaaaattgcccagcctgtcgatacagaaagtgtcttcaagccggaatgaacttggaggcccgaaagacgaaaaaaaagattaaggggattcaacaggctactactggcgttagccaggaaacgtcagagaatcctggtaacaaaaccatagtacctgcgacgctgcctcagctcacaccgacgttagtctccctgctcgaagtgatcgaaccagaggttctttatgccgggtacgattcttccgttccagacagcacttggaggatcatgacaacgcttaatatgctggggggacgtcaagtgattgccgcagtcaagtgggcaaaggcgattcccggcttcaggaacctgcacttagacgatcaaatgacactgctgcaatattcctggatgtttctgatggcgtttgccttgggttggaggtcatataggcagagctcagctaacttactctgcttcgccccggacctaatcattaacgagcaaagaatgaccctgccttgcatgtacgaccagtgcaagcacatgctgtacgtgtcaagcgaattgcaccgactgcaggtgtcctatgaggagtacctgtgtatgaagactctgttgttactgtcatctgtcccaaaagacggcctgaaatctcaggagctgttcgacgagatcagaatgacttatattaaagaactgggcaaggccattgtcaagcgtgaggggaattcctcgcagaattggcaacgcttctatcagctcacgaagctgcttgactccatgcacgaagtcgttgagaatctgttgaattactgtttccagacatttttggataaaaccatgtctatcgagttccccgagatgctcgcagaaattatcacaaatcagattccaaaatactcaaacggtaatattaagaaactgctatttcaccaaaaatag

SEQ ID NO: 27738 - DNA, 2337 bp, Artificial Sequence
  derived and/or modified sequence
atggactcaaaggagagcttaacacctggtagggaggaaaatccgagcagtgttttagctcaagagcgtggcgatgtgatggatttttacaagactctgaggggcggtgctacagtgaaggtgagtgctagttctccctcattggcggtcgctagccagtcagactcaaagcagcggaggctgctggttgattttcccaaagggagcgtgtctaacgctcagcagcccgacctgtccaaagcagtttccctttccatgggcctgtacatgggcgagacagaaacaaaagtgatgggaaatgacttggggttcccccagcagggacagatctctctctcatcgggggaaacagatctgaagctgctcgaagaatccatagccaatttaaaccgttccaccagcgtacccgagaatcccaagagcagtgcctcaaccgcagtctccgccgctccaaccgagaaggagtttcctaagacccactccgatgtctccagtgaacagcaacacctgaaaggtcaaaccggcacaaacgggggtaatgtgaaattgtacacaaccgatcagtctacgttcgacatcctgcaagatcttgaattctccagcggatcccccggaaaggaaacaaatgaatccccttggcgcagtgacttgctaatcgatgaaaactgtctgctgtcacctttggccggtgaagacgacagctttcttctggaaggcaatagcaatgaagactgcaaaccactcattctgcctgacacaaagcctaagattaaggataacggcgacctggtcctgagctcccctagtaacgtcaccctcccccaggttaagacagagaaggaggattttatcgaactgtgtactcctggagtaataaagcaagaaaaactgggcacagtctactgtcaggcctccttccccggagcaaacatcatcggaaataagatgtcagctattagcgtgcacggtgtttcgacatccgggggacagatgtaccattatgatatgaataccgcatccctgtcccagcagcaagaccagaaacccatttttaatgtaattccaccaattcccgtgggatcagagaactggaaccgttgtcaggggtccggcgatgacaacttgacaagcctcggaacactcaacttccccggtcggacagtattttccaacggatactcctcgccatcaatgagaccagacgtgagcagtccaccttcttccagcagcacagccactactggcccaccacctaagctgtgcttagtttgctcagacgaagctagcggttgtcactatggcgtcctaacatgcggttcctgtaaagttttcttcaaacgagcggtagaagggaggcagcataattatctgtgtgcaggcaggaacgactgtataatagataagattaggcggaagaattgcccagcatgtaggtacaggaaatgtcttcaagctggcatgaatctagaggccaggaaaaccaagaagaagattaagggaatccagcaagccaccaccggcgtatcccaggaaacctccgagaatccgggaaacaaaaccattgtgcccgcaacactgccccagcttactcccacgttagtatcacttctggaggtgatcgaacctgaagttttgtacgccggatatgactcctcagttcctgattccacatggcgcataatgacgacccttaatatgctgggcggtcgccaggtgattgctgccgtcaaatgggccaaagcgattccaggtttccggaacctgcacctggacgaccaaatgaccctcctgcagtattcatggatgtttctgatggcctttgccctgggctggagatcgtatcgccagtcatcagcaaacctgctttgcttcgcgccagatctgataatcaacgagcaacgaatgacccttccctgcatgtatgatcagtgcaaacacatgctgtacgtgtcatccgagctgcaccgcctccaggttagttatgaggagtatctgtgcatgaagactctgttactgctctctagtgtcccgaaagacggattgaagtcgcaggagctgttcgatgagatccgtatgacctatataaaggagctgggtaaagcaatcgtgaaacgtgaaggcaactcctctcaaaactggcaacgtttctaccaactgacgaagttattggacagcatgcacgaggtcgttgagaacctgctgaactattgctttcaaactttcctcgataagacaatgtctattgagttcccggaaatgttggccgagattataacaaatcagattcctaagtatagcaacgggaatataaaaaaactattatttcatcaaaaatag

SEQ ID NO: 27739 - DNA, 2337 bp, Artificial Sequence
  derived and/or modified sequence
atggattcaaaagagagtttgacacctggaagggaagagaacccttccagcgtgttggcccaggagcgaggcgacgtgatggatttttacaagactttgcgagggggagctacagtgaaggtctcagccagttccccaagtctggcagtggccagccagtctgacagcaagcaacggcgattactggtagatttccccaaaggcagcgtcagtaacgctcaacagcctgatctgtcgaaagccgtcagcttgagcatgggcctgtatatgggcgaaaccgagacaaaggttatgggtaatgacctgggcttcccacagcagggccagatcagcttgagttctggggaaaccgacctaaagttgctggaggagtccattgctaacctaaatcgaagcacatccgtcccagaaaatcccaaaagctctgctagcaccgccgtgtccgctgctcccaccgagaaagaattcccaaagacacactccgatgtgtcctcggagcagcaacatctcaagggtcagacaggaaccaatggaggcaatgttaagctgtatacaaccgaccagagcacctttgacatccttcaggatctggagttcagttctgggtccccggggaaggaaactaatgaaagcccttggaggagcgacctgttgatcgatgaaaattgtctactctccccgcttgctggagaagacgattcttttctcctggagggcaatagtaatgaggactgcaaacccctgatcctgccagacacaaaacctaagattaaggataacggagacctggtgctcagctcgccatccaatgttacccttccacaagtaaaaaccgagaaggaggatttcatcgagctgtgcacccccggagtaatcaagcaggagaagctgggtacagtttactgtcaagccagtttcccaggcgctaacatcataggtaataaaatgtccgcaatttcagtgcatggtgtttctacctccgggggccaaatgtatcattatgacatgaacacagcttccttatcccaacaacaggaccaaaaacctatattcaacgtgatcccgcctattcctgtcggcagtgagaactggaatcgctgtcagggctccggcgacgacaacctgactagcttaggcacattgaacttcccgggacgcacagtgttttccaacggttactcaagcccttcgatgaggccagacgtgtcttcccctcccagtagctcctccacagctacgacaggccctcccccaaaactgtgcctggtgtgttccgatgaagctagcggatgccattacggtgtgctgacatgcggtagctgcaaagtcttctttaaaagagccgtagaagggcgtcagcacaattatctttgcgcaggcagaaatgactgtatcatcgataagatcagacggaagaactgtccggcgtgccggtacagaaaatgcttgcaagctggcatgaatctcgaggcacgcaagacgaagaaaaaaattaagggaattcagcaggcaactactggagtgtcacaagaaacctctgaaaatccagggaataagactatagtaccagctaccctacctcaattaacgccaaccctggtttcactgctcgaggtcattgaacccgaagtgttgtatgccgggtacgatagctcagtgccggactcaacctggagaattatgacaacactgaatatgctgggaggtcggcaggttatcgcggccgttaaatgggcaaaagccattcctggcttcagaaatctgcaccttgacgaccaaatgacactgctgcaatacagttggatgttcttaatggcctttgctctgggttggcgctcctaccgccaatcctctgcaaacctgctttgtttcgcccctgacctcattatcaacgaacagagaatgacgctgccttgtatgtacgaccagtgcaagcacatgctctacgttagctctgagctgcataggctgcaggtctcgtatgaggagtatctgtgtatgaaaaccctactccttctctcctctgtccccaaagacggcctgaaatcccaggaattgtttgatgagattaggatgacttacattaaggagctcggcaaagcaattgtaaagcgagaaggcaatagctcccagaattggcagagattctaccagctgaccaaactgctagactcaatgcatgaggtggtggagaacctgctgaattattgtttccagaccttcctcgataaaaccatgagtatcgagtttcccgaaatgttggcggaaattattacgaaccaaatccccaaatattcaaatgggaacatcaagaagttgttatttcatcagaaatag

SEQ ID NO: 27740 - DNA, 2337 bp, Artificial Sequence
  derived and/or modified sequence
atggatagcaaagagtccttaacaccgggcagggaagagaatccttcttccgtgctcgcccaagagaggggcgacgttatggatttctacaaaaccctccgcggcggggccacggtcaaagtgtcagcttccagtccttcgctagccgtcgccagccaaagcgatagtaagcagcggcgcttgctggtagattttcccaaaggatcagtgagtaacgcgcaacagccagacctgagcaaagctgtctcactgtccatgggcctctacatgggcgagaccgaaaccaaggttatgggaaatgatctgggctttcctcaacaaggccagatttctctgtcgagcggggagaccgacctgaaacttctggaggaaagcatcgcgaaccttaacaggtctacttcagtccctgaaaatcccaagtcaagtgcatctacagccgtctccgcggccccaaccgagaaggagtttcccaaaactcatagtgacgtcagttctgagcaacagcatcttaagggacaaaccggcaccaatgggggcaatgtaaaactgtacacaacagaccagagcactttcgatattttacaagacctggagttttcctccggctccccaggcaaagagactaatgaatctccatggcgctcagacctgctgatagacgaaaattgccttctgagcccactggcaggtgaagatgacagcttcttgttggagggaaacagtaacgaagactgcaagcccctgatactgcccgatactaagcccaaaattaaggataacggcgatctcgtgctgtcgagcccctctaatgtaacgcttccacaggtgaaaacagagaaggaggacttcattgaactgtgcacccctggggtgatcaagcaagagaaacttggaaccgtgtactgccaagccagtttccccggggccaacattatcggcaataagatgtcagcaatttctgtgcatggcgtaagcacctctggcggtcaaatgtatcactatgacatgaatacagcttccctatcgcagcagcaggaccagaaacctatatttaatgtgattcctccaatccctgtgggttccgaaaactggaaccgctgccaggggtcaggagacgataatctaacatcgctgggcacactgaacttccccggtaggaccgttttctccaacggttacagcagccctagtatgcgaccagatgtgtcttcccctcccagtagctcgtctaccgccaccactgggcctccaccgaagctatgcctggtatgcagcgatgaggcgtccggatgtcactacggagtgctgacttgcggatcctgtaaagtcttctttaagcgcgctgtggagggacgccaacataattatctgtgcgccggacgcaacgactgtattatagataagatccgacggaaaaactgcccagcatgtagatatagaaagtgcctgcaggctggcatgaatttggaggcgaggaaaaccaagaagaagattaaaggcatccagcaagcaaccacaggagtgagccaagaaacgagtgaaaatcccggcaacaaaaccatcgtgcctgccaccctgccccagttgacccctactttggtgtctctcttggaagtgatagaaccagaggtgctgtatgccggatatgacagtagcgtcccagatagcacatggaggatcatgacaacactcaatatgcttgggggcagacaggttatcgccgccgttaagtgggcaaaggctatccccgggttccgcaatctgcacctcgatgaccaaatgaccttgctgcagtattcctggatgtttttaatggcattcgcgctcgggtggaggtcctacagacaatcatcagccaacctgctctgcttcgcccctgatctaatcattaatgaacagcgcatgacgctgccttgcatgtatgaccagtgcaaacacatgctgtatgtgagcagtgaattgcatcggttgcaggtaagctatgaggagtacctgtgtatgaaaacactgcttctgctgtcctctgtgccaaaagacggactgaagtcacaggagctgttcgatgagatccgtatgacttacattaaagagttaggaaaggcaattgtgaagagggaggggaatagttctcagaactggcagcggttctaccagctgaccaagctcttagactctatgcatgaagtagtggaaaaccttcttaattattgctttcagacattccttgataagactatgtctatagaattcccagaaatgctagcagagatcattaccaaccaaatccctaaatactccaacgggaacatcaaaaagcttctgttccaccagaaatag

SEQ ID NO: 27741 - DNA, 2337 bp, Artificial Sequence
  derived and/or modified sequence
atggacagcaaggagagcctgacccccggccgggaggagaacccctctagcgtgttagctcaggaacggggtgacgttatggacttctataaaacactgcgcggcggggccacagtgaaagtctcagccagttccccatcccttgctgtcgcttcccaatccgactcgaagcagaggcgcctgctcgtggacttcccaaagggcagcgtatctaacgcccagcagcccgacctgtctaaggcggtaagcctgtcaatgggcctgtacatgggagaaacagagaccaaggtcatgggcaacgacttaggcttccctcagcagggtcagatcagcctgtcttccggcgagactgacctgaagcttctggaggaatccattgctaatctcaataggtctacatctgtgccagagaatcccaagtctagcgccagtactgcagtgagcgcggcacccacggagaaagagttccctaagactcacagcgacgttagcagcgagcaacagcacctgaagggccagactggcacgaacggcgggaacgtgaaactgtatacgaccgatcagtcgaccttcgacatcctgcaggatctggagtttagctcagggtccccgggcaaggagaccaatgaatctccttggaggagtgacctattgatcgacgaaaactgtttgttatcacctctggccggcgaggacgatagctttcttttggagggtaattcaaatgaggactgcaaacccctgattctacccgacactaagcctaagatcaaagataacggcgatctagttctttcatcgccttccaatgtgactctccctcaggtgaagaccgaaaaagaggacttcatagaactgtgcacccctggcgttattaaacaggagaaactggggacggtgtactgtcaagcctcctttcccggggccaatatcatcggaaacaagatgagcgccataagcgtgcacggggtgagcacttccggtggccaaatgtaccactacgacatgaataccgcttcactcagtcaacaacaggatcagaaaccgatcttcaatgttatacccccaatcccagtcgggagtgaaaattggaaccggtgccaaggttccggcgatgataacctgaccagcttaggtacactgaactttccgggtaggactgtcttttctaacgggtacagcagccccagcatgcgccccgacgtaagttcacctccctcaagcagctctaccgccaccacaggaccaccgccaaagctttgccttgtctgctccgacgaagcaagcgggtgtcattatggtgtgctcacctgcggatcttgtaaggtgttcttcaaacgtgcagtggaaggacgccagcacaactacctttgtgcaggtaggaacgattgtattattgataagatcagacgaaaaaattgcccagcctgcaggtatcgaaagtgcctgcaagccggcatgaaccttgaagctaggaagacgaagaagaaaatcaagggtatccagcaggctacaaccggcgtgagccaagaaacttccgaaaatcctggcaacaagactattgtgccagccaccctgccacagctgacacccaccttggtgtccctgctggaagtgattgagccagaggtgttgtatgctggatacgatagctccgtgccagactcaacatggcggattatgactacactcaacatgctggggggtcgccaggtaattgctgctgtcaaatgggccaaggccatccctggcttccggaacctccacctggacgaccagatgacgctgttgcaatattcctggatgtttctcatggcatttgccctcggatggagaagttacaggcagtcttcagctaacctgctgtgcttcgcacctgatctcatcataaacgagcagaggatgacactgccttgtatgtacgaccaatgtaagcacatgctttacgtgtccagtgagttgcaccggcttcaggtatcttacgaggagtatctttgcatgaagacactgctcttgctgtccagcgttcctaaggatggtctgaagtctcaggagttattcgatgagatccgaatgacctacattaaggaattggggaaggcgatcgttaagagagagggcaacagcagtcagaattggcagcggttttaccagctcacgaagctcctagactccatgcacgaagtggtcgaaaatctcctcaattattgcttccaaacattccttgacaagaccatgtctattgagttccctgagatgttagctgaaattattaccaatcagattcccaagtacagcaatgggaacatcaagaaattgttgtttcaccaaaagtag

SEQ ID NO: 27742 - DNA, 2337 bp, Artificial Sequence
  derived and/or modified sequence
atggacagcaaggagagcctgacccccggccgggaggagaaccccagctcagtgctagcacaagagagaggagatgtaatggatttttacaagactcttcggggtggagccactgttaaagtatcagcatcaagcccctctctcgccgtggcgtcccaaagtgatagcaaacagcgcagacttctagtggactttccaaaagggtcagtgtcgaacgctcagcagcccgatctctcgaaggccgttagcctctctatgggcctgtacatgggagaaaccgaaacaaaggtgatgggtaatgacctggggtttccgcagcaggggcagatttccctctcctctggtgagaccgatctaaaattgctcgaagaatcgatcgccaacttgaaccgaagtacatcagtgcccgaaaaccctaagtctagcgccagcaccgcggtcagtgccgcgccaaccgagaaagaattcccaaagacccattccgacgtgtccagtgaacagcaacatctgaaaggccagacgggcaccaatggtggcaatgtgaagttgtacacaacagaccagagcaccttcgacatcttacaggatctagagttttcaagcggctccccaggaaaggagacgaacgaaagtccttggcgctcagatctcctgattgatgagaattgtcttctctccccactggctggcgaggatgacagtttcctcctggaggggaacagtaacgaggactgtaagcccttgattctgcctgataccaaacctaaaataaaggataatggagacctggtgttgtcgagccctagcaacgtcaccctgccgcaggtaaaaacagagaaagaagactttattgagctgtgcacccccggagtgatcaagcaggagaagctgggcaccgtgtattgccaggcctcttttcccggtgcaaatattatcggaaataagatgagcgcaatatcagtccacggtgtgtccacttcgggtgggcagatgtatcattacgatatgaatactgcgagcctaagccagcagcaagaccagaagcctatcttcaacgtcatccctccgattcctgtggggtctgagaattggaacagatgtcagggaagcggggacgataaccttacctcactgggcaccctgaacttccccggaagaaccgtattctcaaatggatattcctctccgtcaatgagacccgatgtgagcagccccccttcctcctcttctaccgcgaccacagggccacctccaaaactctgtttagtgtgttccgacgaagcaagtggatgccactacggtgtcttgacctgcggttcttgtaaggtgtttttcaagcgggccgtcgaaggaaggcaacacaactacctgtgtgcgggccggaatgactgtattattgataagattcgccgcaaaaactgtcccgcctgccggtacagaaaatgcctgcaagccgggatgaacctggaagcccgcaaaactaagaagaagatcaaggggatacagcaagcaacaaccggagtgagtcaggagacttccgaaaatcccggcaataagacaatcgtgcccgccactttaccgcagttgacaccgacactggtctccctcctggaagtgattgagcctgaggtgctgtatgcaggatatgattccagcgtgcccgattctacatggcgcatcatgaccactcttaacatgctcggcggacgacaggttatagctgccgttaaatgggcaaaagcgatcccaggcttcagaaatctacacctggatgaccagatgaccttacttcagtactcatggatgtttttaatggccttcgcactgggatggaggagttataggcaatcttcggccaatctgttgtgttttgcaccagacctcattatcaacgagcaaaggatgactctgccttgcatgtacgatcaatgtaagcacatgctctacgtgagctctgaactccaccgactccaagtgtcgtacgaagagtatttatgtatgaaaaccctactcctgctgagttctgtgccaaaagatggcctcaaatcccaggaactttttgatgagattcgcatgacgtatattaaggaattgggaaaggctatcgtcaagcgagaagggaattcctctcagaactggcagagattctaccagctcacaaaactactggattcaatgcatgaagtggtcgagaacctccttaactattgtttccagacctttctggataagacgatgtctatagagttccccgagatgttggcagaaataataaccaatcagataccaaaatacagtaacggcaacatcaaaaaactactctttcaccagaagtag

SEQ ID NO: 27743 - DNA, 3556 bp, Artificial Sequence
  derived and/or modified sequence
ggcgccgcctccacccgctccccgctcggtcccgctcgctcgcccaggccgggctgccctttcgcgtgtccgcgctctcttccctccgccgccgcctcctccattttgcgagctcgtgtctgtgacgggagcccgagtcaccgcctgcccgtcggggacggattctgtgggtggaaggagacgccgcagccggagcggccgaagcagctgggaccgggacggggcacgcgcgcccggaacctcgacccgcggagcccggcgcggggcggagggctggcttgtcagctgggcaatgggagactttcttaaataggggctctccccccacccatggagaaaggggcggctgtttacttcctttttttagaaaaaaaaaatatatttccctcctgctccttctgcgttcacaagctaagttgtttatctcggctgcggcgggaactgcggacggtggcgggcgagcggctcctctgccagagttgatattcactgatggactccaaagaatcattaactcctggtagagaagaaaaccccagcagtgtgcttgctcaggagaggggagatgtgatggacttctataaaaccctaagaggaggagctactgtgaaggtttctgcgtcttcaccctcactggctgtcgcttctcaatcagactccaagcagcgaagacttttggttgattttccaaaaggctcagtaagcaatgcgcagcagccagatctgtccaaagcagtttcactctcaatgggactgtatatgggagagacagaaacaaaagtgatgggaaatgacctgggattcccacagcagggccaaatcagcctttcctcgggggaaacagacttaaagcttttggaagaaagcattgcaaacctcaataggtcgaccagtgttccagagaaccccaagagttcagcatccactgctgtgtctgctgcccccacagagaaggagtttccaaaaactcactctgatgtatcttcagaacagcaacatttgaagggccagactggcaccaacggtggcaatgtgaaattgtataccacagaccaaagcacctttgacattttgcaggatttggagttttcttctgggtccccaggtaaagagacgaatgagagtccttggagatcagacctgttgatagatgaaaactgtttgctttctcctctggcgggagaagacgattcattccttttggaaggaaactcgaatgaggactgcaagcctctcattttaccggacactaaacccaaaattaaggataatggagatctggttttgtcaagccccagtaatgtaacactgccccaagtgaaaacagaaaaagaagatttcatcgaactctgcacccctggggtaattaagcaagagaaactgggcacagtttactgtcaggcaagctttcctggagcaaatataattggtaataaaatgtctgccatttctgttcatggtgtgagtacctctggaggacagatgtaccactatgacatgaatacagcatccctttctcaacagcaggatcagaagcctatttttaatgtcattccaccaattcccgttggttccgaaaattggaataggtgccaaggatctggagatgacaacttgacttctctggggactctgaacttccctggtcgaacagttttttctaatggctattcaagccccagcatgagaccagatgtaagctctcctccatccagctcctcaacagcaacaacaggaccacctcccaaactctgcctggtgtgctctgatgaagcttcaggatgtcattatggagtcttaacttgtggaagctgtaaagttttcttcaaaagagcagtggaaggtagacagcacaattacctatgtgctggaaggaatgattgcatcatcgataaaattcgaagaaaaaactgcccagcatgccgctatcgaaaatgtcttcaggctggaatgaacctggaagctcgaaaaacaaagaaaaaaataaaaggaattcagcaggccactacaggagtctcacaagaaacctctgaaaatcctggtaacaaaacaatagttcctgcaacgttaccacaactcacccctaccctggtgtcactgttggaggttattgaacctgaagtgttatatgcaggatatgatagctctgttccagactcaacttggaggatcatgactacgctcaacatgttaggagggcggcaagtgattgcagcagtgaaatgggcaaaggcaataccaggtttcaggaacttacacctggatgaccaaatgaccctactgcagtactcctggatgtttcttatggcatttgctctggggtggagatcatatagacaatcaagtgcaaacctgctgtgttttgctcctgatctgattattaatgagcagagaatgactctaccctgcatgtacgaccaatgtaaacacatgctgtatgtttcctctgagttacacaggcttcaggtatcttatgaagagtatctctgtatgaaaaccttactgcttctctcttcagttcctaaggacggtctgaagagccaagagctatttgatgaaattagaatgacctacatcaaagagctaggaaaagccattgtcaagagggaaggaaactccagccagaactggcagcggttttatcaactgacaaaactcttggattctatgcatgaagtggttgaaaatctccttaactattgcttccaaacatttttggataagaccatgagtattgaattccccgagatgttagctgaaatcatcaccaatcagataccaaaatattcaaatggaaatatcaaaaaacttctgtttcatcaaaagtgactgccttaataagaatggttgccttaaagaaagtcgaattaatagcttttattgtataaactatcagtttgtcctgtagaggttttgttgttttattttttattgttttcatctgttgttttgttttaaatacgcactacatgtggtttatagagggccaagacttggcaacagaagcagttgagtcgtcatcacttttcagtgatgggagagtagatggtgaaatttattagttaatatatcccagaaattagaaaccttaatatgtggacgtaatctccacagtcaaagaaggatggcacctaaaccaccagtgcccaaagtctgtgtgatgaactttctcttcatactttttttcacagttggctggatgaaattttctagactttctgttggtgtatcccccccctgtatagttaggatagcatttttgatttatgcatggaaacctgaaaaaaagtttacaagtgtatatcagaaaagggaagttgtgccttttatagctattactgtctggttttaacaatttcctttatatttagtgaactacgcttgctcattttttcttacataattttttattcaagttattgtacagctgtttaagatgggcagctagttcgtagctttcccaaataaactctaaacattaatcaatcatctgtgtgaaaatgggttggtgcttctaacctgatggcacttagctatcagaagaccacaaaaattg

SEQ ID NO: 27744 - DNA, 3245 bp, Artificial Sequence
  derived and/or modified sequence
actggcggcgcttgccgccaaggggcagagcgagctcccgagtgggtctggagccgcggagctgggcgggggcgggaaggaggtagcgagaaaagaaactggagaaactcggtggccctcttaacgccgccccagagagaccagttgatattcactgatggactccaaagaatcattaactcctggtagagaagaaaaccccagcagtgtgcttgctcaggagaggggagatgtgatggacttctataaaaccctaagaggaggagctactgtgaaggtttctgcgtcttcaccctcactggctgtcgcttctcaatcagactccaagcagcgaagacttttggttgattttccaaaaggctcagtaagcaatgcgcagcagccagatctgtccaaagcagtttcactctcaatgggactgtatatgggagagacagaaacaaaagtgatgggaaatgacctgggattcccacagcagggccaaatcagcctttcctcgggggaaacagacttaaagcttttggaagaaagcattgcaaacctcaataggtcgaccagtgttccagagaaccccaagagttcagcatccactgctgtgtctgctgcccccacagagaaggagtttccaaaaactcactctgatgtatcttcagaacagcaacatttgaagggccagactggcaccaacggtggcaatgtgaaattgtataccacagaccaaagcacctttgacattttgcaggatttggagttttcttctgggtccccaggtaaagagacgaatgagagtccttggagatcagacctgttgatagatgaaaactgtttgctttctcctctggcgggagaagacgattcattccttttggaaggaaactcgaatgaggactgcaagcctctcattttaccggacactaaacccaaaattaaggataatggagatctggttttgtcaagccccagtaatgtaacactgccccaagtgaaaacagaaaaagaagatttcatcgaactctgcacccctggggtaattaagcaagagaaactgggcacagtttactgtcaggcaagctttcctggagcaaatataattggtaataaaatgtctgccatttctgttcatggtgtgagtacctctggaggacagatgtaccactatgacatgaatacagcatccctttctcaacagcaggatcagaagcctatttttaatgtcattccaccaattcccgttggttccgaaaattggaataggtgccaaggatctggagatgacaacttgacttctctggggactctgaacttccctggtcgaacagttttttctaatggctattcaagccccagcatgagaccagatgtaagctctcctccatccagctcctcaacagcaacaacaggaccacctcccaaactctgcctggtgtgctctgatgaagcttcaggatgtcattatggagtcttaacttgtggaagctgtaaagttttcttcaaaagagcagtggaaggtagacagcacaattacctatgtgctggaaggaatgattgcatcatcgataaaattcgaagaaaaaactgcccagcatgccgctatcgaaaatgtcttcaggctggaatgaacctggaagctcgaaaaacaaagaaaaaaataaaaggaattcagcaggccactacaggagtctcacaagaaacctctgaaaatcctggtaacaaaacaatagttcctgcaacgttaccacaactcacccctaccctggtgtcactgttggaggttattgaacctgaagtgttatatgcaggatatgatagctctgttccagactcaacttggaggatcatgactacgctcaacatgttaggagggcggcaagtgattgcagcagtgaaatgggcaaaggcaataccaggtttcaggaacttacacctggatgaccaaatgaccctactgcagtactcctggatgtttcttatggcatttgctctggggtggagatcatatagacaatcaagtgcaaacctgctgtgttttgctcctgatctgattattaatgagcagagaatgactctaccctgcatgtacgaccaatgtaaacacatgctgtatgtttcctctgagttacacaggcttcaggtatcttatgaagagtatctctgtatgaaaaccttactgcttctctcttcagttcctaaggacggtctgaagagccaagagctatttgatgaaattagaatgacctacatcaaagagctaggaaaagccattgtcaagagggaaggaaactccagccagaactggcagcggttttatcaactgacaaaactcttggattctatgcatgaagtggttgaaaatctccttaactattgcttccaaacatttttggataagaccatgagtattgaattccccgagatgttagctgaaatcatcaccaatcagataccaaaatattcaaatggaaatatcaaaaaacttctgtttcatcaaaagtgactgccttaataagaatggttgccttaaagaaagtcgaattaatagcttttattgtataaactatcagtttgtcctgtagaggttttgttgttttattttttattgttttcatctgttgttttgttttaaatacgcactacatgtggtttatagagggccaagacttggcaacagaagcagttgagtcgtcatcacttttcagtgatgggagagtagatggtgaaatttattagttaatatatcccagaaattagaaaccttaatatgtggacgtaatctccacagtcaaagaaggatggcacctaaaccaccagtgcccaaagtctgtgtgatgaactttctcttcatactttttttcacagttggctggatgaaattttctagactttctgttggtgtatcccccccctgtatagttaggatagcatttttgatttatgcatggaaacctgaaaaaaagtttacaagtgtatatcagaaaagggaagttgtgccttttatagctattactgtctggttttaacaatttcctttatatttagtgaactacgcttgctcattttttcttacataattttttattcaagttattgtacagctgtttaagatgggcagctagttcgtagctttcccaaataaactctaaacattaatcaatcatctgtgtgaaaatgggttggtgcttctaacctgatggcacttagctatcagaagaccacaaaaattgactcaaatctccagtattcttgtc

SEQ ID NO: 27745 - DNA, 3389 bp, Artificial Sequence
  derived and/or modified sequence
gataagcacttaatgagtgccttctctgtgcgagaatggggaggaacaaaatgcagctcctaccctcctcgggctttagttgtaccttaataacaggaattttcatctgcctggctcctttcctcaaagaacaaagaagactttgcttcattaaagtgtctgagaaggaaggatccctctggctggtgtgtgaagaattaactgtagatgggcaagtgtggaaggaaggagagcagtcaggaagctgccataaccatctacatgagagagttgatattcactgatggactccaaagaatcattaactcctggtagagaagaaaaccccagcagtgtgcttgctcaggagaggggagatgtgatggacttctataaaaccctaagaggaggagctactgtgaaggtttctgcgtcttcaccctcactggctgtcgcttctcaatcagactccaagcagcgaagacttttggttgattttccaaaaggctcagtaagcaatgcgcagcagccagatctgtccaaagcagtttcactctcaatgggactgtatatgggagagacagaaacaaaagtgatgggaaatgacctgggattcccacagcagggccaaatcagcctttcctcgggggaaacagacttaaagcttttggaagaaagcattgcaaacctcaataggtcgaccagtgttccagagaaccccaagagttcagcatccactgctgtgtctgctgcccccacagagaaggagtttccaaaaactcactctgatgtatcttcagaacagcaacatttgaagggccagactggcaccaacggtggcaatgtgaaattgtataccacagaccaaagcacctttgacattttgcaggatttggagttttcttctgggtccccaggtaaagagacgaatgagagtccttggagatcagacctgttgatagatgaaaactgtttgctttctcctctggcgggagaagacgattcattccttttggaaggaaactcgaatgaggactgcaagcctctcattttaccggacactaaacccaaaattaaggataatggagatctggttttgtcaagccccagtaatgtaacactgccccaagtgaaaacagaaaaagaagatttcatcgaactctgcacccctggggtaattaagcaagagaaactgggcacagtttactgtcaggcaagctttcctggagcaaatataattggtaataaaatgtctgccatttctgttcatggtgtgagtacctctggaggacagatgtaccactatgacatgaatacagcatccctttctcaacagcaggatcagaagcctatttttaatgtcattccaccaattcccgttggttccgaaaattggaataggtgccaaggatctggagatgacaacttgacttctctggggactctgaacttccctggtcgaacagttttttctaatggctattcaagccccagcatgagaccagatgtaagctctcctccatccagctcctcaacagcaacaacaggaccacctcccaaactctgcctggtgtgctctgatgaagcttcaggatgtcattatggagtcttaacttgtggaagctgtaaagttttcttcaaaagagcagtggaaggtagacagcacaattacctatgtgctggaaggaatgattgcatcatcgataaaattcgaagaaaaaactgcccagcatgccgctatcgaaaatgtcttcaggctggaatgaacctggaagctcgaaaaacaaagaaaaaaataaaaggaattcagcaggccactacaggagtctcacaagaaacctctgaaaatcctggtaacaaaacaatagttcctgcaacgttaccacaactcacccctaccctggtgtcactgttggaggttattgaacctgaagtgttatatgcaggatatgatagctctgttccagactcaacttggaggatcatgactacgctcaacatgttaggagggcggcaagtgattgcagcagtgaaatgggcaaaggcaataccaggtttcaggaacttacacctggatgaccaaatgaccctactgcagtactcctggatgtttcttatggcatttgctctggggtggagatcatatagacaatcaagtgcaaacctgctgtgttttgctcctgatctgattattaatgagcagagaatgactctaccctgcatgtacgaccaatgtaaacacatgctgtatgtttcctctgagttacacaggcttcaggtatcttatgaagagtatctctgtatgaaaaccttactgcttctctcttcagttcctaaggacggtctgaagagccaagagctatttgatgaaattagaatgacctacatcaaagagctaggaaaagccattgtcaagagggaaggaaactccagccagaactggcagcggttttatcaactgacaaaactcttggattctatgcatgaagtggttgaaaatctccttaactattgcttccaaacatttttggataagaccatgagtattgaattccccgagatgttagctgaaatcatcaccaatcagataccaaaatattcaaatggaaatatcaaaaaacttctgtttcatcaaaagtgactgccttaataagaatggttgccttaaagaaagtcgaattaatagcttttattgtataaactatcagtttgtcctgtagaggttttgttgttttattttttattgttttcatctgttgttttgttttaaatacgcactacatgtggtttatagagggccaagacttggcaacagaagcagttgagtcgtcatcacttttcagtgatgggagagtagatggtgaaatttattagttaatatatcccagaaattagaaaccttaatatgtggacgtaatctccacagtcaaagaaggatggcacctaaaccaccagtgcccaaagtctgtgtgatgaactttctcttcatactttttttcacagttggctggatgaaattttctagactttctgttggtgtatcccccccctgtatagttaggatagcatttttgatttatgcatggaaacctgaaaaaaagtttacaagtgtatatcagaaaagggaagttgtgccttttatagctattactgtctggttttaacaatttcctttatatttagtgaactacgcttgctcattttttcttacataattttttattcaagttattgtacagctgtttaagatgggcagctagttcgtagctttcccaaataaactctaaacattaatcaatcatctgtgtgaaaatgggttggtgcttctaacctgatggcacttagctatcagaagaccacaaaaattgactcaaatctccagtattcttgtcaaaaaaaaaaaaaaaaaa

SEQ ID NO: 27746 - DNA, 2337 bp, Artificial Sequence
  derived and/or modified sequence
atggactcgaaagaaagcctgactcctgggagagaggagaacccaagctccgtgctcgcccaagaaagaggtgacgtgatggatttttataagacgctgagaggaggcgctacagtgaaggtgtctgcctcgtccccatcattagccgttgcatctcagagcgactcgaagcagcggagactgctggtggactttcctaaaggaagtgtatccaacgcccagcagcccgacctctcaaaagccgtgtctctcagcatggggctgtacatgggggaaacagagactaaagtgatgggtaatgaccttgggttcccacagcaggggcagatttccttgtcctcgggggagaccgatcttaagctgctggaagagtccattgctaatttgaatagatctacttccgtacccgagaatccgaaatcctcagcttcaaccgctgtgtccgcagcgcctacagagaaggagtttcctaagacccacagcgatgtttcctcagagcagcagcaccttaaggggcaaactggaaccaacggaggaaatgtcaaactgtataccacagatcagagtaccttcgacattctacaagacctcgagttttcctctggtagcccgggaaaagagacgaacgaaagcccttggcgctcagaccttctaattgatgagaattgcctactgagtcccctcgctggcgaggacgattcattcctgctggagggaaacagcaacgaagactgcaagccactgatcttgcctgacactaagcctaagatcaaagataacggcgaccttgttctctcgtcacctagcaatgtgacgttgccgcaggtgaagacagagaaagaagacttcattgagctctgtactccaggagttatcaaacaggaaaagctagggacagtttattgccaggcttcttttccaggggctaacataattgggaacaaaatgagcgctatctctgtacacggcgtgtcaaccagcggtggacagatgtaccattacgatatgaacactgcaagtttatcccagcaacaagaccaaaaaccaatatttaacgtgatcccacccatcccagtaggaagcgagaattggaatcgttgccaaggctccggagacgacaacctcacctcgctgggcaccctgaatttccccggacgcacggtcttcagtaacggctattcctccccatccatgcgaccggatgtctctagcccgccaagctccagttcaactgctacgaccggccctccgcctaaactttgtttggtgtgctctgatgaggcatcaggatgtcactacggagttcttacatgtggcagttgtaaggtcttctttaagagagcagttgaaggcaggcagcacaactatctgtgtgccggtcggaatgattgcattattgataagatcagacggaagaattgtcctgcatgtcgataccggaaatgtttgcaggccggtatgaatctggaagccaggaaaacgaaaaaaaagattaaaggcattcagcaggccaccactggggtaagtcaggaaacttccgagaatccgggaaataagactatagtgccagctaccctccctcagctcacccctacgctggttagcttactagaagttatcgagccagaagtgctttatgctggttacgacagcagcgtgccagattcgacatggcggattatgacgactttaaacatgctggggggtaggcaggtgattgctgcagtcaagtgggccaaggccattccgggattccgtaatttgcacctcgatgaccagatgacactcttgcagtactcttggatgtttctgatggcattcgcccttggctggcgctcctatcgccaatcctctgccaatctcctttgcttcgccccagacctcattataaatgagcagcgaatgacccttccatgtatgtacgatcagtgcaaacacatgttgtatgtaagtagcgagctacaccgccttcaggtgtcttatgaggagtatctgtgtatgaagactttgcttctccttagctccgttcctaaggacggactaaaaagccaggaactcttcgacgaaattagaatgacctacattaaggagctgggcaaagccattgtgaagagggagggaaactctagtcagaattggcagaggttttaccagcttacgaaattattggactcaatgcatgaggtagtggaaaacctgcttaattactgtttccagactttcttggacaagaccatgagcatcgaattccccgagatgcttgctgaaattataaccaaccagataccaaagtactctaacggaaacattaaaaagttactgtttcaccagaagtag

SEQ ID NO: 27747 - DNA, 2337 bp, Artificial Sequence
  derived and/or modified sequence
atggattctaaggagagcctcactccaggtagggaagagaatccctctagcgtgctcgcacaggaaagaggggatgtgatggatttctacaagacgcttcgaggaggagccacggtcaaggtttccgcgagctctccatcactggcagttgccagccagtccgacagcaagcagcgacgcctgctagttgatttccccaagggtagtgtcagcaacgcacagcaacccgatttgtcgaaagctgtcagtctgagcatgggattgtatatgggcgagacagagactaaggttatgggaaatgatttgggtttccctcagcaagggcagatcagtctcagttcgggtgaaaccgatctgaagctgctcgaggagtcaatcgctaatctgaaccggtccacgtccgtgccagaaaaccccaaaagttccgcctcaacagctgtctccgctgcaccaacagagaaggagttccccaagacccactccgatgtctcgtccgagcagcagcacctgaagggacagaccgggacaaatggtgggaacgtcaagctttacaccacggaccagtccacgttcgatatactgcaggatctggagttcagctcgggcagcccaggtaaagaaaccaacgaaagcccttggcgaagtgacctcctgatcgatgagaattgcttgctgtctccactggccggagaggacgattcctttcttctggagggcaactctaacgaggactgcaaacccctgattttaccagacaccaaacctaagatcaaagacaacggcgacctggtcctgtcatcgccgtccaatgtcaccctaccccaggtgaagacagagaaggaggattttattgaactctgcacccccggagtcatcaaacaggaaaagctggggacggtgtactgtcaggcatcttttcccggtgccaacataataggtaacaaaatgtctgcgatttccgtgcacggcgtgtctacgtccggaggccagatgtaccactatgatatgaataccgcttccctgagccagcagcaggaccagaagcccattttcaacgtaatcccccctatccctgtggggtctgaaaattggaaccgatgtcagggaagtggcgatgataacttgactagtctcggcacactcaacttccccggacggaccgtgttctcgaacggctatagctcaccttcaatgcgccctgatgttagcagcccgcctagctcatcttctaccgccacaacgggcccacctcccaagttatgcttagtatgtagcgacgaggctagtggctgccactacggcgtgctaacatgcggaagctgtaaagtgtttttcaagcgggcagtggaaggccgtcagcacaattatctgtgtgctgggcgaaatgattgcataatcgataagatccggcgaaagaactgcccagcctgcaggtacagaaagtgtctccaggcaggaatgaacctagaggctcgcaagacaaagaagaaaatcaagggcatccaacaggcaacaaccggagtgtcccaggagacctccgagaatccaggaaacaagacaattgtccctgcaaccctgcctcagctaacccctacactggtgagcttgttagaagtcatcgagcccgaggtgctgtatgccggttatgactcttcagtacctgacagcacatggagaatcatgaccacactcaatatgctgggtggcaggcaggttattgcggctgttaaatgggctaaggcgatcccaggttttcgcaacctgcacttggacgaccagatgactttgctgcaatattcctggatgttcttgatggctttcgccctgggatggagatcataccgtcagtctagcgccaatttgttatgctttgctcctgacctcatcatcaacgaacaacgcatgaccctgccatgcatgtacgatcagtgtaaacatatgctctatgtttcatccgaactgcatcgtttgcaggtttcatatgaagagtacctgtgtatgaagacgctgctactgctgtccagcgtgcctaaggacggcctgaaatctcaggaactattcgatgaaatccggatgacttacataaaggagcttggcaaggcaatcgtgaaacgggagggtaatagttcccaaaactggcaaagattctaccagctgacgaaacttcttgattctatgcatgaggttgtggagaaccttctgaattactgcttccagacctttcttgacaagacaatgagcatagagtttcccgagatgctggcagagataattactaaccagatacctaagtacagtaatggcaatatcaagaagctgctgttccatcagaaatag

SEQ ID NO: 27748 - protein, 705 aa, Artificial Sequence
  derived and/or modified sequence
MATEGMILTNHDHQIRVGVLTVSDSCFRNLAEDRSGINLKDLVQDPSLLGGTISAYKIVPDEIEEIKATKEVIEREAPGMALAMLMGSLNVTPLGMLSRPVCGIRGKTLIINLPGSKKGSQECFQFILPALPHAIDLLRDAIVKVKEVHDELEDLPSPPPPLSPPPTTSPHKQTEDKGVQCEEEEEEKKDSGVASTEDSSSSHITAAAIAAKIPDSIISRGVQVLPRDTASLSTTPSESPRAQATSRLSTASCPTPKVQSRCSSKENILRASHSAVDITKVARRHRMSPFPLTSMDKAFITVLEMTPVLGTEIINYRDGMGRVLAQDVYAKDNLPPFPASVKDGYAVRAADGPGDRFIIGESQAGEQPTQTVMPGQVMRVTTGAPIPCGADAVVQVEDTELIRESDDGTEELEVRILVQARPGQDIRPIGHDIKRGECVLAKGTHMGPSEIGLLATVGVTEVEVNKFPVVAVMSTGNELLNPEDDLLPGKIRDSNRSTLLATIQEHGYPTINLGIVGDNPDDLLNALNEGISRADVIITSGGVSMGEKDYLKQVLDIDLHAQIHFGRVFMKPGLPTTFATLDIDGVRKIIFALPGNPVSAVVTCNLFVVPALRKMQGILDPRPTIIKARLSCDVKLDPRPEYHRCILTWHHQEPLPWAQSTGNQMSSRLMSMRSANGLLMLPPKTEQYVELHKGEVVDVMVIGRL

SEQ ID NO: 27749 - protein, 736 aa, Artificial Sequence
  derived and/or modified sequence
MATEGMILTNHDHQIRVGVLTVSDSCFRNLAEDRSGINLKDLVQDPSLLGGTISAYKIVPDEIEEIKETLIDWCDEKELNLILTTGGTGFAPRDVTPEATKEVIEREAPGMALAMLMGSLNVTPLGMLSRPVCGIRGKTLIINLPGSKKGSQECFQFILPALPHAIDLLRDAIVKVKEVHDELEDLPSPPPPLSPPPTTSPHKQTEDKGVQCEEEEEEKKDSGVASTEDSSSSHITAAAIAAKIPDSIISRGVQVLPRDTASLSTTPSESPRAQATSRLSTASCPTPKVQSRCSSKENILRASHSAVDITKVARRHRMSPFPLTSMDKAFITVLEMTPVLGTEIINYRDGMGRVLAQDVYAKDNLPPFPASVKDGYAVRAADGPGDRFIIGESQAGEQPTQTVMPGQVMRVTTGAPIPCGADAVVQVEDTELIRESDDGTEELEVRILVQARPGQDIRPIGHDIKRGECVLAKGTHMGPSEIGLLATVGVTEVEVNKFPVVAVMSTGNELLNPEDDLLPGKIRDSNRSTLLATIQEHGYPTINLGIVGDNPDDLLNALNEGISRADVIITSGGVSMGEKDYLKQVLDIDLHAQIHFGRVFMKPGLPTTFATLDIDGVRKIIFALPGNPVSAVVTCNLFVVPALRKMQGILDPRPTIIKARLSCDVKLDPRPEYHRCILTWHHQEPLPWAQSTGNQMSSRLMSMRSANGLLMLPPKTEQYVELHKGEVVDVMVIGRL

SEQ ID NO: 27750 - DNA, 2118 bp, Artificial Sequence
  derived and/or modified sequence
atggccactgaggggatgattctcacaaatcacgaccaccaaatccgggttggagtgctgaccgtttctgactcctgcttcaggaatctggcagaggaccgcagcggcatcaatttaaaggacttggtgcaggacccctccctgctaggcggaaccatatctgcctataagattgttcccgacgagatcgaagagataaaagctaccaaggaagtgattgaacgcgaggcccccgggatggccttggcgatgctcatggggtccttaaacgttacacctctgggcatgctttcacggcccgtttgcggcattcgtgggaaaaccctcattattaatctccccgggtctaaaaagggcagccaggagtgcttccaatttatccttcctgccttgccacacgctatagatctattgagggatgccatcgttaaagtcaaagaagtgcatgatgagcttgaagaccttccttcaccaccacctcctctgagtcctccacctacaaccagtcctcataaacagaccgaggataagggtgtgcagtgtgaggaggaagaggaagaaaaaaaggattccggagtggcatctactgaagactcctcttccagccacatcactgcagccgctatagccgccaagatccctgattccatcatctcccgcggtgtccaggtccttccccgggacaccgccagcctttccactacaccttcagaaagtcctcgcgctcaggcaacttcgcggctgagtacagcctcctgccccacccctaaagtgcagtctaggtgcagttctaaggaaaacatcctgcgtgcttcccatagtgccgtggacattactaaggtggctagacggcacaggatgtccccttttcccctcacctccatggataaagccttcataaccgtcttggagatgacccccgtgttgggcactgagattatcaattaccgagacgggatgggccgcgtgctagctcaggatgtgtacgctaaagacaatctccctcccttcccggcatctgtcaaagacggctacgccgtgcgggccgccgatggacccggagaccggtttataatcggggaaagccaggccggggagcagccgactcagaccgtgatgcccggacaggtcatgcgggtgacaactggcgctcccatcccatgtggtgctgacgccgttgtgcaggtggaagacactgaactgatcagagaaagtgacgacggaaccgaagagttggaagtgcgaattctggtccaggcccgtcccggacaggatatcaggcctattggccacgatattaagcgcggtgaatgcgtgctggctaagggcacccacatgggtccatcagagatcgggttattggcaactgtgggcgtgaccgaggttgaagtgaacaagttccctgtggtggcggtgatgagtacgggaaacgagttactcaatcccgaggacgatcttctgcccgggaaaattcgggatagcaaccggtcaactttacttgccaccatccaggagcacggatatcctactattaatttagggatagtgggcgacaaccctgacgatcttttgaatgcgctgaacgagggcatcagtcgtgccgatgttatcatcacaagcggtggagtgtcaatgggtgagaaagattatctaaagcaggtgctggacatcgatctacatgcacagatccactttggtagggttttcatgaaacctggccttccgacaacctttgctactttagacattgatggagtgcggaagattatttttgctctcccagggaatccagtgtctgccgtggttacttgcaatctgtttgtcgtgcctgccctacgcaaaatgcaaggcattttggaccctcgaccaactatcattaaggcccgcctaagctgtgacgtgaagctcgacccgcggcccgagtatcatagatgtatattaacatggcatcaccaggagccattaccctgggcacagagtaccggtaatcagatgtcgtccaggctgatgtcaatgcggagcgccaacggcctgttgatgttacccccaaaaactgaacagtacgtcgagcttcataagggcgaagtcgttgatgtcatggtaattggtcggctgtag

SEQ ID NO: 27751 - DNA, 2211 bp, Artificial Sequence
  derived and/or modified sequence
atggcaacggaggggatgatacttactaatcacgaccaccagattcgcgttggtgttctcactgtctcagactcgtgtttccggaatctggccgaagacagatctggcattaacctcaaagacctcgtgcaggacccatcccttttgggcgggacaatctcagcctacaaaatcgtccccgacgaaattgaggaaatcaaagaaaccttaatcgactggtgcgatgagaaggagctgaacctcatactgacaactggcggcaccgggtttgcaccaagagatgtaactccggaggccactaaggaggtgatcgagcgcgaggcacccggtatggccctcgccatgctaatgggctctctaaatgtaacacctctgggcatgttaagtcgacccgtatgcggcatcagaggaaagacactcattatcaacctcccaggaagcaagaagggaagtcaagaatgctttcagtttatcttgccagccctgccacacgccattgatctgctcagagacgccattgtgaaagtgaaggaggttcacgatgagctcgaggacttgccctcacccccgcctccattatcacctccccctacaacatccccccataagcagaccgaggacaagggtgtccagtgtgaagaggaagaggaggaaaagaaggactccggtgttgcatccactgaggacagttcgtcctcccatatcactgccgcggcgattgccgcgaaaatccccgattccataatttcgagaggagttcaggtgctacctcgggatactgcttctctgtccaccactccttcagagagcccgcgggcgcaggcaacctcacgactttccaccgcttcctgtcctacacccaaggtgcagtctaggtgttcatctaaagaaaacatactgagggctagccactccgctgtagacattacgaaggtggctcgaagacaccgcatgtcccccttcccgttgaccagtatggataaggccttcattacagttctggagatgacaccagtgctgggcactgaaataatcaattacagggacgggatgggcagagtgctggctcaagacgtgtacgccaaggacaacctccctccgttccctgcatcagtgaaagatggatatgctgttcgcgcggccgatggacccggggatcgattcatcattggcgagagtcaggctggggaacaacctacccagaccgttatgccaggacaggttatgcgagttacaacaggcgctccgatcccttgtggcgccgacgcagtggttcaggtggaagatactgagctgatccgggagtcagatgacggaacagaggaactggaggtaagaattttagtgcaggctcgcccaggtcaagacattagacctattggccacgacattaaacggggggagtgtgtcctggccaaaggcacacatatgggtcccagcgaaattgggttactagcaacggtgggcgtgactgaggtcgaagttaacaagtttcctgttgtcgcagttatgtccacaggtaacgagcttctgaacccggaggacgacttgctcccagggaaaatccgcgattctaataggagcactttgttagcgaccattcaggagcatggctatcccaccattaatctggggattgtgggagataatccggatgatctcttaaacgcactgaacgagggcatttcaagggccgacgtcataattacgtccggcggtgtatccatgggggaaaaggactaccttaaacaggtgttagacattgatctgcacgcacagatccactttgggagggtctttatgaaaccagggctgcctacgacattcgcaactttggatatagacggcgtgagaaaaataatatttgcacttcctgggaaccccgtttctgctgtggtcacatgcaatctcttcgtggtgccagctcttcgtaaaatgcaggggatcctggacccccggcctaccatcattaaggcccgacttagctgtgacgtcaagctggaccccaggccagagtaccaccgatgtatactcacttggcatcaccaagagccgttgccctgggcccagagcacaggaaaccaaatgtcatccagactcatgtccatgaggtctgcgaacggcctacttatgctcccccccaagaccgaacagtacgttgagcttcataagggtgaggtcgtggatgtcatggtcattggcagactgtag

SEQ ID NO: 27752 - DNA, 2393 bp, Artificial Sequence
  derived and/or modified sequence
actgcgctgggaaacatggcgaccgagggaatgatccttactaaccacgaccatcaaatccgtgtcggagtccttacagtgagtgatagttgcttcaggaatcttgcagaagaccgcagtgggataaatctcaaagatctcgtacaagatccttctttgttgggtgggactatatcagcatacaagatagtaccagatgaaatagaagaaatcaaggccacaaaagaagtaatagaacgggaagcaccagggatggccctggcaatgctgatgggatcacttaatgttacacctctgggcatgctctctaggcctgtatgtggaatcagagggaaaacgctcataattaacctgccaggtagcaagaaaggatctcaggaatgctttcaattcatactgccagctctacctcatgccattgaccttttacgtgatgccattgtaaaagtaaaggaggtgcatgatgaacttgaagatttgccttccccacctccccctctttcccctcctcctactaccagcccccataaacagacagaagacaaaggagttcaatgtgaggaagaggaagaagagaagaaagacagtggtgttgcttcaacagaagatagttcctcatcacatataactgcagcagccattgctgccaagattccagactccatcatttctcgtggtgttcaggtgctcccacgagacacagcctccctcagcactactccttcagaatcgcctcgtgctcaggctacatctcgcctctctacagcttcctgcccaacaccaaaagtccagtccaggtgcagcagcaaggagaacattctcagagccagtcacagtgctgtcgatatcaccaaggtggctagaagacatcgcatgtctccttttcctctgacatctatggacaaagcctttatcacagtcctggagatgactccggtgcttgggacagaaatcatcaattaccgagatggaatggggcgagtccttgctcaagatgtatatgcaaaagacaatttaccccccttcccagcatcagtaaaagatggctatgctgtccgagctgctgatggcccaggagatcgtttcatcattggggaatcccaagctggtgaacagccaactcagacagtaatgccaggacaagtcatgcgggttacaacaggtgctccaataccctgcggtgctgatgcagtagtacaagtggaagataccgaacttatcagggaatcagatgatggcactgaagaacttgaagtgcgaattctggtgcaagctcggccaggccaagatatcagacccatcggccatgacattaaaagaggggaatgtgttttggccaaaggaacccacatgggcccctcagagattggtcttctggcaactgtaggtgtcacagaggttgaagttaataagtttccagtggttgcagtcatgtcaacagggaatgagctgctaaatcctgaagatgacctcttaccagggaagattcgagacagcaatcgttcaactcttctagcaacaattcaggaacatggttaccccacgatcaacttgggtattgtaggagacaacccagatgacttactcaatgccttgaatgagggtatcagtcgtgctgatgtcatcatcacatcagggggtgtatccatgggggaaaaggactatctcaagcaggtgctggacattgatcttcatgctcagatccattttggcagggtttttatgaaaccaggcttgccaacaacatttgcaactttggatattgatggtgtaagaaaaataatctttgcactacctgggaatcctgtatcggctgtggtcacctgcaatctctttgttgtgcctgcactgaggaaaatgcagggcatcttggatcctcggccaaccatcatcaaagcaaggttatcatgtgatgtaaaacttgatcctcgtccagaataccatcggtgtatactaacttggcatcaccaagaaccactaccttgggcacagagtacaggtaatcaaatgagcagccgtctgatgagcatgcgcagtgccaatggattgttgatgctacctccaaagacagaacagtacgtggagctccacaaaggcgaggtggtggatgtcatggtcattggacggctatgatggtcaccagcaggagaaagctttgatgcatgtccacatatcattgactgtatcctgtaatatgcaacggcacagctagttttcccgatttggataaaagttgatctgtatagtcaacatcttgaactatatttcaaatgaatttaaatatcttttaaagaaaaaaacacctaaaaataaatcttaacagaaaattctgttctgattatatcaaggcaaatttttcctttcttgcaaattgctttgtgtgttcaatgcta

SEQ ID NO: 27753 - DNA, 4193 bp, Artificial Sequence
  derived and/or modified sequence
agcagcgctcatggcgaagaggcttaaggccacaaaaccgtgggacagcaggaggaagagaagccaggtatctccactccagctgccctgcctcagactcctcagtttcgcacgtgaggatcgtcttgcaggcactgactggagatggaatcctaaagcataggtgaagcggaaatcctccttcagggagagcccactgaggaagccagcggctagcacgaggcaggacaggatacctccctcttcgcccacggcggcctctctgtcatagtagccaccgttctgccactcatgcagctttctaagacacctctcggttccccagcgctttcagtggggcggccggccattcccgagggttgcaagaggaggcccggggtgctgagccagcctcgctgcccccgcgtagaaagccggcccgccggcgagagccagcctaaggcgcggacaaccaacgaggtgtcaggctcggcaggggattgcttctgtctggggcccggccgaggttgcgttcgtgcctcgcgcgcacacgctccgcgttcactcagccaatccggtgctactcgcgcgcccaggagcgatccgcggtcctactcaggctgggccggctccttcccgctcccaatactcagcacccgagctctcactcctcccctcactctccacgagttccacgcctaggggtgtagctccgcccttgtccccgagtccgcccccgcaacctccagagcgtgtgctatcctttcctctcagtcctgccatctagctgccttgggtctcgcgctccgcagagcgttccgacactctccggcctcgttctgccgcctccgcgcgctctccccgtgcggccaccgcgccccccaagcttgcctccttcttgccggacttggggccgcgcgccctgactccttcccctcccgcggacccgcgcactcccggcgcggcctctcccccacgcaggccaccgtgcactctgtggcctccccctccttccccgctctcctcgcgcttctctggctccctagctgtcgcgctctcctcggcgagcgcgctcccggcccgcgcgctccgggctccggtttctcccggctcctgtcagtgcggtgactgcgctgggaaacatggcgaccgagggaatgatccttactaaccacgaccatcaaatccgtgtcggagtccttacagtgagtgatagttgcttcaggaatcttgcagaagaccgcagtgggataaatctcaaagatctcgtacaagatccttctttgttgggtgggactatatcagcatacaagatagtaccagatgaaatagaagaaatcaaggaaaccctgatagattggtgtgatgaaaaggaacttaatttgatattaacaactggaggaacaggatttgcaccacgagatgtcactccagaggccacaaaagaagtaatagaacgggaagcaccagggatggccctggcaatgctgatgggatcacttaatgttacacctctgggcatgctctctaggcctgtatgtggaatcagagggaaaacgctcataattaacctgccaggtagcaagaaaggatctcaggaatgctttcaattcatactgccagctctacctcatgccattgaccttttacgtgatgccattgtaaaagtaaaggaggtgcatgatgaacttgaagatttgccttccccacctccccctctttcccctcctcctactaccagcccccataaacagacagaagacaaaggagttcaatgtgaggaagaggaagaagagaagaaagacagtggtgttgcttcaacagaagatagttcctcatcacatataactgcagcagccattgctgccaagattccagactccatcatttctcgtggtgttcaggtgctcccacgagacacagcctccctcagcactactccttcagaatcgcctcgtgctcaggctacatctcgcctctctacagcttcctgcccaacaccaaaagtccagtccaggtgcagcagcaaggagaacattctcagagccagtcacagtgctgtcgatatcaccaaggtggctagaagacatcgcatgtctccttttcctctgacatctatggacaaagcctttatcacagtcctggagatgactccggtgcttgggacagaaatcatcaattaccgagatggaatggggcgagtccttgctcaagatgtatatgcaaaagacaatttaccccccttcccagcatcagtaaaagatggctatgctgtccgagctgctgatggcccaggagatcgtttcatcattggggaatcccaagctggtgaacagccaactcagacagtaatgccaggacaagtcatgcgggttacaacaggtgctccaataccctgcggtgctgatgcagtagtacaagtggaagataccgaacttatcagggaatcagatgatggcactgaagaacttgaagtgcgaattctggtgcaagctcggccaggccaagatatcagacccatcggccatgacattaaaagaggggaatgtgttttggccaaaggaacccacatgggcccctcagagattggtcttctggcaactgtaggtgtcacagaggttgaagttaataagtttccagtggttgcagtcatgtcaacagggaatgagctgctaaatcctgaagatgacctcttaccagggaagattcgagacagcaatcgttcaactcttctagcaacaattcaggaacatggttaccccacgatcaacttgggtattgtaggagacaacccagatgacttactcaatgccttgaatgagggtatcagtcgtgctgatgtcatcatcacatcagggggtgtatccatgggggaaaaggactatctcaagcaggtgctggacattgatcttcatgctcagatccattttggcagggtttttatgaaaccaggcttgccaacaacatttgcaactttggatattgatggtgtaagaaaaataatctttgcactacctgggaatcctgtatcggctgtggtcacctgcaatctctttgttgtgcctgcactgaggaaaatgcagggcatcttggatcctcggccaaccatcatcaaagcaaggttatcatgtgatgtaaaacttgatcctcgtccagaataccatcggtgtatactaacttggcatcaccaagaaccactaccttgggcacagagtacaggtaatcaaatgagcagccgtctgatgagcatgcgcagtgccaatggattgttgatgctacctccaaagacagaacagtacgtggagctccacaaaggcgaggtggtggatgtcatggtcattggacggctatgatggtcaccagcaggagaaagctttgatgcatgtccacatatcattgactgtatcctgtaatatgcaacggcacagctagttttcccgatttggataaaagttgatctgtatagtcaacatcttgaactatatttcaaatgaatttaaatatcttttaaagaaaaaaacacctaaaaataaatcttaacagaaaattctgttctgattatatcaaggcaaatttttcctttcttgcaaattgctttgtgtgttcaatgctaggtctgatagcgatagcttttagtagacagcggtaggtgcctgcagaacttgtgtttttctcatctttaaaatacaactacttatgctcttaaatcaaggctgtctgcttatttatactagcgtaggcaacacttggatttcccttcttagtatgcttcataactgctttacagagagcttttgcttgttctttctcatgtatctcgtgtttatgtgcacagtgccaaaagaagactgactgggtggaggctctgccttgcctcaagaaccatcccctgcagagcatccagggaggtttctcgccccaatagcctcacggcacagtactcttgggcagtaactggacaccttttatttgaagaaacaaactgaagaaaaaatgcttccttaagtgctgacagcctttttaaccaatacatttaaaattgtacagaacaaaaaaataaaatcaaagactgatcttgtacagatattagtgttaccagcattcatgtggaaatcaagagcaaagacaaaataatgttaaacaattctgtaccataacattttctgtaatgatactgaaacttaatgaataaaaaaattccttgatcattattt

SEQ ID NO: 27754 - DNA, 2118 bp, Artificial Sequence
  derived and/or modified sequence
atggccacagagggcatgatcctgaccaaccacgaccaccagatccgggtgggcgtgctgactgtgtctgacagctgcttcaggaacctggccgaggacagaagtggcatcaacctgaaggacctggtgcaggaccccagcctgctgggcggcaccatcagcgcctacaagatcgtgcctgatgaaattgaggagatcaaggccaccaaggaggtgattgagcgggaggcccctggcatggccctggccatgctgatgggcagcctgaatgtgacccccctgggcatgctgagcaggcctgtgtgtggcatccggggcaagaccctcatcatcaacctgcccggcagcaagaagggcagccaggagtgcttccagttcatcctgcctgccctgccccacgccatcgacctgctgagagatgccatcgtgaaggtgaaggaggtgcatgatgagctggaggacctgcccagccccccaccacccctgagccccccacccaccaccagcccccacaagcagacagaagataaaggagtgcagtgtgaggaggaggaggaggagaagaaggacagcggcgtggccagcacagaggacagcagcagcagccacatcacagctgctgccatcgccgccaagatcccagacagcatcatcagcagaggagtgcaggtgctgccccgggacacagccagcctgagcaccaccccatctgagagcccccgggcccaggccaccagccggctgagcacagccagctgccccacccccaaggtgcagagccgctgcagcagcaaggagaacatcctgcgggccagccacagcgctgtggacatcaccaaggtggcccggcggcacaggatgagccccttccccctgacctccatggacaaggccttcatcaccgtgctggagatgacccctgtgctgggcacagagatcatcaactacagagatggcatgggccgggtgctggcccaggatgtgtatgccaaggacaacctgccccccttccctgcctctgtgaaggatggctatgctgtgcgggcagcagatggccctggggaccgcttcatcattggagagagccaggccggggagcagcccacccagacagtgatgcctggccaggtgatgagggtgaccaccggggcccccatcccctgtggggctgatgctgtggtgcaggtggaggacacagagctgatccgggagagtgatgatggaacagaggagctggaggtgcgcatcctggtgcaggcccggcccggccaggacatccggcccatcggccatgacatcaagagaggagaatgtgtgctggccaagggcacccacatgggccccagcgagatcggcctgctggccaccgtgggcgtgacagaggtggaggtgaacaagtttcctgtggtggccgtgatgagcactggaaatgagctgctgaacccagaagatgacctgctgcccgggaagatccgggacagcaacagaagcaccctgctggccaccatccaggagcacggctaccccaccatcaacctgggcatcgtgggggacaacccagatgacctgctgaatgccctgaatgaaggcatcagcagagcagatgtgatcatcaccagcggcggcgtgtccatgggagagaaggactacctgaagcaggtgctggacatcgacctgcacgcccagatccacttcggccgggtcttcatgaagccaggcctgcccaccacctttgccaccctggacattgatggagtgaggaagatcatctttgccctgcccggcaaccctgtgtctgctgtggtgacctgcaacctgtttgtggtgcctgccctgaggaagatgcagggcatcctggacccccggcccaccatcatcaaggcccggctgagctgtgatgtgaagctggaccccaggcctgagtaccaccgctgcatcctgacctggcaccaccaggagcccctgccctgggcccagagcactggaaaccagatgagcagccggctgatgtccatgaggtctgccaacggcctgctgatgctgccccccaagacagagcagtatgtggagctgcacaagggggaggtggtggatgtgatggtgattggccgcctgtag

SEQ ID NO: 27755 - DNA, 2211 bp, Artificial Sequence
  derived and/or modified sequence
atggccacagagggcatgatcctgaccaaccacgaccaccagatccgggtgggcgtgctgactgtgtctgacagctgcttcaggaacctggccgaggacagaagtggcatcaacctgaaggacctggtgcaggaccccagcctgctgggcggcaccatcagcgcctacaagatcgtgcctgatgaaattgaggagatcaaggagaccctgattgactggtgtgatgagaaggagctgaacctgatcctgaccactggaggcaccggctttgcccccagagatgtgaccccagaggccaccaaggaggtgattgaaagagaggcccctggcatggccctggccatgctgatgggcagcctgaatgtgacccccctgggcatgctgagcaggcctgtgtgtggcatccggggcaagaccctcatcatcaacctgcccggcagcaagaagggcagccaggagtgcttccagttcatcctgcctgccctgccccacgccatcgacctgctgagagatgccatcgtgaaggtgaaggaggtgcatgatgagctggaggacctgcccagccccccaccacccctgagccccccacccaccaccagcccccacaagcagacagaggacaagggcgtgcagtgtgaggaggaggaggaggagaagaaggacagcggcgtggccagcacagaggacagcagcagcagccacatcacagctgctgccatcgccgccaagatcccagacagcatcatcagccggggcgtgcaggtgctgccccgggacacagccagcctgagcaccacccccagcgagagcccccgggcccaggccaccagccggctgagcacagccagctgccccacccccaaggtgcagagccgctgcagcagcaaagaaaacatcctgcgggccagccacagcgctgtggacatcaccaaggtggcccggcggcacaggatgagccccttccccctgacctccatggacaaggccttcatcaccgtgctggagatgacccctgtgctgggcacagagatcatcaactacagagatggcatgggccgggtgctggcccaggatgtgtatgccaaggacaacctgccccccttccctgcctctgtgaaggatggctatgctgtgcgggctgctgatggccctggggaccgcttcatcatcggggagagccaggccggggagcagcccacccagacagtgatgcctggccaggtgatgagggtgaccactggagcccccatcccctgtggggctgatgctgtggtgcaggtggaggacacagagctgatccgggagagtgatgatggaacagaggagctggaggtgcgcatcctggtgcaggcccggcccggccaggacatccggcccatcggccatgacatcaagagaggagaatgtgtgctggccaagggcacccacatgggccccagcgagatcggcctgctggccaccgtgggcgtgacagaggtggaggtgaacaagtttcctgtggtggccgtgatgagcactggaaatgagctgctgaacccagaagatgacctgctgcccgggaagatccgggacagcaacagaagcaccctgctggccaccatccaggagcacggctaccccaccatcaacctgggcatcgtgggggacaacccagatgacctgctgaatgccctgaatgaaggcatcagcagagcagatgtgatcatcaccagcggaggagtgtccatgggagagaaggactacctgaagcaggtgctggacatcgacctgcacgcccagatccacttcggccgggtcttcatgaagccaggcctgcccaccacctttgccaccctggacattgatggagtgaggaagatcatctttgccctgcccggcaaccctgtgtctgctgtggtgacctgcaacctgtttgtggtgcctgccctgaggaagatgcagggcatcctggacccccggcccaccatcatcaaggcccggctgagctgtgatgtgaagctggaccccaggcctgagtaccaccgctgcatcctgacctggcaccaccaggagcccctgccctgggcccagagcacaggcaaccagatgagcagccggctgatgtccatgaggtctgccaacggcctgctgatgctgccccccaagacagagcagtatgtggagctgcacaagggggaggtggtggatgtgatggtgattggccgcctgtag

SEQ ID NO: 27756 - DNA, 2118 bp, Artificial Sequence
  derived and/or modified sequence
atggccaccgagggcatgatcctgaccaaccacgaccaccagatccgcgtcggggttttgaccgtcagcgacagctgcttccgtaatttagctgaggataggagcggaattaatctgaaggacttagtgcaggatcccagtctgcttgggggaactatctccgcctataaaattgtgcccgatgagattgaggagataaaagcaactaaggaggtcatcgagcgcgaggcacctggcatggcgctggccatgctgatggggtcactaaatgttacacccctcggcatgttgagccgccccgtgtgcgggattcgcgggaaaactctcatcatcaacctacccggctccaagaaaggatcgcaggagtgtttccagtttatccttcctgctttaccacatgctattgacttgctgcgggacgcaattgtgaaagtgaaagaagtgcacgacgaattggaggatctacctagtccccctcccccactaagccctcctccgactacatcaccccataagcagactgaagataagggggtgcaatgtgaagaggaggaagaggaaaagaaagactccggagtggccagtactgaggactccagctccagtcacatcacagctgctgccatcgccgcaaagattcctgatagcattatcagtcggggtgtgcaggtactccctcgagacacagcaagtctcagcaccacaccatctgaaagccctcgcgcgcaagccacttcaaggctgtctaccgcttcgtgtcctacaccaaaggtgcaaagcagatgcagttccaaagaaaacatactccgggcgagccactcagcagtcgacatcacaaaggtggcccgcaggcatcgcatgagccccttcccactgacgtccatggacaaggccttcataaccgtgctggagatgactcccgtactgggtactgagataatcaattatcgcgatggtatgggcagagtcctggcacaggatgtctatgctaaggataaccttcctccatttccagcgtctgttaaagacgggtacgctgtcagagccgccgacgggcctggggatagatttataattggggagtcacaggcgggcgagcagcccacacagaccgtgatgccaggccaggtgatgagagtcacaaccggtgcccccatcccatgcggggccgacgctgtggttcaagtggaggacactgaactgatccgcgaatccgatgacggtactgaagaactcgaggtgcggatcctggtccaggcacgacctgggcaggatatcagaccaatcggtcacgacatcaaacgtggtgagtgcgtcctcgcaaaaggcacccatatgggcccaagtgaaataggcctcctggccacggttggcgtaacagaagttgaggtcaacaaattccctgtcgtggcagtgatgagcacaggtaatgagcttctgaaccccgaagatgatctcctgcccggaaaaattcgggactccaaccggtctacactgctggcaaccatccaggaacacggctacccaacaatcaatttggggatcgtaggcgataatccggacgatctcctgaacgccctgaacgaggggatctcaagagccgatgtgattataacttccggcggtgtctctatgggagaaaaagactacctcaaacaggtcctggacattgacctgcatgcccagatccattttgggagggtgtttatgaaaccaggcctgccaaccacattcgctaccctcgacattgatggtgtaagaaaaatcatctttgccttgccaggtaaccccgtgtctgctgtcgtgacatgtaacttgttcgtagtgcctgctctgcgaaagatgcagggcatcctggatccaaggcccactatcattaaggctcgtctatcctgcgacgtcaaactggacccgcgcccagagtatcacaggtgcatcctcacttggcaccaccaggaaccattgccctgggcccagtctacaggaaatcagatgagcagcaggctgatgtccatgcgcagtgctaacgggctgctgatgctcccacccaagaccgagcagtatgtagagctccacaagggtgaggtggtggacgttatggtgattggtaggctctag

SEQ ID NO: 27757 - DNA, 2211 bp, Artificial Sequence
  derived and/or modified sequence
atggccaccgagggcatgatcctgaccaaccacgaccaccagatccgggtgggcgtgctgacggtgagcgacagctgttttaggaatttagcggaagacaggtctggaattaatctgaaagacctggtgcaggacccaagtctcttgggcggtaccatctctgcgtataagatagtccccgatgagatagaggagatcaaggagacactgattgactggtgtgatgaaaaagagcttaatctcatcctgaccacaggtggtacaggcttcgcgccccgtgacgtgacaccagaggccacaaaggaggtcatagagagagaggccccaggtatggccttagccatgttaatgggatccctaaacgttacaccccttggtatgctgtctaggcccgtctgtggcattcgcggtaagacgctgattataaacctacctgggagcaagaagggatcacaggagtgtttccagttcatcttacctgccctcccccatgcaatcgatctgctacgcgatgctatcgtgaaagtgaaagaggtgcacgacgaactagaggatttgccaagcccgcctcccccactgtcccctccgcctacaacaagcccccacaagcagaccgaagataaaggggttcaatgtgaagaggaggaggaggagaagaaggactctggtgtggcctcaaccgaggactcctcgagttcccacatcaccgccgccgctattgctgcgaaaatccccgacagcattattagtcgcggcgtgcaggtgctaccacgtgatacagcctctctcagtaccactccctccgaatctcccagagcacaggccacctctagacttagcacagctagctgccctacacctaaggttcagagccggtgctcgtcaaaagagaatattctgagggcgtcccatagcgccgtggacattaccaaagtggcccgccgacaccgtatgtcaccatttccccttacctctatggataaggccttcataacagttctggagatgactccggtgctaggtacagaaatcatcaactacagggatggcatgggcagggtgctggcacaggacgtgtacgcaaaggacaacctcccaccatttcccgcaagtgtcaaagacggttacgctgtccgtgcggccgacggaccgggtgacaggtttattattggggagagtcaagccggagagcagcctactcagaccgtgatgcctggacaggtaatgagggtcacaaccggcgcacctataccatgtggtgccgatgccgtcgtccaagtggaggataccgagttgatccgagagtccgatgatgggaccgaagaactcgaagtccggattctggttcaggcccggccagggcaggatatccggcctatcgggcatgatatcaagcgaggcgaatgtgtactggcaaagggaacacacatgggtcctagcgaaatcggcctcttagcgactgtcggggttacagaggtcgaggtgaataaattccccgtcgtggcagtcatgtccactggaaatgaactgctcaaccccgaggacgacctgctgcccggaaagatcagggatagcaaccggagtaccctgctggctaccattcaggagcatggataccctacgataaatctgggaatagtgggggacaaccctgatgacctgttgaatgcccttaatgaaggaatcagtcgtgccgacgtcattattactagtggcggtgtctcaatgggagaaaaggactatttaaaacaggttctggacatcgaccttcatgcccagatacacttcgggcgagtattcatgaagccaggccttcccactacatttgctacactggacatcgatggcgtgcgcaagattatctttgctctacctgggaatccagtctcagctgtagtaacatgcaacctgtttgtcgtaccagctttgcgaaaaatgcaaggcatacttgatcctcggcctactatcatcaaggcacgtctgtcttgcgacgttaagctcgatcctaggccagagtaccaccgttgcattcttacctggcatcatcaggagcccctgccctgggcccagagtacaggaaatcagatgtcttctcggctgatgtctatgcgctctgctaatggcctcttaatgctgccccccaagaccgagcagtatgtggagcttcataagggtgaggtagtggatgtgatggtcatcggcagactgtag

SEQ ID NO: 27758 - DNA, 2118 bp, Artificial Sequence
  derived and/or modified sequence
atggctaccgaaggaatgattctgaccaatcacgaccatcagatccgtgtcggcgtgttgactgttagcgattcatgctttcgcaatctcgccgaggaccgatccggcatcaatctcaaggacctggtccaggacccctcattactcggagggactatctccgcctacaagatcgtccccgacgaaatcgaggagatcaaggcgaccaaagaggtgatcgagcgcgaggctcccggaatggcactcgctatgcttatgggatctttaaacgtaacaccattgggcatgttatctaggccggtctgcggcattagaggtaagacacttatcattaacctgccaggatctaaaaagggatctcaagagtgctttcagttcatcctccccgctttgccacatgccatcgacctgctgagagacgcaattgtgaaggtgaaggaggtgcatgatgagttagaggatctcccatccccacctccgcctctcagtccccctcccaccacaagtcctcacaaacagaccgaagacaaaggcgtgcagtgcgaagaagaggaagaggaaaaaaaggattccggggtggcaagcaccgaagacagttcctcgagccacatcacagccgcagccattgcagccaagattccagattcgatcatcagtagaggcgttcaggtgctcccaagagacacagccagtttgagtactacaccttcggaatctccgagagcccaggctactagtagactatcgacagccagttgtcccactcctaaggtccagtccagatgctccagcaaagagaacattctgcgcgcatcacatagcgctgtagacattaccaaggtcgccagaaggcaccgcatgtcgccctttccattgacatccatggataaagcgtttatcactgtgctagagatgacgcccgtactgggcaccgaaattatcaactatagagacggtatgggcagagtgttggcccaggacgtctatgccaaagacaatctgcccccttttcctgctagcgtgaaagacggctatgccgtcagagcggcagacggaccaggggacaggtttatcataggagagagccaagccggagaacaacctactcagactgtgatgcccggacaagtgatgcgggttacaacaggggctcctatcccttgtggcgcagatgccgtggtccaagttgaggacaccgaactcattcgcgaatctgacgatggcacagaggaactggaggttcggattctcgtgcaggccagacctggacaggatatccgcccaatcggtcacgacataaagaggggggagtgcgtgctggccaagggcacccacatggggccaagtgaaatcggcctgttggctactgtgggtgtcacagaggttgaggtcaacaaatttcccgtggtggctgtaatgtctaccgggaatgaactcctcaaccctgaggatgatctactgcccggtaagatccgcgatagtaaccgtagcactctccttgctacaattcaggagcacggataccctacaattaatttgggcatagtcggtgataatccggacgatttactcaatgccctgaacgagggaatttcaagagccgacgttatcatcacctccggcggtgtaagcatgggcgagaaagattacctgaagcaggtcctagatatcgatctgcacgcacaaatccacttcggccgagtcttcatgaagcctggtctgccgactacatttgcgaccctggatattgacggcgtgaggaagattatttttgcccttccagggaacccggtgtctgctgttgtcacctgcaatctgttcgttgttccggcactccggaagatgcagggcattctcgatccaagaccaacaatcataaaggcccgattaagttgtgatgtcaagcttgatccaaggcctgagtatcatagatgtatccttacatggcaccatcaggaacctctgccgtgggctcagtcgacgggtaaccagatgtcaagtcgtctgatgtccatgcgctccgctaatggcctgttaatgctgcccccaaagactgagcagtacgttgagctgcacaagggcgaagttgtggacgtcatggtgattggcagactgtag

SEQ ID NO: 27759 - DNA, 2211 bp, Artificial Sequence
  derived and/or modified sequence
atggctactgaaggcatgatcctcaccaatcacgaccaccagatccgagtgggcgtattaaccgtatcagattcatgcttccggaacctggctgaagatagatcaggcatcaatctgaaggatctggtgcaggacccctctctcctcgggggaacaattagtgcttataagattgttcccgatgaaattgaagaaatcaaggagaccttgattgattggtgtgatgagaaggaactgaatctgatactgaccactggcggaacgggctttgcaccgagagacgtgaccccagaggccaccaaggaggtgatcgagcgtgaggctcctggcatggccttggccatgctgatgggcagtctcaatgtcactcctctcgggatgctatctcgccctgtgtgtggaattagagggaaaacgctgatcattaatctgccaggtagtaagaaaggctcacaagagtgtttccaatttatacttcctgccctcccccacgcgatcgatctcctgagagacgccatcgtcaaggtgaaagaggtgcatgatgaactggaggacctgccgagccctcccccaccactatcacctcctccaacgacaagcccccataaacagactgaggacaagggcgtgcagtgcgaggaagaagaagaagagaagaaggactcaggcgttgcctctacagaggattcgtctagctcccacatcaccgctgcagccatcgctgccaagattccagactcaataatctcacggggagtacaggttctcccccgtgatacggcaagtctgtctactaccccaagtgaatcccctagggctcaggccacctcgcggctgtcaaccgcaagttgtcctactcctaaagtccagtctcggtgctccagcaaggaaaatattttacgggcttcccattccgcggtcgatatcaccaaggtcgctcgacgacatcggatgagcccatttcctctgacctctatggacaaggccttcatcaccgtcttggagatgacaccagtattgggaaccgagattatcaactatagagacggtatgggacgggtcctggcacaggacgtatacgctaaggacaacctaccacccttccctgccagtgtcaaggatggttatgccgtgagagcagctgatggacccggtgaccggttcatcattggggaaagtcaagcgggtgagcagccaactcaaacagtgatgcctggccaagtgatgagagtgactaccggagccccaattccttgtggagctgatgccgtggtgcaggtggaggatactgagctgatcagggaatctgatgatggaacagaggagttagaagtgcgcattctagtccaggctcgccctggtcaagatattcggcctatcggccacgacatcaaacgcggtgagtgcgtgctcgccaagggtacccacatggggccttctgagatcggcctcctcgcaacagttggcgtgaccgaggtagaagtaaataaatttccggtggtggctgtcatgtcaacaggaaacgaattactcaaccctgaagatgacctcctcccagggaaaatacgcgactccaaccgatctacattactcgctacaatccaggagcatggctaccccactattaaccttgggatcgtgggagacaaccctgacgatctgctcaatgccttaaatgaggggatttctagagcagacgtcattataaccagcggcggagtctccatgggagaaaaagactatttaaaacaggtccttgacatcgacctgcacgcccagatccactttggcagggtcttcatgaagcccggtctcccgacgaccttcgctaccctagacatcgatggagtgcgaaagataatctttgcactgcccggtaacccagtatccgccgtggttacttgtaacctcttcgtggtgcccgcacttagaaaaatgcaagggatattggaccctcggcctacaattataaaagccaggctcagctgcgacgtgaagctggaccctaggcctgagtaccatagatgcattttaacttggcatcatcaggagcctctcccatgggcacaaagtactggcaaccaaatgtccagcaggctcatgagtatgcgcagcgctaacggtctgttgatgctccctccaaagaccgagcaatatgtggagctccataagggggaggtggtggacgtgatggtgatagggcgtttatag

SEQ ID NO: 27760 - DNA, 2118 bp, Artificial Sequence
  derived and/or modified sequence
atggccaccgagggcatgatcctgaccaaccacgaccaccagatcagagtgggcgtgctgaccgtgagcgacagctgcttcagaaacctggccgaggacagaagcggcatcaacctgaaggacctggtgcaggaccccagcctgctgggcggcaccatcagcgcctacaagatcgtgcccgacgagatcgaggagatcaaggccaccaaggaggtgatcgagagagaggcccccggcatggccctggccatgctgatgggcagcctgaacgtgacccccctgggcatgctgagcagacccgtgtgcggcatcagaggcaagaccctgatcatcaacctgcccggcagcaagaagggcagccaggagtgcttccagttcatcctgcccgccctgccccacgccatcgacctgctgagagacgccatcgtgaaggtgaaggaggtgcacgacgagctggaggacctgcccagcccccccccccccctgagccccccccccaccaccagcccccacaagcagaccgaggacaagggcgtgcagtgcgaggaggaggaggaggagaagaaggacagcggcgtggccagcaccgaggacagcagcagcagccacatcaccgccgccgccatcgccgccaagatccccgacagcatcatcagcagaggcgtgcaggtgctgcccagagacaccgccagcctgagcaccacccccagcgagagccccagagcccaggccaccagcagactgagcaccgccagctgccccacccccaaggtgcagagcagatgcagcagcaaggagaacatcctgagagccagccacagcgccgtggacatcaccaaggtggccagaagacacagaatgagccccttccccctgaccagcatggacaaggccttcatcaccgtgctggagatgacccccgtgctgggcaccgagatcatcaactacagagacggcatgggcagagtgctggcccaggacgtgtacgccaaggacaacctgccccccttccccgccagcgtgaaggacggctacgccgtgagagccgccgacggccccggcgacagattcatcatcggcgagagccaggccggcgagcagcccacccagaccgtgatgcccggccaggtgatgagagtgaccaccggcgcccccatcccctgcggcgccgacgccgtggtgcaggtggaggacaccgagctgatcagagagagcgacgacggcaccgaggagctggaggtgagaatcctggtgcaggccagacccggccaggacatcagacccatcggccacgacatcaagagaggcgagtgcgtgctggccaagggcacccacatgggccccagcgagatcggcctgctggccaccgtgggcgtgaccgaggtggaggtgaacaagttccccgtggtggccgtgatgagcaccggcaacgagctgctgaaccccgaggacgacctgctgcccggcaagatcagagacagcaacagaagcaccctgctggccaccatccaggagcacggctaccccaccatcaacctgggcatcgtgggcgacaaccccgacgacctgctgaacgccctgaacgagggcatcagcagagccgacgtgatcatcaccagcggcggcgtgagcatgggcgagaaggactacctgaagcaggtgctggacatcgacctgcacgcccagatccacttcggcagagtgttcatgaagcccggcctgcccaccaccttcgccaccctggacatcgacggcgtgagaaagatcatcttcgccctgcccggcaaccccgtgagcgccgtggtgacctgcaacctgttcgtggtgcccgccctgagaaagatgcagggcatcctggaccccagacccaccatcatcaaggccagactgagctgcgacgtgaagctggaccccagacccgagtaccacagatgcatcctgacctggcaccaccaggagcccctgccctgggcccagagcaccggcaaccagatgagcagcagactgatgagcatgagaagcgccaacggcctgctgatgctgccccccaagaccgagcagtacgtggagctgcacaagggcgaggtggtggacgtgatggtgatcggcagactgtag

SEQ ID NO: 27761 - DNA, 2211 bp, Artificial Sequence
  derived and/or modified sequence
atggccaccgagggcatgatcctgaccaaccacgaccaccagatcagagtgggcgtgctgaccgtgagcgacagctgcttcagaaacctggccgaggacagaagcggcatcaacctgaaggacctggtgcaggaccccagcctgctgggcggcaccatcagcgcctacaagatcgtgcccgacgagatcgaggagatcaaggagaccctgatcgactggtgcgacgagaaggagctgaacctgatcctgaccaccggcggcaccggcttcgcccccagagacgtgacccccgaggccaccaaggaggtgatcgagagagaggcccccggcatggccctggccatgctgatgggcagcctgaacgtgacccccctgggcatgctgagcagacccgtgtgcggcatcagaggcaagaccctgatcatcaacctgcccggcagcaagaagggcagccaggagtgcttccagttcatcctgcccgccctgccccacgccatcgacctgctgagagacgccatcgtgaaggtgaaggaggtgcacgacgagctggaggacctgcccagcccccccccccccctgagccccccccccaccaccagcccccacaagcagaccgaggacaagggcgtgcagtgcgaggaggaggaggaggagaagaaggacagcggcgtggccagcaccgaggacagcagcagcagccacatcaccgccgccgccatcgccgccaagatccccgacagcatcatcagcagaggcgtgcaggtgctgcccagagacaccgccagcctgagcaccacccccagcgagagccccagagcccaggccaccagcagactgagcaccgccagctgccccacccccaaggtgcagagcagatgcagcagcaaggagaacatcctgagagccagccacagcgccgtggacatcaccaaggtggccagaagacacagaatgagccccttccccctgaccagcatggacaaggccttcatcaccgtgctggagatgacccccgtgctgggcaccgagatcatcaactacagagacggcatgggcagagtgctggcccaggacgtgtacgccaaggacaacctgccccccttccccgccagcgtgaaggacggctacgccgtgagagccgccgacggccccggcgacagattcatcatcggcgagagccaggccggcgagcagcccacccagaccgtgatgcccggccaggtgatgagagtgaccaccggcgcccccatcccctgcggcgccgacgccgtggtgcaggtggaggacaccgagctgatcagagagagcgacgacggcaccgaggagctggaggtgagaatcctggtgcaggccagacccggccaggacatcagacccatcggccacgacatcaagagaggcgagtgcgtgctggccaagggcacccacatgggccccagcgagatcggcctgctggccaccgtgggcgtgaccgaggtggaggtgaacaagttccccgtggtggccgtgatgagcaccggcaacgagctgctgaaccccgaggacgacctgctgcccggcaagatcagagacagcaacagaagcaccctgctggccaccatccaggagcacggctaccccaccatcaacctgggcatcgtgggcgacaaccccgacgacctgctgaacgccctgaacgagggcatcagcagagccgacgtgatcatcaccagcggcggcgtgagcatgggcgagaaggactacctgaagcaggtgctggacatcgacctgcacgcccagatccacttcggcagagtgttcatgaagcccggcctgcccaccaccttcgccaccctggacatcgacggcgtgagaaagatcatcttcgccctgcccggcaaccccgtgagcgccgtggtgacctgcaacctgttcgtggtgcccgccctgagaaagatgcagggcatcctggaccccagacccaccatcatcaaggccagactgagctgcgacgtgaagctggaccccagacccgagtaccacagatgcatcctgacctggcaccaccaggagcccctgccctgggcccagagcaccggcaaccagatgagcagcagactgatgagcatgagaagcgccaacggcctgctgatgctgccccccaagaccgagcagtacgtggagctgcacaagggcgaggtggtggacgtgatggtgatcggcagactgtag

SEQ ID NO: 27762 - protein, 181 aa, Artificial Sequence
  derived and/or modified sequence
MGNIFANLFKGLFGKKEMRILMVGLDAAGKTTILYKLKLGEIVTTIPTIGFNVETVEYKNISFTVWDVGGQDKIRPLWRHYFQNTQGLIFVVDSNDRERVNEAREELMRMLAEDELRDAVLLVFANKQDLPNAMNAAEITDKLGLHSLRHRNWYIQATCATSGDGLYEGLDWLSNQLRNQK

SEQ ID NO: 27763 - protein, 172 aa, Artificial Sequence
  derived and/or modified sequence
MGNIFANLFKGLFGKKEMRILMVGLDAAGKTTILYKLKLGEIVTTIPTIGFNVETVEYKNISFTVWDVGGQDKIRPLWRHYFQNTQGLIFVVDSNDRERVNEAQDELRDAVLLVFANKQDLPNAMNAAEITDKLGLHSLRHRNWYIQATCATSGDGLYEGLDWLSNQLRNQK

SEQ ID NO: 27764 - DNA, 546 bp, Artificial Sequence
  derived and/or modified sequence
atgggcaatattttcgctaatctgtttaaaggactttttggcaagaaggagatgcgcatcctcatggttggtctcgacgcggctggtaagactacgatcctgtacaaactgaagctgggcgagatagtcactacaatcccaaccataggattcaatgtagagactgtagagtacaaaaacatctccttcaccgtgtgggatgtgggcggacaggacaagatacgaccgctgtggcgacactatttccagaatacccagggtttaatctttgttgtagattctaacgaccgcgaaagagtcaacgaggcacgcgaagaactcatgcggatgttagcagaggatgagctgagggacgcggtgttactagtgtttgctaataagcaggatttgcccaatgctatgaacgccgccgaaattacagacaagcttggcctgcactctctgcgacaccgaaactggtacatacaggctacatgcgcaacaagcggggacgggctgtacgagggactggattggctgtctaaccagctgcggaaccagaaatag

SEQ ID NO: 27765 - DNA, 546 bp, Artificial Sequence
  derived and/or modified sequence
atggggaatatttttgccaacctgtttaagggccttttcggaaaaaaagaaatgcggattttaatggtgggattagatgcagccggtaagaccacgatcctgtacaagctcaagctgggcgagatcgttaccacgatccccactatcgggttcaatgtagagaccgtggaatacaagaatattagcttcaccgtgtgggacgtcggggggcaggataaaattaggcccctctggcgccattattttcagaacacgcagggcctgatttttgtggtcgactctaacgatcgagagagggtaaacgaagctcgcgaggagcttatgcgcatgttagctgaagacgagctgcgggatgccgtcctgttagtcttcgccaacaaacaagatcttcctaacgccatgaatgccgcggagatcacggacaagctgggacttcactcgctccgccaccgaaattggtacatccaagctacatgcgccacatccggcgacggactttacgagggattggactggctgtctaaccagctgagaaaccaaaaatag

SEQ ID NO: 27766 - DNA, 546 bp, Artificial Sequence
  derived and/or modified sequence
atgggcaacatctttgctaatttgtttaaaggcctctttggaaagaaagagatgcggattcttatggttgggttggacgctgctgggaaaacaacaatcctttacaagctcaagctgggcgaaatcgtcactacaataccaacaatagggttcaatgtcgaaaccgtggagtacaagaacatttccttcacggtctgggatgtcggcggacaggacaagatccgtcccctgtggaggcattattttcagaacacacaggggctgatctttgtggtggactctaacgaccgagagagagtgaatgaggcgagagaggaattgatgagaatgcttgctgaggatgaacttcgagacgctgtgctgctggtgttcgcaaataagcaggatcttcctaacgcaatgaacgcagcggaaatcaccgacaaactcggactgcatagtttacgacatcgcaactggtatatacaagctacgtgtgccaccagcggagatggactgtatgagggtttggactggctaagtaaccagctccggaatcagaagtag

SEQ ID NO: 27767 - DNA, 519 bp, Artificial Sequence
  derived and/or modified sequence
atgggcaacattttcgccaatctgttcaaagggttattcggcaagaaggaaatgagaattctgatggtgggcctagatgccgccggaaaaacaaccattctctacaaattgaaactaggggaaattgttacgacgatccctaccatcggttttaacgtggaaacagtagagtacaaaaacatctccttcactgtgtgggacgttggcgggcaggacaaaattcgtcctttatggcggcattatttccagaatacccaggggcttattttcgtggtcgacagcaatgatagggagcgggtgaacgaggctcaagacgagcttcgcgacgcggtgctgctggtgttcgcaaataaacaggatctgccaaatgcaatgaatgccgcggaaattacagataagctgggtttgcatagcctccgacatcggaactggtatatccaggctacatgcgcaacatcgggcgatggcctgtacgaaggactggactggctctctaaccagcttcggaaccagaaatag

SEQ ID NO: 27768 - DNA, 1885 bp, Artificial Sequence
  derived and/or modified sequence
ccttacccggcgtgccccgcgcccggaggcgctgacgtggccgccgtcagagccgccatcttgtgggagcaaaaccaacgcctggctcggagcagcagcctctgaggtgtccctggccagtgtccttccacctgtccacaagcatggggaacatcttcgccaacctcttcaagggcctttttggcaaaaaagaaatgcgcatcctcatggtgggcctggatgctgcagggaagaccacgatcctctacaagcttaagctgggtgagatcgtgaccaccattcccaccataggcttcaacgtggaaaccgtggagtacaagaacatcagcttcactgtgtgggacgtgggtggccaggacaagatccggcccctgtggcgccactacttccagaacacacaaggcctgatcttcgtggtggacagcaatgacagagagcgtgtgaacgaggcccgtgaggagctcatgaggatgctggccgaggacgagctccgggatgctgtcctcctggtgttcgccaacaagcaggacctccccaacgccatgaatgcggccgagatcacagacaagctggggctgcactcactacgccacaggaactggtacattcaggccacctgcgccaccagcggcgacgggctctatgaaggactggactggctgtccaatcagctccggaaccagaagtgaacgcgacccccctccctctcactcctcttgccctctgctttactctcatgtggcaaacgtgcggctcgtggtgtgagtgccagaagctgcctccgtggtttggtcaccgtgtgcatcgcaccgtgctgtaaatgtggcagacgcagcctgcggccaggctttttatttaatgtaaatagtttttgtttccaatgaggcagtttctggtactcctatgcaatattactcagctttttttattgtaaaaagaaaaatcaactcactgttcagtgctgagaggggatgtaggcccatgggcacctggcctccaggagtcgctgtgttgggagagccggccacgcccttggctttagagctgtgttgaaatccattttggtggttggtttttaacccaaactcagtgcattttttaaaatagttaagaatccaagtcgagaacacttgaacacacagaagggagaccccgcctagcatagatttgcagttacggcctggatgccagtcgccagcccagctgttcccctcgggaacatgaggtggtggtggcgcagcagactgcgatcaattctgcatggtcacagtagagatccccgcaactcgcttgtccttgggtcaccctgcattccatagccatgtgcttgtccctgtgctcccacggttcccaggggccaggctgggagcccacagccaccccactatgccgcaggccgccctacccaccttcaggcagcctatgggacgcagggccccatctgtccctcggtcgccgtgtggccagagtgggtccgtcgtccccaacactcgtgctcgctcagacactttggcaggatgtctggggcctcaccagcaggagcgcgtgcaagccgggcaggcggtccacctagacccacagcccctcgggagcaccccacctctgtgtgtgatgtagctttctctccctcagcctgcaagggtccgatttgccatcgaaaaagacaacctctacttttttcttttgtattttgataaacactgaagctggagctgttaaatttatcttggggaaacctcagaactggtctatttggtgtcgtggaacctcttactgctttcaatacacgattagtaatcaactgttttgtatacttgttttcagttttcatttcgacaaacaagcactgtaattatagctattagaataaaatctcttaactatt

SEQ ID NO: 27769 - DNA, 1972 bp, Artificial Sequence
  derived and/or modified sequence
ccttacccggcgtgccccgcgcccggaggcgctgacgtggccgccgtcagagccgccatcttgtgggagcaaaaccaacgcctggctcggagcagcagcctctgaggtgagggcgaggggcgcgggccggtgtgggccgcagagacgttggagccggcgggggctggggactggcctcggggcgacttgaggtgtccctggccagtgtccttccacctgtccacaagcatggggaacatcttcgccaacctcttcaagggcctttttggcaaaaaagaaatgcgcatcctcatggtgggcctggatgctgcagggaagaccacgatcctctacaagcttaagctgggtgagatcgtgaccaccattcccaccataggcttcaacgtggaaaccgtggagtacaagaacatcagcttcactgtgtgggacgtgggtggccaggacaagatccggcccctgtggcgccactacttccagaacacacaaggcctgatcttcgtggtggacagcaatgacagagagcgtgtgaacgaggcccgtgaggagctcatgaggatgctggccgaggacgagctccgggatgctgtcctcctggtgttcgccaacaagcaggacctccccaacgccatgaatgcggccgagatcacagacaagctggggctgcactcactacgccacaggaactggtacattcaggccacctgcgccaccagcggcgacgggctctatgaaggactggactggctgtccaatcagctccggaaccagaagtgaacgcgacccccctccctctcactcctcttgccctctgctttactctcatgtggcaaacgtgcggctcgtggtgtgagtgccagaagctgcctccgtggtttggtcaccgtgtgcatcgcaccgtgctgtaaatgtggcagacgcagcctgcggccaggctttttatttaatgtaaatagtttttgtttccaatgaggcagtttctggtactcctatgcaatattactcagctttttttattgtaaaaagaaaaatcaactcactgttcagtgctgagaggggatgtaggcccatgggcacctggcctccaggagtcgctgtgttgggagagccggccacgcccttggctttagagctgtgttgaaatccattttggtggttggtttttaacccaaactcagtgcattttttaaaatagttaagaatccaagtcgagaacacttgaacacacagaagggagaccccgcctagcatagatttgcagttacggcctggatgccagtcgccagcccagctgttcccctcgggaacatgaggtggtggtggcgcagcagactgcgatcaattctgcatggtcacagtagagatccccgcaactcgcttgtccttgggtcaccctgcattccatagccatgtgcttgtccctgtgctcccacggttcccaggggccaggctgggagcccacagccaccccactatgccgcaggccgccctacccaccttcaggcagcctatgggacgcagggccccatctgtccctcggtcgccgtgtggccagagtgggtccgtcgtccccaacactcgtgctcgctcagacactttggcaggatgtctggggcctcaccagcaggagcgcgtgcaagccgggcaggcggtccacctagacccacagcccctcgggagcaccccacctctgtgtgtgatgtagctttctctccctcagcctgcaagggtccgatttgccatcgaaaaagacaacctctacttttttcttttgtattttgataaacactgaagctggagctgttaaatttatcttggggaaacctcagaactggtctatttggtgtcgtggaacctcttactgctttcaatacacgattagtaatcaactgttttgtatacttgttttcagttttcatttcgacaaacaagcactgtaattatagctattagaataaaatctcttaactatttc

SEQ ID NO: 27770 - DNA, 2006 bp, Artificial Sequence
  derived and/or modified sequence
gcccgcgcgtggacggttgggattagcggccgcgggggccggtgggggtcgtggggcctcccccacccgagtacaggcgagcgagcggcatccgggcggacccccgcctcggggaccgggaaactgaggctcgggcggcctgagacgccgtcaaggtcatgtaggtggtgggggcttgcatcttcgcctcccgactccatccagttcgtgtttgctgtgaagacggtgtccctggccagtgtccttccacctgtccacaagcatggggaacatcttcgccaacctcttcaagggcctttttggcaaaaaagaaatgcgcatcctcatggtgggcctggatgctgcagggaagaccacgatcctctacaagcttaagctgggtgagatcgtgaccaccattcccaccataggcttcaacgtggaaaccgtggagtacaagaacatcagcttcactgtgtgggacgtgggtggccaggacaagatccggcccctgtggcgccactacttccagaacacacaaggcctgatcttcgtggtggacagcaatgacagagagcgtgtgaacgaggcccgtgaggagctcatgaggatgctggccgaggacgagctccgggatgctgtcctcctggtgttcgccaacaagcaggacctccccaacgccatgaatgcggccgagatcacagacaagctggggctgcactcactacgccacaggaactggtacattcaggccacctgcgccaccagcggcgacgggctctatgaaggactggactggctgtccaatcagctccggaaccagaagtgaacgcgacccccctccctctcactcctcttgccctctgctttactctcatgtggcaaacgtgcggctcgtggtgtgagtgccagaagctgcctccgtggtttggtcaccgtgtgcatcgcaccgtgctgtaaatgtggcagacgcagcctgcggccaggctttttatttaatgtaaatagtttttgtttccaatgaggcagtttctggtactcctatgcaatattactcagctttttttattgtaaaaagaaaaatcaactcactgttcagtgctgagaggggatgtaggcccatgggcacctggcctccaggagtcgctgtgttgggagagccggccacgcccttggctttagagctgtgttgaaatccattttggtggttggtttttaacccaaactcagtgcattttttaaaatagttaagaatccaagtcgagaacacttgaacacacagaagggagaccccgcctagcatagatttgcagttacggcctggatgccagtcgccagcccagctgttcccctcgggaacatgaggtggtggtggcgcagcagactgcgatcaattctgcatggtcacagtagagatccccgcaactcgcttgtccttgggtcaccctgcattccatagccatgtgcttgtccctgtgctcccacggttcccaggggccaggctgggagcccacagccaccccactatgccgcaggccgccctacccaccttcaggcagcctatgggacgcagggccccatctgtccctcggtcgccgtgtggccagagtgggtccgtcgtccccaacactcgtgctcgctcagacactttggcaggatgtctggggcctcaccagcaggagcgcgtgcaagccgggcaggcggtccacctagacccacagcccctcgggagcaccccacctctgtgtgtgatgtagctttctctccctcagcctgcaagggtccgatttgccatcgaaaaagacaacctctacttttttcttttgtattttgataaacactgaagctggagctgttaaatttatcttggggaaacctcagaactggtctatttggtgtcgtggaacctcttactgctttcaatacacgattagtaatcaactgttttgtatacttgttttcagttttcatttcgacaaacaagcactgtaattatagctattagaataaaatctcttaactatttc

SEQ ID NO: 27771 - DNA, 1796 bp, Artificial Sequence
  derived and/or modified sequence
gtgggagcaaaaccaacgcctggctcggagcagcagcctctgaggtgtccctggccagtgtccttccacctgtccacaagcatggggaacatcttcgccaacctcttcaagggcctttttggcaaaaaagaaatgcgcatcctcatggtgggcctggatgctgcagggaagaccacgatcctctacaagcttaagctgggtgagatcgtgaccaccattcccaccataggcttcaacgtggaaaccgtggagtacaagaacatcagcttcactgtgtgggacgtgggtggccaggacaagatccggcccctgtggcgccactacttccagaacacacaaggcctgatcttcgtggtggacagcaatgacagagagcgtgtgaacgaggcccaggacgagctccgggatgctgtcctcctggtgttcgccaacaagcaggacctccccaacgccatgaatgcggccgagatcacagacaagctggggctgcactcactacgccacaggaactggtacattcaggccacctgcgccaccagcggcgacgggctctatgaaggactggactggctgtccaatcagctccggaaccagaagtgaacgcgacccccctccctctcactcctcttgccctctgctttactctcatgtggcaaacgtgcggctcgtggtgtgagtgccagaagctgcctccgtggtttggtcaccgtgtgcatcgcaccgtgctgtaaatgtggcagacgcagcctgcggccaggctttttatttaatgtaaatagtttttgtttccaatgaggcagtttctggtactcctatgcaatattactcagctttttttattgtaaaaagaaaaatcaactcactgttcagtgctgagaggggatgtaggcccatgggcacctggcctccaggagtcgctgtgttgggagagccggccacgcccttggctttagagctgtgttgaaatccattttggtggttggtttttaacccaaactcagtgcattttttaaaatagttaagaatccaagtcgagaacacttgaacacacagaagggagaccccgcctagcatagatttgcagttacggcctggatgccagtcgccagcccagctgttcccctcgggaacatgaggtggtggtggcgcagcagactgcgatcaattctgcatggtcacagtagagatccccgcaactcgcttgtccttgggtcaccctgcattccatagccatgtgcttgtccctgtgctcccacggttcccaggggccaggctgggagcccacagccaccccactatgccgcaggccgccctacccaccttcaggcagcctatgggacgcagggccccatctgtccctcggtcgccgtgtggccagagtgggtccgtcgtccccaacactcgtgctcgctcagacactttggcaggatgtctggggcctcaccagcaggagcgcgtgcaagccgggcaggcggtccacctagacccacagcccctcgggagcaccccacctctgtgtgtgatgtagctttctctccctcagcctgcaagggtccgatttgccatcgaaaaagacaacctctacttttttcttttgtattttgataaacactgaagctggagctgttaaatttatcttggggaaacctcagaactggtctatttggtgtcgtggaacctcttactgctttcaatacacgattagtaatcaactgttttgtatacttgttttcagttttcatttcgacaaacaagcactgtaattatagctattagaataaaatctcttaactatt

SEQ ID NO: 27772 - DNA, 546 bp, Artificial Sequence
  derived and/or modified sequence
atgggcaacatctttgccaacctcttcaagggcctgtttgggaagaaggagatgaggatcctgatggtgggcctggatgctgctgggaagaccaccatcctgtacaagctgaagctgggggagatcgtgaccaccatccccaccatcggcttcaacgtggagaccgtggagtacaagaacatctccttcaccgtgtgggatgtgggcggccaggacaagatccggcccctgtggaggcactacttccagaacacccagggcctcatctttgtggtggacagcaatgaccgggagcgggtgaatgaggcccgggaggagctgatgaggatgctggctgaagatgagctgagagatgctgtgctgctggtgtttgccaacaagcaggacctgcccaatgccatgaatgctgctgagatcacagacaagctgggcctgcacagcctgcggcacaggaactggtacatccaggccacctgtgccaccagcggagatggcctgtatgagggcctggactggctgagcaaccagctgaggaaccagaagtag

SEQ ID NO: 27773 - DNA, 519 bp, Artificial Sequence
  derived and/or modified sequence
atgggcaacatctttgccaacctcttcaagggcctgtttgggaagaaggagatgaggatcctgatggtgggcctggatgctgctgggaagaccaccatcctgtacaagctgaagctgggggagatcgtgaccaccatccccaccatcggcttcaacgtggagaccgtggagtacaagaacatctccttcaccgtgtgggatgtgggcggccaggacaagatccggcccctgtggaggcactacttccagaacacccagggcctcatctttgtggtggacagcaatgaccgggagcgggtgaatgaggcccaggatgagctgagagatgctgtgctgctggtgtttgccaacaagcaggacctgcccaatgccatgaatgctgctgagatcacagacaagctgggcctgcacagcctgcggcacaggaactggtacatccaggccacctgtgccaccagcggagatggcctgtatgagggcctggactggctgagcaaccagctgaggaaccagaagtag

SEQ ID NO: 27774 - DNA, 546 bp, Artificial Sequence
  derived and/or modified sequence
atgggcaacatcttcgccaacctgttcaagggcctgttcggcaagaaggagatgagaattctgatggtcgggctcgacgcagccgggaaaaccaccattctttacaagctcaagttaggcgagattgtaactaccattcctacaattggatttaacgtagagacggtagaatacaaaaacatttcctttactgtatgggatgtcggcggccaggacaagattaggcctttgtggcgccattactttcagaatacccaaggtctcatcttcgttgtcgattcgaacgaccgggagagggttaacgaggcacgcgaggaacttatgaggatgttagcagaggacgagctccgcgacgccgtgctgctcgtctttgcgaataagcaggatttaccaaacgccatgaatgcggcagaaatcacagataagctgggattgcattctctgaggcaccggaattggtatattcaggcaacctgcgcaaccagcggagacggcctctatgagggtctcgactggttatcaaatcagcttcggaatcaaaaatag

SEQ ID NO: 27775 - DNA, 546 bp, Artificial Sequence
  derived and/or modified sequence
atgggcaacatcttcgccaacctgttcaagggcctgttcggcaagaaagagatgcgtatcctgatggtggggttggacgctgcagggaagacaacgattctgtataagcttaaactcggggagatcgtcacaaccatccccacgatcggctttaatgtggaaacagttgaatacaaaaacatctcgttcactgtgtgggacgtgggaggtcaagacaaaattagaccactgtggcggcactatttccagaatacgcaggggctaatcttcgtggtcgatagcaatgatcgggaacgggtcaatgaagctagagaggaattgatgcggatgttggccgaggacgaacttcgcgatgctgtcctactggtatttgcgaacaagcaagacctgcctaatgcaatgaacgccgcagagattaccgacaagctcggcctgcattctctgagacaccgcaattggtatatccaggctacatgtgccacctctggcgacggtttgtatgaagggctggattggctgagcaaccaactgaggaaccagaaatag

SEQ ID NO: 27776 - DNA, 546 bp, Artificial Sequence
  derived and/or modified sequence
atgggcaacatcttcgccaacctgttcaagggcctgttcggcaagaaagagatgagaatcctcatggtagggctggacgcagcgggtaagacaacaatcctctacaagctgaagttaggtgaaatagtgaccaccatacccaccatagggttcaacgttgagaccgtggagtataagaacatctccttcacggtatgggatgtcggtggccaggacaagattagacctctgtggaggcactactttcaaaacactcaaggactgatctttgtcgtggacagcaatgaccgcgaaagagtgaacgaggctagggaggaacttatgcgaatgctggctgaggacgagctgcgggacgccgtgctgcttgtgttcgcgaacaaacaggacctgccgaatgcaatgaacgcagccgagatcacggacaagctcggtctgcatagcctgcgccaccgcaattggtatatccaggctacctgcgccacctctggagatgggctctacgagggcctggactggctcagtaaccagctgcggaaccagaaatag

SEQ ID NO: 27777 - DNA, 519 bp, Artificial Sequence
  derived and/or modified sequence
atgggcaacatcttcgccaacctgttcaagggcctgttcggcaagaaggagatgcgtattctgatggtcggtctcgatgccgccggcaaaacaactatcctgtacaagcttaagctcggcgaaatagtgacaactatacctaccattggcttcaacgtagagaccgtggagtataagaacatatcatttaccgtgtgggacgtcggaggtcaagataagatccggccactgtggaggcattatttccagaatacccaaggcctgatttttgtcgtggactccaatgatagagaacgcgtgaacgaggcccaggacgaactcagagatgccgtcctcctcgtcttcgctaataaacaggacctgcccaatgctatgaatgccgccgagattacggataagctgggcttgcattcccttagacaccgaaattggtacattcaggcaacttgtgctacttcaggagatggactgtatgagggtcttgactggctcagcaaccagcttaggaaccagaaatag

SEQ ID NO: 27778 - DNA, 546 bp, Artificial Sequence
  derived and/or modified sequence
atgggaaatatcttcgccaatctatttaaagggctattcggaaagaaggaaatgcggatattgatggtcgggctggatgccgctgggaaaacgacaatcctgtacaaactcaaattgggcgagatcgtgaccactatcccaacaataggttttaacgtcgagacagtcgaatacaaaaacatatcctttacggtgtgggacgtgggaggacaggataaaatccgccctctctggagacattatttccagaacacccagggtctgatatttgtggttgatagcaacgaccgggaaagggtgaacgaggcacgcgaagaattgatgaggatgttggcagaggatgagctgcgtgacgcggtgctcctggtttttgccaacaagcaggatctcccaaatgcaatgaacgcggcagagataactgataaactcggacttcactcactgcgccatcgcaactggtatatacaagccacatgcgcgacctccggcgacggactgtacgagggccttgactggctgagcaatcagttacggaatcagaaatag

SEQ ID NO: 27779 - DNA, 546 bp, Artificial Sequence
  derived and/or modified sequence
atgggaaatatcttcgctaacctattcaaaggtctcttcggaaagaaggagatgcggattttaatggttggcctcgacgccgctgggaaaacaaccattctgtacaaactaaagttgggtgagattgtaactacaatcccaacaatcggatttaacgtggaaaccgttgagtataagaacatttcctttacagtctgggacgttggaggccaggataagatcaggcccctttggcggcactatttccagaacacgcaaggactgatatttgtagtcgattctaatgatagagaacgagttaacgaagcaagggaggaactcatgcggatgctggccgaggacgaattgcgtgatgctgtcctgctcgtttttgcgaataagcaagacttacccaatgcaatgaatgccgctgagatcaccgataaactgggcctgcactcactgcgccacagaaactggtatatccaggccacctgcgccaccagtggagatggactgtacgagggcctggactggctctccaaccagctgcggaatcaaaagtag

SEQ ID NO: 27780 - DNA, 546 bp, Artificial Sequence
  derived and/or modified sequence
atgggaaacatctttgccaacttgttcaaagggctcttcggtaagaaagagatgcggattctcatggtcggcctggacgctgcaggcaaaactactatactatacaaactcaagctgggcgagatcgttactactattccaaccatcggatttaacgttgagacagtggaatataagaacattagctttacggtctgggacgtcgggggtcaagataagatcagaccactgtggcggcattatttccagaatacccagggactgatttttgtggtcgactccaacgatagggaaagagtgaacgaagcacgcgaggagctaatgaggatgctggccgaagacgagcttcgggatgcagtacttcttgtcttcgccaataagcaagacttacctaacgcgatgaacgccgctgagatcacagataaattgggactgcattccctgaggcatagaaattggtacattcaggccacctgtgcaactagtggcgacggattgtacgaaggactggattggttatctaaccagctgaggaaccagaaatag

SEQ ID NO: 27781 - DNA, 519 bp, Artificial Sequence
  derived and/or modified sequence
atgggtaacatctttgccaacttattcaagggcctctttggcaagaaagagatgcggatcctcatggttgggctggatgctgcaggcaaaaccaccattctgtacaaattaaaattgggcgaaatcgtcacaaccatccctacgatcggcttcaacgttgagacagtggaatataagaacatttcctttaccgtgtgggacgtaggcggtcaagataaaattcggccactgtggagacactattttcagaacacccagggtttaattttcgttgtcgattcaaacgaccgtgaacgagtaaatgaagcacaggatgaactaagggacgcggtgctgctcgtgtttgccaataagcaggatctgccaaatgctatgaatgcagcagaaattacagacaaactggggctgcactctttgcgacacaggaattggtacatccaggctacgtgcgcaactagtggggatggcctgtacgagggcctagactggctttcaaatcagcttcgaaatcagaaatag

SEQ ID NO: 27782 - DNA, 546 bp, Artificial Sequence
  derived and/or modified sequence
atgggcaacatcttcgccaacctgttcaagggcctgttcggcaagaaggagatgagaatcctgatggtgggcctggacgccgccggcaagaccaccatcctgtacaagctgaagctgggcgagatcgtgaccaccatccccaccatcggcttcaacgtggagaccgtggagtacaagaacatcagcttcaccgtgtgggacgtgggcggccaggacaagatcagacccctgtggagacactacttccagaacacccagggcctgatcttcgtggtggacagcaacgacagagagagagtgaacgaggccagagaggagctgatgagaatgctggccgaggacgagctgagagacgccgtgctgctggtgttcgccaacaagcaggacctgcccaacgccatgaacgccgccgagatcaccgacaagctgggcctgcacagcctgagacacagaaactggtacatccaggccacctgcgccaccagcggcgacggcctgtacgagggcctggactggctgagcaaccagctgagaaaccagaagtag

SEQ ID NO: 27783 - DNA, 519 bp, Artificial Sequence
  derived and/or modified sequence
atgggcaacatcttcgccaacctgttcaagggcctgttcggcaagaaggagatgagaatcctgatggtgggcctggacgccgccggcaagaccaccatcctgtacaagctgaagctgggcgagatcgtgaccaccatccccaccatcggcttcaacgtggagaccgtggagtacaagaacatcagcttcaccgtgtgggacgtgggcggccaggacaagatcagacccctgtggagacactacttccagaacacccagggcctgatcttcgtggtggacagcaacgacagagagagagtgaacgaggcccaggacgagctgagagacgccgtgctgctggtgttcgccaacaagcaggacctgcccaacgccatgaacgccgccgagatcaccgacaagctgggcctgcacagcctgagacacagaaactggtacatccaggccacctgcgccaccagcggcgacggcctgtacgagggcctggactggctgagcaaccagctgagaaaccagaagtag

SEQ ID NO: 27784 - DNA, 165 bp, Artificial Sequence
  derived and/or modified sequence
atgggctgtgggggctcccgagcggacgctatcgagcctagatattacgagtcatggacccgcgagaccgaatcaacctggctcacttacaccgattcagatgctcccccttcagctgctgcccctgatagtggtcccgaggccggggggttgcactccggatag

SEQ ID NO: 27785 - DNA, 165 bp, Artificial Sequence
  derived and/or modified sequence
atgggctgcggcggcagcagagcagatgccatcgagccccgctactatgagagctggacccgggagacagagagcacctggctgacctacacagacagtgatgccccacccagcgctgctgccccagacagcggccctgaggccggcggcctgcacagcggctag

SEQ ID NO: 27786 - DNA, 165 bp, Artificial Sequence
  derived and/or modified sequence
atgggctgcggcggcagccgggccgacgccatcgagccccggtactatgaatcctggactagggagaccgaatcaacatggctgacatacactgactccgacgcccctccctcagctgccgcacctgacagcggccccgaagctgggggcctgcacagtggatag

SEQ ID NO: 27787 - DNA, 165 bp, Artificial Sequence
  derived and/or modified sequence
atgggatgtggtggcagtagagctgacgcaatagagccgcgatactacgagtcatggaccagagagactgaaagcacatggctgacatacactgactcagatgctcctccctctgcagctgccccagactccggaccagaagctggcggtctccatagtggctag

SEQ ID NO: 27788 - DNA, 2662 bp, Artificial Sequence
  derived and/or modified sequence
gggagagggcccggactaggggcggcgggcaccgcaggagctccgcgcggctgcagcgcgggcgggagcggggacgcgatgtcgccgccgccgcctccttgcgggccggggctgcgcctccggggctgagccgccgccagagccgacagccgagcagccgctgggcgctcccgcggcgcaggaggatgggctgcggcgggagccgggcggatgccatcgagccccgctactacgagagctggacccgggagacagaatccacctggctcacctacaccgactcggacgcgccgcccagcgccgccgccccggacagcggccccgaagcgggcggcctgcactcgggctaaaagagatgctaagagaatgcctgcaaaagaagtcaccattaatgtaacagatagcatccaacagatggacagaagtcgaagaatcacaaagaactgtgtcaactagcagagagtccaagcagaagggcagatggacttcttcagtgtccttcacggcactggatcccatcaaagaaccttgaagaagtggctgccccttgctggacctgaattctactgagtccctggcaagactgtcttacctggcagcaaactgctgcctgatttgttgggaccttctgagccttctacttatcatgtaaatgtattggcacagtgcttacatatgttaataaactgcaaatgtgcagttcagtttgtctctttgcaactcctgtaatacggtctggtgtaaaagtagtgagttaaagctacaggtcagtttatgaaacagaaaagtaggaatgcattttctgggtgaaagagtcacaccttagtgctataactctcctgcccatgatagtgtattctgtttcaggcaagcttattctttccttctttcattttaaatattgtcattacaaatcttaccaggttcacttaaaagctggctttcatccaactctaaacccacatattgaaaaaatcaaggtacaggaaaactccttgttatccttgtttccttagcttggtatgagacagatcggatccagtttcccatgcaccaacccactgcccatggcatgtctttgggaggtgtctgtgaagcagtcatacctgctcctcatctgcctggaaagtcctcctattccagtgtccatgttggcctccagtccttaatgtcaccatgcttgtggccaatgcatccaaataaggatacccctcagggctcagctagacattgcaattttgcatagctttccagttccctttgcttgtcttcttgactgtcttccctctctatcggggtcacttgcaattgttaatcaaagattgaacactgcgtaggagagggagatgatccagagacatgtggcagcaggcatggcttccccttggcctctctgtacactgccccaggactgtcattttggcatctgcaaaggaatcactttagaaagccagcacctggttgatgtgtattcatactgacattagattgatgtgcactgcattagaaatgaggtagctgacacagaaaaaggatgttttgataggaataattttctagtatgtcttgaaacatgttcatctggaagtattttcctccaaagtaatgtagcatgatttttcaaggattgttaacatgcctgggattgggaaagataggactaaagttgtgccaaactatatcaataaattccatgtttagcagaaataggcagcctattggtgttatgtttatgtaacatagtccagagaactgacatgcaggtcaaaagtcagatacgcaacctccttatctgctaactctgttattcttcaaacacaagtgggtagtgtcatttttccttccttccttccattggcagattgtatatttattcacaaaacattaaatgtccatcctgtgccaggtactatgcagatgttgagggatttggggtctggttagtcgtgactatctatcctgaatctaacagtgacttcataactaggagactgaattagacccttaaggtatagtgtgtgttgcaaatcactctgcaatggaaacttttatattcagggtaggtttgtgtcttaaactaggtgttctaatcaatgtacaagactttaccatacacgcaactatagtttttctaaaccttcatcattttgtgattctttgagaaagggcttttaggaactttatgttctaaaaaatgtttttaacaataataagataaaagaaaaacctgtgattcatatgtccccactggcattactcagcaggagcccccagctgccaaaggttggcagtgatcctgcaagttcaagggctctttctccctggggatgtgctttgtggcttctctttacagctttgtttctgcatcagttcactgctgcatgttgtttggaatttatcaccttaagaaagtgtctctgttttatatagaaacactttctcacttacaggggagaaggaaatgcagggcacatgatctggccctccccagaacaatctggatttcacggagacagcaaccagaagttaaaccatgtgactaaaaatgcatctggctactttttcatgtatgtatgagacagaaactaatccttactatcctattaggataccacttttcattgcaaagtttgtgtcaataaagtcattaattttaaacata

SEQ ID NO: 27789 - DNA, 165 bp, Artificial Sequence
  derived and/or modified sequence
atgggctgcggcggcagcagagccgacgccatcgagcccagatactacgagagctggaccagagagaccgagagcacctggctgacctacaccgacagcgacgccccccccagcgccgccgcccccgacagcggccccgaggccggcggcctgcacagcggctag

SEQ ID NO: 27790 - protein, 2385 aa, Artificial Sequence
  derived and/or modified sequence
MPVLGVASKLRQPAVGSKPVHTALPIPNLGTTGSQHCSSRPLELTETESSMLSCQLALKSTCEFGEKKPLQGKAKEKEDSKIYTDWANHYLAKSGHKRLIKDLQQDIADGVLLAEIIQIIANEKVEDINGCPRSQSQMIENVDVCLSFLAARGVNVQGLSAEEIRNGNLKAILGLFFSLSRYKQQQHHQQQYYQSLVELQQRVTHASPPSEASQAKTQQDMQSSLAARYATQSNHSGIATSQKKPTRLPGPSRVPAAGSSSKVQGASNLNRRSQSFNSIDKNKPPNYANGNEKDSSKGPQSSSGVNGNVQPPSTAGQPPASAIPSPSASKPWRSKSMNVKHSATSTMLTVKQSSTATSPTPSSDRLKPPVSEGVKTAPSGQKSMLEKFKLVNARTALRPPQPPSSGPSDGGKDDDAFSESGEMEGFNSGLNSGGSTNSSPKVSPKLAPPKAGSKNLSNKKSLLQPKEKEEKNRDKNKVCTEKPVKEEKDQVTEMAPKKTSKIASLIPKGSKTTAAKKESLIPSSSGIPKPGSKVPTVKQTISPGSTASKESEKFRTTKGSPSQSLSKPITMEKASASSCPAPLEGREAGQASPSGSCTMTVAQSSGQSTGNGAVQLPQQQQHSHPNTATVAPFIYRAHSENEGTALPSADSCTSPTKMDLSYSKTAKQCLEEISGEDPETRRMRTVKNIADLRQNLEETMSSLRGTQISHSTLETTFDSTVTTEVNGRTIPNLTSRPTPMTWRLGQACPRLQAGDAPSLGAGYPRSGTSRFIHTDPSRFMYTTPLRRAAVSRLGNMSQIDMSEKASSDLDMSSEVDVGGYMSDGDILGKSLRTDDINSGYMTDGGLNLYTRSLNRIPDTATSRDIIQRGVHDVTVDADSWDDSSSVSSGLSDTLDNISTDDLNTTSSVSSYSNITVPSRKNTQLRTDSEKRSTTDETWDSPEELKKPEEDFDSHGDAGGKWKTVSSGLPEDPEKAGQKASLSVSQTGSWRRGMSAQGGAPSRQKAGTSALKTPGKTDDAKASEKGKAPLKGSSLQRSPSDAGKSSGDEGKKPPSGIGRSTATSSFGFKKPSGVGSSAMITSSGATITSGSATLGKIPKSAAIGGKSNAGRKTSLDGSQNQDDVVLHVSSKTTLQYRSLPRPSKSSTSGIPGRGGHRSSTSSIDSNVSSKSAGATTSKLREPTKIGSGRSSPVTVNQTDKEKEKVAVSDSESVSLSGSPKSSPTSASACGAQGLRQPGSKYPDIASPTFRRLFGAKAGGKSASAPNTEGVKSSSVMPSPSTTLARQGSLESPSSGTGSMGSAGGLSGSSSPLFNKPSDLTTDVISLSHSLASSPASVHSFTSGGLVWAANMSSSSAGSKDTPSYQSMTSLHTSSESIDLPLSHHGSLSGLTTGTHEVQSLLMRTGSVRSTLSESMQLDRNTLPKKGLRYTPSSRQANQEEGKEWLRSHSTGGLQDTGNQSPLVSPSAMSSSAAGKYHFSNLVSPTNLSQFNLPGPSMMRSNSIPAQDSSFDLYDDSQLCGSATSLEERPRAISHSGSFRDSMEEVHGSSLSLVSSTSSLYSTAEEKAHSEQIHKLRRELVASQEKVATLTSQLSANAHLVAAFEKSLGNMTGRLQSLTMTAEQKESELIELRETIEMLKAQNSAAQAAIQGALNGPDHPPKDLRIRRQHSSESVSSINSATSHSSIGSGNDADSKKKKKKNWVNSRGSELRSSFKQAFGKKKSTKPPSSHSDIEELTDSSLPASPKLPHNAGDCGSASMKPSQSASASPLVWPPKKRQNGPVIYKHRSRICECTEAEAEIILQLKSELREKELKLTDIRLEALSSAHHLDQIREAMNRMQNEIEILKAENDRLKAETGNTAKPTRPPSESSSSTSSSSSRQSLGLSLNNLNITEAVSSDILLDDAGDATGHKDGRSVKIIVSISKGYGRAKDQKSQAYLIGSIGVSGKTKWDVLDGVIRRLFKEYVFRIDTSTSLGLSSDCIASYCIGDLIRSHNLEVPELLPCGYLVGDNNIITVNLKGVEENSLDSFVFDTLIPKPITQRYFNLLMEHHRIILSGPSGTGKTYLANKLAEYVITKSGRKKTEDAIATFNVDHKSSKELQQYLANLAEQCSADNNGVELPVVIILDNLHHVGSLSDIFNGFLNCKYNKCPYIIGTMNQGVSSSPNLELHHNFRWVLCANHTEPVKGFLGRYLRRKLIEIEIERNIRNNDLVKIIDWIPKTWHHLNSFLETHSSSDVTIGPRLFLPCPMDVEGSRVWFMDLWNYSLVPYILEAVREGLQMYGKRTPWEDPSKWVLDTYPWSSATLPQESPALLQLRPEDVGYESCTSTKEATTSKHIPQTDTEGDPLMNMLMKLQEAANYSSTQSCDSESTSHHEDILDSSLESTL

SEQ ID NO: 27791 - DNA, 7158 bp, Artificial Sequence
  derived and/or modified sequence
atgccagtccttggcgtcgcgtcgaaactgcggcagccagctgttggaagtaagcccgtgcatactgccttacccattccaaacttgggcactaccgggagccagcattgcagctcccggccactggagcttacagagaccgagtcgtctatgctctcatgtcagctcgctttaaagtctacctgtgagttcggcgagaagaagcctctccagggcaaggccaaggagaaagaggactcgaaaatctatacagactgggcaaatcattatctcgctaagagtgggcataaacgtcttattaaagacttgcagcaagacatcgctgacggcgtcctgctcgctgagattattcagatcatcgctaatgaaaaagtcgaggacataaacgggtgcccaagatcccaatcccagatgattgagaacgtcgacgtatgtctgagctttctggcggcccggggggtgaacgttcagggactcagtgccgaggagattaggaacggtaacttgaaggccatcctggggctcttcttctcactgagtaggtacaaacagcagcaacatcaccaacagcagtactaccaatccctggtggagttacagcagcgtgtcacccacgccagcccaccctctgaagcctcacaggccaagacccagcaggatatgcaaagttccctcgcggcacggtatgccacccaaagcaatcacagcgggatcgcaaccagccagaagaaacctacgcgcctccccgggccttcccgggtgcccgcagcaggatctagctcaaaggtacagggcgcctctaacctcaaccgccggtcacaatcctttaactctattgataaaaataagccccctaactatgcaaatggcaacgaaaaagactcctccaaaggaccccaaagttcaagcggggtgaatggcaatgtccagcctccaagcacagccggtcagccacccgctagcgccatccccagtccaagcgcctctaaaccttggagaagcaaaagcatgaacgtaaaacattctgccacctccactatgctgaccgtaaagcaatcatcaaccgcaaccagccctactcccagctctgaccgcctcaagcctcccgtgagtgaaggtgtgaaaacagccccttctggccagaagtctatgctcgagaagttcaagctggtgaatgcccgcaccgccctccggcccccccaacccccttccagcgggcccagcgacggagggaaagacgatgacgccttcagcgagagcggcgagatggaggggttcaattccggactaaatagcggaggcagcaccaattccagtcctaaagtatcccctaagcttgctcctcccaaggcggggtctaagaacctaagcaacaaaaaaagcctccttcagcccaaagagaaggaggaaaagaaccgcgataaaaataaggtctgcactgaaaaaccagtgaaggaggaaaaggaccaggttaccgagatggcccccaaaaagaccagcaaaatagcaagcctgatccctaagggctcaaagacgaccgctgcaaagaaggagtctctgatccccagttcttcggggattcctaaacccggtagcaaagtgccaaccgtgaaacagaccatttctcccgggtcaacggccagcaaagagagcgagaaattccggacgactaagggaagcccatcccagagcctctcaaagccaattaccatggaaaaggcgtccgcgtcctcctgcccggctcctcttgagggacgtgaagcaggccaggcttcgccttcaggttcatgcaccatgacagtagcccaaagctctggtcagagcaccggaaatggagccgtgcagcttcctcaacaacagcagcatagtcatcctaacaccgccacagttgccccctttatatatcgagcccatagtgaaaacgaaggtacggccctgcccagcgcagatagctgtaccagtccaactaaaatggatttgtcatatagcaaaacagccaagcagtgtcttgaggaaatatcaggcgaagacccggagacccgacgtatgaggactgtgaaaaacattgcggatctccggcagaatcttgaggagactatgagctcgctccggggcacgcagatatcacatagtaccttggaaacaaccttcgattccacagtaacaacggaggtgaacggtagaactataccgaacttgacaagccgacccactcctatgacgtggcgccttggtcaggcatgcccacggctccaggctggcgatgccccctctctgggagctgggtaccccaggagtggtacttcacgttttattcatacggatcctagtcgattcatgtatacgaccccactcagacgagccgcggtcagtcgcttgggtaacatgtcccagatcgacatgagtgaaaaggcttcctctgacttggatatgtcctccgaagtcgacgttggagggtacatgtcagacggggacatcctgggcaagtccctgaggacagatgatatcaatagcgggtacatgactgatggagggctgaatctgtacactcggtccttaaaccgtatacccgatacagccaccagccgagacatcatccagcgcggcgtgcacgatgtaactgttgatgccgacagctgggacgactcgtcctccgttagttctggactgtctgacacgcttgacaacattagcacagatgatctgaataccacatcatccgtgtcttcttacagcaacattaccgtcccatcaagaaagaatactcaactcagaacagacagtgagaaacgatccaccaccgatgagacctgggatagtcccgaagagctaaaaaaacctgaggaggactttgactcgcacggagacgctggggggaagtggaagacagtttcctctggcctgcccgaggatcctgaaaaagccgggcagaaagccagtctctctgtttcacagaccggaagttggcgtcggggaatgagtgctcagggtggcgctccatccagacaaaaagccggaacctccgcactgaagacccctggaaagactgatgatgcgaaggctagtgagaagggaaaggcgccactgaagggcagcagtctgcaaagatccccaagcgacgctgggaagtcaagcggagacgaaggaaaaaagccccccagcgggatcggccggagtaccgctacaagctcattcggatttaaaaaaccatcaggcgtcgggagctcagccatgattacctctagtggcgccaccataacctctggcagcgcaacgctgggaaagattcccaaatctgccgctatcggtggcaaaagcaacgccgggaggaaaacttcactggatggaagccaaaatcaggatgatgtagtgctacatgtgagcagcaaaactactctgcagtaccgcagccttccccgcccaagcaaatcctccacctcaggcatccctggtcggggaggtcaccgctcttcaacttcctccattgatagcaacgtatcctccaagtctgccggggcaaccacttccaagctacgggagcccaccaagatcggcagtggaaggtcatctcccgtcactgtgaatcagaccgacaaggagaaggaaaaggtcgctgtatcagattcagaatccgtctcgctgagcggcagtccaaagtctagccctacctctgcgtccgcatgtggtgcacaaggtctacgccagccagggtcaaagtatcctgatatcgcatctccgacttttcgcaggctctttggcgccaaggcagggggcaagtccgcctccgctccgaacaccgagggggtcaaatcaagttccgtcatgccctcaccttccaccactctcgcgagacaggggagtctcgaatctccgagctctgggactggttcaatgggctccgcgggcggactgagcggtagcagcagcccactcttcaacaagccttcagacttgaccacggatgtgataagcctgtcacactcgttggccagctcacctgcatctgtgcactcctttacgagcggaggcttggtctgggcagcaaatatgtctagctcctccgcaggatcaaaggacacccccagctaccagtcaatgacaagcttacacacctcatccgagtccattgacctgcctctcagccatcatggatccctctctgggctgaccacagggacacacgaagttcagagtctgctcatgagaacagggtctgttcgctctactctctccgaaagcatgcaattagacagaaacaccttaccaaagaaaggtctacggtatacacctagcagccgccaggccaatcaagaggaagggaaagaatggctgcgctcccattctactggcgggcttcaggacaccgggaatcagtccccactggtgagcccatccgctatgtccagcagcgccgccggcaagtatcatttcagcaacctggtttcacccaccaatttatctcagttcaacctgccagggccatcaatgatgcggtcaaatagcatacctgcacaggactcctcttttgacctgtatgatgatagccagctctgtggtagcgcgactagcctagaggaaaggccccgtgcaattagccatagcggtagtttccgcgacagcatggaggaggttcacggctcaagtctgtctctcgtgagctccaccagcagcctttattcaactgcggaggagaaagcgcacagcgagcagatccataaactgcgtagagagctggttgcctcacaggaaaaagtcgccacgctcacatcgcagctttctgcaaatgcacacttagttgctgcctttgagaagtcccttggtaacatgaccgggaggctgcaatccctgacaatgaccgctgaacaaaaggagagcgagctaatagaactgagagagacaattgagatgctgaaggcccaaaacagcgctgcgcaggccgcaatccagggagctcttaatgggcctgatcatcccccaaaggatctgaggattcggagacaacactcatctgaaagtgtatcctccatcaattcagccacttctcactccagcataggcagcggcaatgatgcagacagtaaaaaaaagaaaaagaaaaattgggtgaacagccgtggctctgagcttagatcaagctttaagcaagccttcggcaaaaaaaagtccacaaagccccctagcagccactcggatatagaagaactcaccgacagcagtcttccggccagtccaaagcttcctcataacgcgggcgactgtggctctgcttcaatgaagcctagtcagtccgcttctgcgtcgcccctggtttggccgcctaagaagcggcagaacggcccagttatttacaagcacaggtctagaatttgcgagtgcaccgaagcagaggcagaaatcatcctccagctcaaaagcgaactgcgcgagaaggagctgaaactgaccgacataagattagaggccttgagttcagctcaccatctggatcagattagggaagccatgaaccgcatgcaaaatgaaatagagattctgaaggcagaaaacgatcgcctgaaagctgaaacagggaacacggctaagccaactaggccaccttccgaatcatcctcttccactagttcctcgagctccagacagagcttggggctctcactgaacaacttaaatattactgaagctgtcagcagcgacatactgcttgatgacgccggcgatgccaccggccacaaggacggtaggtctgttaagatcattgtatcgatctctaaagggtacggcagagccaaagaccagaagagccaagcctatcttattggatcaatcggagtgagtgggaaaactaaatgggacgtgctcgacggcgttatccgtaggttatttaaagaatacgtgttccgcatagatacatccacttcactcgggttgtcttcagactgcattgccagctattgtatcggagatctgatcagatcgcacaacctggaagtccccgaactgctcccctgcggatatctggttggcgataacaacatcatcactgtgaacttgaagggcgtagaggaaaacagtctcgacagcttcgtttttgacacgctgatccccaaaccaatcactcagagatattttaatttgcttatggagcaccaccgcataattctgagtgggccctctggcacgggcaaaacatacctggcgaacaagctggcggagtatgtaatcaccaagagtggaaggaagaagaccgaagatgccatcgctacatttaatgtggatcacaagagctctaaagagctccagcagtacctcgctaaccttgccgaacagtgctctgctgataataacggtgtggaacttcccgtcgtaatcattttggacaacttacaccatgtcggatccctgagtgacatcttcaacggcttcctaaactgtaaatacaacaagtgtccatacattatcggaacaatgaatcaaggtgtctcatcttctccaaacctagaattgcatcataatttcaggtgggtgctgtgcgccaatcacactgagcccgtgaagggatttctgggtagatacctgaggaggaaattgattgagatcgagattgagcgaaatataagaaacaatgatttggtcaagataatagactggatcccaaaaacctggcaccacctgaattccttcctcgaaacccactcaagttccgatgtaaccatcggaccgcgtctgtttttgccctgccccatggatgtggaaggtagccgggtctggtttatggacctgtggaattactcgctggtgccctatatcctcgaagccgttcgtgagggtctccagatgtacggaaagcgcacgccctgggaagacccttctaagtgggttctagatacctatccttggagttcagccactctgcctcaggagagtcccgccctgcttcagctgagacccgaggacgtgggctatgagtcctgcacctccacaaaggaagcaacaacaagcaaacatatcccccaaaccgataccgaaggcgaccctctcatgaatatgctcatgaagctgcaggaggccgcgaattattcaagcacacaaagctgcgatagcgagagcacttctcaccacgaggatattttagacagctccctggagtccaccctttag

SEQ ID NO: 27792 - DNA, 7158 bp, Artificial Sequence
  derived and/or modified sequence
atgcctgtgctgggcgtggccagcaagctgcggcagcctgctgtgggcagcaagcctgtgcacacagccctgcccatccccaacctgggcaccaccggcagccagcactgcagcagccggcccctggagctgacagaaacagagagctccatgctgagctgccagctggccctgaagagcacctgtgaatttggagagaagaagcccctgcagggcaaggccaaggagaaggaggacagcaagatctacacagactgggccaaccactacctggccaagagcggccacaagaggctcatcaaggacctgcagcaggacattgctgatggagtgctgctggccgagatcatccagatcatcgccaatgagaaggtggaggacatcaatggctgccccaggagccagagccagatgattgaaaatgtggatgtgtgcctgtccttcctggccgcccggggcgtgaatgtgcagggcctgtctgctgaggagatcagaaatggaaacctgaaggccatcctgggcctcttcttcagcctgagccgctacaagcagcagcagcaccaccagcagcagtactaccagagcctggtggagctgcagcagagggtgacccacgccagcccccccagcgaggccagccaggccaagacccagcaggacatgcagagcagcctggccgcccgctatgccacccagagcaaccacagcggcatcgccaccagccagaagaagcccacccggctgcccggccccagccgggtgcctgctgctggcagcagcagcaaggtgcagggcgccagcaacctgaacagaagaagccagagcttcaacagcattgacaagaacaagccacccaactatgccaatggaaatgagaaggacagcagcaagggcccccagagcagcagtggagtgaatggaaatgtgcagccccccagcacagctggccagcccccagccagcgccatccccagccccagcgccagcaagccctggaggagcaagtccatgaatgtgaagcacagcgccaccagcaccatgctgactgtgaagcagagcagcacagccaccagccccacccccagcagtgaccggctgaagccccctgtgtctgaaggagtgaagacagcccccagcggccagaagtccatgctggagaagttcaagctggtgaatgccaggacagccctgcggcccccccagccccccagcagcggccccagtgatggcggcaaggatgatgatgccttcagcgagagcggggagatggagggcttcaacagcggcctgaacagcggcggcagcaccaacagcagccccaaggtgagccccaagctggccccacccaaggccggcagcaagaacctgagcaacaagaagagcctgctgcagcccaaggagaaggaggagaagaacagagacaagaacaaggtgtgcacagagaagcctgtgaaggaggagaaggaccaggtgacagagatggcccccaagaagaccagcaagatcgccagcctcatccccaagggcagcaagaccacagctgccaagaaggagagcctcatccccagcagcagcggcatccccaagccaggcagcaaggtgcccaccgtgaagcagaccatcagccctggcagcacagccagcaaggagagcgagaagttccgcaccaccaagggcagccccagccagagcctgagcaagcccatcaccatggagaaggccagcgccagcagctgcccagcccccctggagggccgggaggccggccaggccagccccagcggcagctgcaccatgacagtggcccagagcagcggccagagcactggaaatggagctgtgcagctgccccagcagcagcagcacagccaccccaacacagccaccgtggcccccttcatctaccgggcccacagtgaaaatgaaggaacagccctgcccagcgctgacagctgcaccagccccaccaagatggacctgagctacagcaagacagccaagcagtgcctggaggagatcagcggggaggaccctgagaccaggaggatgaggacagtgaagaacattgctgacctgcggcagaacctggaggagaccatgagcagcctgcggggcacccagatcagccacagcaccctggagaccacctttgacagcacagtgaccacagaggtgaatggccgcaccatccccaacctgaccagccggcccacccccatgacctggaggctgggccaggcctgcccccggctgcaggccggagatgcccccagcctgggcgccggctaccccaggagcggcaccagccgcttcatccacacagaccccagccgcttcatgtacaccacccccctgcggcgggctgctgtgtcccggctgggcaacatgagccagattgacatgtctgagaaggccagcagtgacctggacatgagcagcgaggtggatgtgggcggctacatgtctgatggagacatcctgggcaagagcctgaggacagatgacatcaacagcggctacatgacagatggcggcctgaacctgtacaccaggagcctgaaccgcatcccagacacagccaccagccgggacatcatccagaggggcgtgcatgatgtgacagtggatgctgacagctgggatgacagcagctctgtgagcagcggcctgagtgacaccctggacaacatcagcacagatgacctgaacaccaccagctctgtgagcagctacagcaacatcaccgtgcccagcaggaagaacacccagctgaggacagacagcgagaagaggagcaccacagatgagacctgggacagccctgaggagctgaagaagccagaagaagattttgacagccatggagatgctgggggcaagtggaagacagtgagcagcggcctgcctgaggaccctgagaaggccggccagaaggccagcctgtctgtgtcccagacaggctcctggaggcggggcatgtctgcccagggcggggcccccagccggcagaaggccggcaccagcgccctgaagaccccaggcaagacagatgatgccaaggccagcgagaagggcaaggcccccctgaagggcagcagcctgcagaggagccccagtgatgctgggaagagcagtggagatgagggcaagaagccacccagcggcatcggccgcagcacagccaccagcagctttggcttcaagaagcccagcggcgtgggcagcagcgccatgatcaccagcagcggggccaccatcaccagcggcagcgccaccctgggcaagatccccaagtctgctgccatcggcggcaagagcaatgccggcaggaagaccagcctggatggcagccagaaccaggatgatgtggtgctgcacgtgagcagcaagaccaccctgcagtaccgcagcctgccccggcccagcaagagcagcaccagcggcatccctggccggggcggccacaggagcagcaccagcagcattgacagcaatgtgagcagcaagtctgctggggccaccaccagcaagctgcgggagcccaccaagattggcagcggccgcagcagccctgtgacagtgaaccagacagacaaggagaaggagaaggtggccgtgtctgattctgagagcgtgtccctgagcggcagccccaagagcagccccaccagcgccagcgcctgtggggcccagggcctgcggcagcccggcagcaagtacccagacatcgccagccccaccttcagaagactctttggagccaaggccggcggcaagagcgccagcgcccccaacacagagggcgtgaagagcagctctgtgatgcccagccccagcaccaccctggcccggcagggcagcctggagagccccagcagcggcaccggctccatgggcagcgctgggggcctgagcggcagcagcagccccctcttcaacaagcccagcgacctgaccacagatgtgatcagcctgagccacagcctggccagcagccctgcctctgtgcacagcttcaccagcggcggcctggtgtgggccgccaacatgagcagcagcagcgctggcagcaaggacacccccagctaccagagcatgaccagcctgcacaccagcagcgagagcattgacctgcccctgagccaccacggcagcctgagcggcctgaccaccggcacccatgaggtgcagagcctgctgatgaggactggatctgtgcgcagcaccctgtctgagagcatgcagctggacaggaacaccctgcccaagaagggcctgcgctacacccccagcagccggcaggccaaccaggaggagggcaaggagtggctgcggagccacagcactggaggcctgcaggacaccggcaaccagagccccctggtgagccccagcgccatgagcagcagcgctgctgggaagtaccacttcagcaacctggtgagccccaccaacctgagccagttcaacctgcccggccccagcatgatgaggagcaacagcatcccagcccaggacagcagctttgacctgtatgatgacagccagctgtgtggcagcgccaccagcctggaggagcggccccgggccatcagccacagcggcagcttccgggacagcatggaggaggtgcacggcagcagcctgagcctggtgagcagcaccagcagcctgtacagcacagctgaggagaaggcccacagcgagcagatccacaagctgcggcgggagctggtggccagccaggagaaggtggccaccctgaccagccagctgagcgccaatgcccacctggtggccgcctttgagaagagcctgggcaacatgacaggccgcctgcagagcctgaccatgacagctgagcagaaggagagcgagctgattgagctgcgggagaccatcgagatgctgaaggcccagaacagcgctgcccaggccgccatccagggcgccctgaatggaccagaccacccccccaaggacctgcgcatccggcggcagcacagcagcgagagcgtgagcagcatcaacagcgccaccagccacagcagcatcggcagcggaaatgatgctgacagcaagaagaagaagaagaagaactgggtgaacagccggggcagcgagctgcggagcagcttcaagcaggccttcggcaagaagaagagcaccaagccacccagcagccacagcgacatcgaggagctgacagacagcagcctgcctgccagccccaagctgccccacaatgctggggactgtggcagcgcctccatgaagcccagccagagcgccagcgccagccccctggtgtggccacccaagaagaggcagaatggacctgtgatctacaagcacaggagccgcatctgtgaatgtacagaagctgaggccgagatcatcctgcagctgaagtctgagctgcgggagaaggagctgaagctgacagacatccggctggaggccctgagcagcgcccaccacctggaccagatccgggaggccatgaacaggatgcagaatgaaattgagatcctgaaggccgagaatgaccggctgaaggccgagaccggcaacacagccaagcccaccaggcctccttctgagagcagcagcagcaccagcagcagcagcagccggcagagcctgggcctgagcctgaacaacctgaacatcacagaggccgtgtccagtgacatcctgctggatgatgctggagatgccaccggccacaaggatggccgctctgtgaagatcatcgtgtccatcagcaagggctacggccgggccaaggaccagaagagccaggcctacctgattggcagcattggagtgtctgggaagaccaagtgggatgtgctggatggagtcatccggcggctcttcaaggagtatgtgttcagaattgacaccagcaccagcctgggcctgagcagtgactgcatcgccagctactgcatcggggacctgatccgcagccacaacctggaggtgcctgagctgctgccctgtggctacctggtgggggacaacaacatcatcaccgtgaacctgaagggcgtggaggagaacagcctggacagctttgtgtttgacaccctcatccccaagcccatcacccagcgctacttcaacctgctgatggagcaccaccgcatcatcctgagcggccccagcggcaccgggaagacctacctggccaacaagctggccgagtatgtgatcaccaagagcggcaggaagaagacagaagatgccatcgccaccttcaacgtggaccacaagagcagcaaggagctgcagcagtacctggccaacctggccgagcagtgcagcgctgacaacaatggagtggagctgcctgtggtgatcatcctggacaacctgcaccacgtgggcagcctgagtgacatcttcaacggcttcctgaactgcaagtacaacaagtgcccctacatcatcggcaccatgaaccagggcgtgagcagcagccccaacctggagctgcaccacaacttccgctgggtgctgtgtgccaaccacacagagcctgtgaagggcttcctgggccgctacctgcggaggaagctgattgaaattgaaattgaaagaaacatccggaacaatgacctggtgaagatcatcgactggatccccaagacctggcaccacctgaacagcttcctggagacccacagcagcagtgatgtgaccatcggccccaggctcttcctgccctgccccatggatgtggagggcagccgggtgtggttcatggacctgtggaactacagcctggtgccctacatcctggaggccgtgcgggagggcctgcagatgtatggcaagaggaccccctgggaggaccccagcaagtgggtgctggacacctacccctggagcagcgccaccctgccccaggagagccctgccctgctgcagctgcggccagaagatgtgggctatgagagctgcaccagcaccaaggaggccaccaccagcaagcacatcccccagacagacacagaaggagaccccctgatgaacatgctgatgaagctgcaggaggccgccaactacagcagcacccagagctgtgacagcgagagcaccagccaccacgaggacatcctggacagcagcctggagagcaccctgtag

SEQ ID NO: 27793 - DNA, 7158 bp, Artificial Sequence
  derived and/or modified sequence
atgcccgtgctgggcgtggccagcaagctgcggcagcccgccgtgggtagtaagcccgtgcacacagcgctgcctatccccaatctgggaacgaccggctctcagcattgctcttcacggccactggagctgactgaaactgagtctagtatgctgtcatgccaactcgccctgaaatcaacctgtgaattcggagaaaaaaagccactccagggaaaggcaaaggaaaaagaagattccaagatttacaccgactgggcaaatcactatttagccaaaagcggacacaagcggctgattaaagatctccaacaggacattgcagatggcgtgctgctggcagagattatccaaatcatcgcaaatgagaaggtagaggacattaacggctgtcctcgttctcaatctcagatgatcgaaaacgtagacgtatgtctctcctttctagctgcccggggcgttaatgtccaaggcctatcggctgaggaaatccggaatggtaacctgaaagccatactagggctgttcttcagcctatcccgatacaagcagcagcagcatcaccagcaacaatattaccaatccctcgtcgaactccagcagagggttactcacgcctctcctcccagcgaggcctctcaggcaaagacgcaacaggacatgcaatcatcgttggccgcaagatacgcaacacagagcaatcattccggtattgccacatcccaaaagaaacccactagactccccggacctagccgtgtccctgcggccggcagtagctccaaggtacaaggcgcatctaatttaaatcggcgctctcaaagcttcaatagtatcgacaagaacaagcctcccaattatgcaaatggcaatgaaaaagactcttccaaggggccacaatcaagcagtggcgtgaatggcaacgtccagcctccatcgactgcggggcagccacctgcttcagcaatccctagtcccagcgctagcaaaccctggcgttcaaagtccatgaatgttaagcactcagcaacttccacaatgctcactgtcaagcagtctagcaccgccaccagccccacgccgtcctctgatagactcaaacctcccgttagcgagggcgtgaagacagcacccagcggtcagaaatcgatgctcgaaaagtttaagctcgtcaacgcaaggacagctttgcgacctccacagcctccgtcctcaggtcctagcgatggcgggaaggatgatgacgccttcagcgaaagtggcgaaatggaaggatttaactcagggcttaattccggtggctccaccaatagctcgccaaaagtctctcccaagcttgcccctccgaaggctgggtccaaaaacctctccaataagaaaagcctgttacagcctaaggagaaagaagaaaagaatcgggacaaaaacaaggtgtgcacagagaagccagtgaaggaagaaaaagaccaagtcactgagatggcccccaaaaagaccagcaagatcgcttcactgattccaaagggaagtaaaactactgcagccaagaaagagtctctgattccctcttccagcggaatcccgaaacccgggagcaaagtgccaacggtcaagcagacaatatctccagggtccactgccagcaaggagtctgaaaaattcaggacaaccaagggctccccttcccaatccctgagcaagcccatcaccatggaaaaagccagcgccagttcctgtcctgccccgctggaaggccgcgaggccgggcaggctagcccttccggatcttgcactatgaccgtcgcgcagagcagcggccagagcactggcaacggcgccgtgcagctgccacaacagcaacagcacagccaccccaacaccgccacagtggcccccttcatttaccgggctcattccgagaatgaggggaccgccctgcctagtgcagattcctgtaccagccccaccaagatggatctctcctacagcaagacagcaaaacaatgcctcgaggagatttccggcgaggatcccgaaacaagacggatgaggacagtgaaaaatattgctgacctccgacaaaatttagaagaaacgatgtcgtccctgagaggcactcagatttctcattcaacattagagaccacattcgattctactgtgacaaccgaagttaatggtaggaccatcccaaatctgacctctaggccaactccaatgacgtggagactgggacaagcgtgccctaggctgcaggccggagatgccccgtcgctgggggccggatacccccggagtggcacctctcggttcattcatactgatcccagccggtttatgtacaccacacccctgcggcgggctgccgtgtccaggcttggcaatatgagccagatcgatatgtcggaaaaggcatcctccgatcttgatatgagttctgaagtagacgtgggtgggtacatgtcagacggcgacatcttggggaaaagtttgaggacagacgacattaattctgggtatatgacagatggcggactcaatctctatacccggtccctgaatcggattccagatactgccacttcacgggatattattcaacgcggggtacacgatgtcaccgttgacgccgatagctgggacgacagttccagcgtttcgagcgggttaagcgacactctcgataatatttctactgatgaccttaacacaacctcttcagtgagctcatatagcaacattacagtcccctcaaggaagaatacccagctgaggaccgatagtgaaaagcgctccaccacagacgagacatgggactcgcctgaggagctcaagaagcccgaagaggactttgatagtcacggcgacgcaggcgggaagtggaagacagtcagctctggtctgccggaggatcctgaaaaggccggccagaaagccagcctgtctgtctctcaaacaggctcttggcgccgcggaatgtctgctcagggaggcgcgccaagtcgccagaaagctggtacgtctgccctcaagactcctggtaaaaccgacgatgctaaggcaagtgaaaaggggaaagccccactgaaggggagctccttacaaaggagtcctagtgacgccgggaaatcatcgggggatgaggggaagaagcctccctccggcatcgggaggtcaacagccactagcagtttcgggtttaagaaacctagcggtgttgggagttccgcaatgatcacatcaagcggtgccacaattacttctggatcggccacactcgggaagatccctaaaagcgccgcaattgggggcaagagcaatgccggccgcaaaacatcgcttgacggaagccaaaaccaagacgacgtggtattgcacgtgtcaagtaagacaaccttgcagtaccgttccctccctcggccaagtaagtcaagcacgagtggaatcccaggacgaggtggtcaccgctcgtctacttcgagcattgatagcaacgtatcatccaagtcagccggagcaactacaagcaagctccgcgagcccactaagatcggcagtggaaggagttcccctgtgaccgttaaccagaccgataaggagaaggagaaagttgcagtgtccgactctgagagcgttagtctcagcggctcgcccaagtccagtccaactagcgctagcgcatgcggtgcccagggcctgcgccagccaggatcgaaatatccagacattgcaagccctactttccggcgtttgttcggggcaaaagcggggggcaaaagcgcaagtgccccaaatacagagggcgttaagtcctcctcagtgatgccgtcgccatccaccacacttgcccgccaaggctcccttgagagtccctcctctggaacaggaagcatgggcagcgctggtggactttctggaagctcaagcccgctgtttaataaaccatccgacctcacgactgatgttatctctctgagccactcgttagctagcagccctgccagcgttcacagcttcacaagtgggggattggtgtgggccgccaacatgtcctcttctagtgccgggtctaaggacacgccctcgtaccagtctatgacatccctccatacctcatccgaatccatcgacctgccactcagccatcacggctccctgtctggtctcactactggtacacatgaagtgcagtctctgttaatgcgcactggctcagtacggagtaccctttccgagtccatgcagctggatcgaaacaccctgcctaaaaaagggctaaggtacactcctagttcaagacaggcgaatcaggaagaggggaaggaatggctgcggtcacactctacagggggcctgcaagatactgggaatcaatcccctttagtgagcccatccgccatgtcctcctccgccgccggaaagtatcacttcagcaacctagttagtcccacgaacctcagccagtttaacctcccaggccccagtatgatgagatctaatagcatacccgctcaagattctagctttgatctttacgacgattcccagctgtgcggctccgcaactagcctggaggagaggccccgcgccatcagtcactcgggttcgtttcgagacagtatggaggaagtccatggttcttcgttgagtcttgtgtcgagcacctctagcctgtacagtacagcagaggaaaaagcccattcggagcagatccacaagctgaggcgcgagctggtagcctcccaggagaaagtggcgactctgactagccagctgtcggccaatgcccatctggtagccgcctttgaaaagtccctgggcaatatgaccggcagactgcagtctttgacgatgactgctgagcagaaagagtcagagctgatagagctaagagagacaattgagatgcttaaggcccagaattctgctgctcaggcggccattcagggcgcactcaacggtccagaccatccccccaaagacctgcgcataaggcgccaacactcatctgaaagtgtctctagcataaactcagccacttctcattccagtattggctcaggtaacgatgctgattccaagaaaaaaaaaaaaaaaaattgggtgaacagtcgggggtccgaactcaggtcatcgtttaagcaagcgttcggcaagaaaaagtccactaaaccacctagctcccatagcgatattgaagagctgacggatagcagtctacctgcttcacccaaacttccccataatgcaggcgattgcggcagtgcaagtatgaagccctcccagtccgcaagtgcctcacctctggtttggcctccaaagaagagacagaatggacctgtgatctacaaacacagatcacggatctgtgaatgtaccgaagctgaggctgaaatcatcctccagctcaaatcagaattgcgggagaaggagcttaaactgactgacatccggctggaggcgctgtcctctgcccaccacctggatcagatacgcgaggcgatgaatcggatgcagaatgagattgagatactgaaagccgagaatgaccgcctcaaggccgagacaggaaatactgcaaagcctacaagacccccatccgaatccagctcttccacgagctcgagcagttcacgccaaagcttgggcctctcacttaataatttaaatatcacagaggccgtttcaagtgatattcttcttgatgacgccggtgatgctaccgggcacaaagatggtcgatccgtcaaaataatcgtgtctatcagcaaggggtatggcagagccaaagatcagaagtcgcaggcgtacttaattgggagcattggtgtgagcgggaaaacaaagtgggatgtgttggacggggttatccgacggttgttcaaggagtatgtctttcggatagatacctctacttcactaggcctgtcgagtgattgtatcgctagctattgtattggcgatctaatacgttcccacaacctggaggtgcctgaactgctgccctgcgggtacttggtcggggataacaacattatcacggtaaaccttaaaggcgtcgaggagaactcgttggattcattcgtgttcgatactcttatccccaagcctatcacacaacgatacttcaacttattgatggaacaccatcgaattattctgtccggccccagtggtactggcaagacctacctcgccaataagctggccgaatacgtgattactaagagcggtcgcaaaaagactgaggatgctattgcaactttcaatgttgaccataaatcctctaaggaactgcagcagtaccttgccaacctggctgagcagtgctccgccgacaataacggggtggaacttcctgtcgtcattattttagacaacttgcatcacgtggggtcactgtctgatattttcaacggcttcctgaactgtaagtacaacaagtgcccctatatcattggtaccatgaaccagggcgtctcatcatctcctaacctggagttacatcataatttcaggtgggtgctctgcgcaaaccatacggaaccggtcaaagggtttctggggcgctacctgcggaggaaactaatcgagattgaaatcgagcggaatatcaggaataacgacctcgtgaaaatcatcgactggatcccaaaaacttggcaccacctgaactctttcttagagacacactcttctagcgacgtcacaataggaccgcggttatttcttccctgtcctatggatgtagagggatcaagggtctggttcatggacctgtggaattactccctcgttccttatatcctggaggccgtgcgggagggactgcagatgtacggaaagagaacaccttgggaggatccctccaagtgggtgttggacacttatccttggagctctgctactctgccccaagaaagtccagccctcttgcagctgcgccccgaggacgtgggatacgaatcatgtacaagcactaaggaggccaccacatctaaacacatcccccagacggacactgaaggtgacccccttatgaatatgttgatgaaattgcaagaggctgcaaactattcttcaacacagtcatgcgactcagagtctacgtcccaccatgaggacattctggacagcagccttgagtcaactctttag

SEQ ID NO: 27794 - DNA, 9821 bp, Artificial Sequence
  derived and/or modified sequence
agatgcagggaagttttgcctcttcctgaaaattatattattagctttttaaaaatcaggatgactgctagttttgtttaaagtatttgttctggaaatactaaagttggagtctaccagactgaggttagaagcattttctttggcagcaagaagataattttatagaagccatgcctgttcttggggttgcctcaaaactgaggcagccagctgttgggtcaaagcctgtgcatactgctcttccgataccaaatcttggcactactgggtcacagcactgttcttcaagacctttggaacttactgaaacagagagctccatgctttcttgtcagcttgcgttaaaatcaacctgtgaatttggagagaagaaacccctccaaggaaaagccaaggagaaagaagacagcaagatttacactgactgggccaaccactacctagcaaaatcaggccacaagcggctgatcaaggacttgcaacaagacattgcagatggagtactcctagcagaaatcatccagattattgcaaatgaaaaagttgaagatatcaatggatgtcctagaagtcagtctcagatgattgaaaatgttgatgtctgccttagttttctagcagccagaggggtaaatgttcaaggtctatctgctgaagaaataagaaatggaaacttaaaagccattctagggctgtttttcagtttatctcgctacaagcagcaacaacaccatcaacaacagtactatcagtccttggtggaacttcagcagcgagttactcacgcttcccctccatcggaagccagccaggccaaaacccagcaagatatgcagtccagtctggcagccagatatgcaactcagtctaatcacagtggaattgcaaccagtcaaaaaaagcctactaggcttccagggccctctagggtgcctgctgcaggaagcagcagcaaggtccagggagcctctaatttaaataggagaagtcagagctttaacagcattgacaaaaacaagcctccaaattatgcaaatggaaacgaaaaagattcctccaaaggacctcaatcgtcttcaggtgtaaatggtaacgtgcagcctcccagtactgctgggcagcctcctgcctctgccatcccttctccaagtgccagcaagccctggcgcagcaagtccatgaatgtcaaacacagtgccacctccaccatgttgactgtaaagcagtcaagtacagccacctcccccacaccatcttcagacagactgaagccacctgtctcagaaggggtcaaaactgctccctcaggacagaaatccatgcttgagaaattcaagctagtcaatgcccggactgctttacgccccccgcagcctcccagttcaggacctagtgatggtgggaaggatgatgatgccttttctgaatctggtgaaatggaaggttttaacagtggtctgaatagtggtggctcaacaaatagcagtcccaaagtgtcacctaagttggcccctccaaaagctggaagcaaaaatctcagcaataaaaagtctttgctacagccaaaggaaaaagaagaaaagaacagggacaaaaataaagtttgcactgaaaaaccagtcaaagaagagaaggatcaggtgacagagatggctccaaaaaagacctccaaaattgcaagcttgatccctaagggcagcaagacaacagcagctaagaaggaaagcttaattccgtcttccagtggtattccaaaaccaggctctaaagttccaacagtaaagcaaaccatttcacctggcagcacagcaagcaaagagtctgagaaattcaggactaccaaggggagcccttcccagtccttatctaagcctataaccatggagaaagcaagtgcttctagttgtcctgcccctttggaaggaagggaagctggccaagcttctccttctggttcctgtaccatgacagtggcacaaagcagtgggcagagcacaggaaatggtgctgtccaactccctcaacagcagcaacatagccacccgaataccgcgacagtggcaccattcatttacagggcacattcagaaaatgaaggtaccgctttaccatcggctgactcctgtaccagtcctacaaagatggacttatcatatagtaagactgctaagcagtgcctggaggagatatctggtgaagaccctgaaacaagaagaatgagaacagttaaaaacatagcagacttgaggcagaatttagaagagactatgtccagtcttcgtgggactcagataagccacagcaccctggagacaacatttgacagcactgtgacaacagaagttaatggaaggaccatacccaacttgacaagtcgacccacccccatgacctggaggttgggccaggcatgtccgcgacttcaggcgggagatgctccctccctgggtgctggctatcctcgcagtggtaccagtcgattcatccacacagacccctcgaggttcatgtataccacgcctctccgtcgagctgctgtctctaggctgggaaacatgtcacagattgacatgagtgagaaagcaagcagtgacctggacatgtcttctgaggtcgatgtgggtggatatatgagtgatggtgatatccttgggaaaagtctcaggactgatgacatcaacagtgggtacatgacagatggaggacttaacctatatactagaagtctgaaccgaataccagacacagcaacttcccgggacatcatccagagaggggttcacgatgtgacagtggatgcagacagctgggatgacagcagttcagtgagcagtggtctcagtgacacccttgataacatcagcactgatgacctgaacaccacatcctctgtcagctcttactccaacatcaccgtcccctctaggaagaatactcagctgaggacagattcagagaaacgctccaccacagacgagacctgggatagtcctgaggaactgaaaaaaccagaagaagattttgacagccatggggatgctggtggcaagtggaagactgtgtcctctggacttcctgaagaccccgagaaggcagggcagaaagcttccctgtctgtttcacagacaggttcctggagaagaggcatgtctgcccaaggaggggcgccatctaggcagaaagctggaacaagtgcactcaaaacacccgggaaaaccgatgatgccaaagcttctgagaaaggaaaagctcccctaaaaggatcatctctacaaagatctccttcagatgcaggaaaaagcagtggagatgaagggaaaaagcccccctcaggcattggaagatcgactgccaccagctcctttggctttaagaaaccaagtggagtagggtcatctgccatgatcaccagcagtggagcaaccataacaagtggctctgcaacactgggtaaaattccaaaatctgctgccattggcgggaagtcaaatgcagggagaaaaaccagtttggacggttcacagaatcaggatgatgttgtgctgcatgttagctcaaagactaccctacaatatcgcagcttgccccgcccttcaaaatccagcaccagtggcattcctggccgaggaggccacagatccagtaccagcagtattgattccaacgtcagcagcaagtctgctggggccaccacctcgaaactgagagaaccaactaaaattgggtcagggcgctcgagtcctgtcaccgtcaaccaaacagacaaggaaaaggaaaaagtagcagtctcagattcagaaagtgtttctttgtcaggttcccccaaatccagccccacctctgccagcgcctgtggtgcacaaggtctcaggcagccaggatccaagtatccagatattgcctcacccacatttcgaaggttgtttggtgccaaggcaggtggcaaatctgcctctgcacctaatactgagggtgtgaaatcttcctcagtaatgcccagccctagtaccacattagcgcggcaaggcagtctggagtcaccgtcgtccggtacgggcagcatgggcagtgctggtgggctaagcggcagcagcagccctctcttcaataaaccctcagacttaactacagatgttataagcttaagtcactcgttggcctccagcccagcatcggttcactctttcacatcaggtggtctcgtgtgggctgccaatatgagcagttcctctgcaggcagcaaggatactccgagctaccagtccatgactagcctccacacgagctctgagtccattgacctccccctcagccatcatggctccttgtctggactgaccacaggcactcacgaggtccagagcctgctcatgagaacgggtagtgtgagatctactctctcagaaagcatgcagcttgacagaaatacactacccaaaaagggactaagatataccccatcatctcggcaggccaaccaagaagagggcaaagagtggttgcgttctcattctactggagggcttcaggacactggcaaccagtcacctctggtttccccttctgccatgtcatcttctgcagctggaaaataccacttttctaacttggtgagcccaacaaatttgtctcagtttaaccttcccgggcccagcatgatgcgctcaaacagcatcccagcccaagactcttccttcgatctctatgatgactcccagctttgtgggagtgccacttctctggaggaaagacctcgtgccatcagtcattcgggctcattcagagacagcatggaagaagttcatggctcttcattatcactggtgtccagcacttcttctctttactctacagctgaagaaaaggctcattcagagcaaatccataaactgcggagagagctggttgcatcacaagaaaaagttgctaccctcacatctcagctttcagcaaatgctcaccttgtagcagcttttgaaaagagcttagggaatatgactggccgattgcaaagtctaactatgacagcggaacaaaaggaatctgaacttatagaactaagagaaaccattgaaatgctgaaggctcagaattctgctgcccaggcggctattcagggagcactgaatggtccagaccatcctcccaaagatcttcgcatcagaagacagcattcctctgaaagtgtttctagtatcaacagtgccacaagccattccagtattggcagtggtaatgatgccgactccaagaagaagaaaaagaaaaactgggtgaactctagaggaagtgagctgagaagttctttcaaacaagcctttgggaagaaaaagtccaccaagcctccttcatcacattctgacattgaagagcttactgattcatcccttccggcatcccccaagttaccccataatgctggtgactgtggctcagcatccatgaagccctcacaatctgcttcagcgtcaccccttgtctggccaccaaagaaacgacaaaatggccctgtgatctacaagcatagatctcggatctgtgaatgcacagaagctgaggcagagataattctgcagctgaagagcgagctcagagaaaaggaattaaaattaacggatattcggctggaggccctcagctctgctcatcatcttgatcagatccgggaagccatgaaccggatgcagaatgaaattgaaatactgaaagctgaaaatgaccggttgaaggcagaaactggtaacacagctaagcctactcggccaccgtcagaatcctcaagcagcacctcctcttcatcttccaggcagtcattaggactttctctaaacaatttgaacatcacagaggctgttagctcagatattttgctagatgatgctggtgatgcaactggacataaagatggccgcagtgtgaaaattatagtctccataagcaagggctatggtcgagcaaaggaccaaaaatctcaggcatatttgataggatccattggtgttagtggaaaaaccaagtgggatgtcttagatggtgtaataagacgtctctttaaggaatatgtattccgaattgatacatccactagccttggtctgagctctgactgcattgctagctactgtataggagacttaattagatcccataacctagaagtgcctgaattgctgccttgtggataccttgttggagataataacatcatcactgtgaacctcaaaggggtagaagaaaatagtttggacagttttgtttttgatacgctgattcctaaaccaattacccaaaggtactttaacttgttgatggagcatcacagaattatactctcaggaccgagtggtactggaaagacctatttggcaaacaaacttgctgaatatgtaataaccaaatctggaaggaaaaaaacagaggatgcaattgccacttttaatgtggaccacaagtcaagtaaggaattgcaacaatatctagctaacctggctgaacagtgcagtgctgataataatggagtggagctcccagttgtaataattcttgataatcttcatcatgtgggctctctgagtgatatcttcaatggttttctcaattgtaaatacaacaaatgtccatatattattggaacaatgaatcagggagtttcttcatcaccaaatctagagctgcatcacaatttcaggtgggtattatgtgcaaatcatacagaaccagtgaaaggctttttaggcagatatcttcgaagaaaactcatagagatagaaattgaaaggaacattcgcaataatgacctagtcaaaattatagattggattccgaagacgtggcatcatctcaacagttttttggaaacacacagttcttctgacgttaccattggtccccgactattccttccttgccccatggatgtagaaggttctagagtatggttcatggatctctggaactattctttagtaccttatattctggaggcagtgagagagggtcttcagatgtatgggaaacgcacaccatgggaagatccttcaaagtgggtgcttgacacatatccatggagctcagcaactctgcctcaggagagcccagccttacttcagctgcgaccagaagatgttgggtatgaaagctgcacatccactaaggaagccacaacctcaaagcacattccgcaaactgacacagaaggagatcccctgatgaatatgctaatgaaactccaagaagcagccaattactcgagcacacaaagctgcgacagcgaaagcaccagccaccatgaagacattttggattcatctcttgaatctaccctctagagggtgaaaaaagttaagggaaaagactttgcttttaaaaaaatgtttcaaaagaaaggtattttcactaaaccactgccagtataaaagcaccctgtcaagggccctgacccagagttgtggtctccaaggaggcagcagaactaagtctgaaccgccaagatgctaaattgcaatggaagcttaactttagtttatttctaagcattttttatatctgtggagtaatagaaagctccattactcaactggaaaggaccctaatgacagggcaactgaacagattgcacatgggatagccaaactggactttctttgtttcctctttaaaagtttacaatgcagaccattttttgtcccttccttttgtttcctctgaggggctgttcgccccaggcagggtccatctttctgatctgtccaacctcctttgtgccacacggtgctggtcacagggcttcagtagtgtttgtgttgtgcgctcaccccattccagaacaaatccaagaggccagtcctccataagcacaaatggaattgtgcaaccaccagaaaaacactactgtggcaaactggagaagtgccaatttaattctaactgccacgttctcatgatgtgctccaccaactttttagtatatgagtcactggttttataaggttgtttttaccacagtggtctttttaaaccacctgcccactcccttaacaagagttttataccaattattagtcaacactgataaaaggcttttttagggctttatttgtttgagccttttcagtgaaagaaggaacatttcctatggtgctgtctcactgccttaaaacagatttctatgacagtttaacagttggtttaaatcctaaaccattggtaatttccactgtcttttcatttacaaccaagcaacaccagttaacatagtagcctcatctctatatatctttctcttttttttttttttgaagaaatggataggagaaagatcagtatttttagccttgtgaatagatcgctttgcctatcctccaaaatattaaaataacccagaaatgctctttgaccgtcacttaaaacctaagacatgtggcgaaattccatccagttctaagtgaaagagtttcagaaggcagaagattttgaattattatccagcagggctggaagcactagatgcagcatgagcacaactattcggctttccttccctattgtttttgtttttttaatgagttttgacgcatgttgttttgattgctattgttgtacatgagaaattcagcattaaagaacactgaagcggtaaggtcactgtggaagaggaagcgtttatactgtaaaagaaggttagatttgcacagtctactgggtaggtattgtaaataataatttttaaaacttgcacaaatcaaaacaaacacaaacaaaattgtattttatcctgttggtgttaagaggtgtttcacttgctgagatttcctgtacattgcaaacaaatacagaatgcaaaccctcaaagctgtattatctggtgtgtttgtcctgtatttacagttgtttttgactatgcaggagctatcagtgctagagtgagcatgcttcaaaactgtacatgaagccaatatatttttggataagtaaaactgtctgaaagtacatctgtcatggcaggctttaaagagagtgcatgaaaactgatcagtcattggagaagttaccaccacacacaaaggacaggttttaagtttatgaaacccaagggctaggccatggtatagacttcttctatgagtgtgtgaaaatgtgttacttttaggacgtgtatttggtgctactctctgtgaccaccaatgggtcagttgctatagaacaacaacaccacgaaacatctgtgcagttttcagagtgtcacaaagtcaataggtccttacacggtgctattgccctaagggaaatccgaactgaatttatgcacatagaattgtcaccctgactttgaagcctcaaacatggatcaaatctgttgtgaaacatcaatatatgtagctggatgagtgactagtttcccttgtataatatgtgatctaagaaaattgctaatctttccctgccattttgagaaacacagtccaaacatgagcataaacagaatttcctgcaatacatcccagtaggtccacctagtttacaacttaaactagtttgtgaaacatttgtctgtatacattttatattttgtacattttgatgtaacatatcatgtaaataggcagaaacagtgaaataaatcatctgaaaagttttgtagtctttgtaaagccccaacaataagtacttggtgtcaatggacttaactggatgatgtattttctattggtttattgttcctctagcttgtaaaccagcttgcatatatttttttgcaaatgtgcaccctgtatctgtctaaattattactttgccattaaagtggaattatttattga

SEQ ID NO: 27795 - DNA, 7158 bp, Artificial Sequence
  derived and/or modified sequence
atgcccgtgctgggggtggccagtaagctcaggcagccagcagtggggtccaaacccgtgcacactgccctgccaattcccaatttgggaacaacaggttctcagcactgttccagtcgccctctggagctgaccgaaacagagagttcaatgctttcatgtcagctggcattaaagtccacctgtgaattcggagagaaaaaacctctgcagggcaaagctaaggaaaaggaggactctaaaatttacaccgactgggcaaatcactatctggcaaaatcaggacataagaggctgattaaagacctgcagcaggacatcgccgatggggtgctcctggccgaaatcatacagattatcgcgaacgaaaaggtggaggatatcaacgggtgccctcggtcccagtcgcaaatgatagaaaatgttgacgtgtgcttatcctttctcgccgcaaggggagtgaacgtgcaggggctatctgctgaagaaattcgaaacgggaatctgaaggctattcttggactgtttttcagcctatcccgctacaagcagcagcaacaccaccagcagcagtactatcagagcctggtagagctgcaacagagagttacacatgccagcccaccatcggaagctagccaggcaaagacgcagcaggatatgcaatcttctctcgccgcacgctatgccacgcaaagcaaccattccggtattgctactagccagaaaaagcctaccaggctgcccggtcctagcagagtacccgctgcgggatcctcgagcaaggtacaaggggcatccaatctcaatcgccgatcacagagcttcaattccatcgataaaaataagcctcccaactacgcaaacggtaacgagaaagacagcagcaaagggccacagtctagctcaggcgttaacgggaatgtgcagcccccaagcaccgctggacagcctcctgcctcagcaattccatcaccctcagcatccaaaccatggcgcagcaaatctatgaacgtcaaacactcagccacatcaaccatgctgacagttaaacaaagctccacagcgacttccccgactccctcttcagatcgattgaaacctcctgtgtccgaaggagtaaagacagctcccagcggacagaagtcaatgctggagaaattcaagctggtgaacgccagaactgccctcagaccccctcagcccccaagctctggtccttctgacgggggtaaagatgatgacgcattcagcgaatccggcgaaatggagggatttaacagcggcttgaactccggcggatccaccaactcttccccaaaagtgtctccaaaactagcaccaccgaaggcagggtccaagaacctgagtaacaagaaaagcctcctccagccgaaggaaaaggaggaaaagaacagagacaagaataaggtatgtacagaaaaacctgttaaagaagagaaagaccaagttacagagatggcccctaaaaaaactagtaagatcgcctctttgatccctaagggttccaaaaccacagcggctaagaaggagtcgctgatacccagcagctccggcattcctaagcctgggtcaaaagtgccaacagtgaagcagactattagcccgggttcaacagcatcgaaagagtccgagaagttccgtaccacgaaggggagtcctagccagtccctgagcaagcccattaccatggagaaggcgagtgcgtcctcttgtcccgctcctctggagggtcgtgaggccggtcaggcgtcacccagcggaagctgcacgatgactgtcgcacaatccagtggtcagagcaccggcaacggcgctgtccagcttcctcagcagcagcaacattcccaccccaacaccgccaccgtggctccttttatctatagagcccattctgaaaatgaaggaacggccctgcctagcgcagacagctgtacctcccccacaaaaatggacctgtcctacagtaagaccgccaaacagtgcttggaggagatctcgggggaagatcctgaaacgcgaagaatgcggaccgttaaaaacatcgctgacctacggcagaacctggaggaaaccatgagtagcctccgagggacacaaatcagccactccaccttggaaactaccttcgactccacagtaacaactgaggtcaacgggcgaactatccctaacttaacttcccggcctactccgatgacgtggagactaggccaggcatgcccacgactacaggcaggagacgcgccaagccttggggctggatacccacgctcgggcacgagccgttttattcacaccgacccatcgcgatttatgtatacaacacctcttcgtcgtgctgctgtgtcacgcctcgggaacatgtcccagatcgacatgtcggagaaagcgtcctctgatctggatatgagctcagaagttgacgtgggtgggtacatgtctgacggcgacatcctggggaagtccctgagaaccgatgacatcaacagtgggtacatgacagatggtggactgaacttatatactagatcccttaaccgcattcccgacaccgcaacatccagggatatcatccagcgcggagtgcatgacgtgaccgtcgatgcggattcctgggacgactctagcagtgtgtcttcagggttgagtgataccctcgacaacatttccaccgacgaccttaatactacatcttcagtttcttcttactctaatatcactgtgccatcgaggaaaaatactcagttacggaccgattccgagaaacggagcactaccgacgaaacctgggattcacctgaggagctaaaaaagcctgaggaggacttcgactcacatggagacgcagggggaaaatggaaaaccgtctctagcgggcttcccgaggacccggagaaggctggccagaaggcctcactgagtgtgtcacaaacaggctcctggcgacgtggcatgtctgctcaggggggagcgcctagtcggcaaaaagcaggaaccagcgctctaaagactccaggtaaaacagatgatgccaaggcttccgaaaaggggaaggcccctttaaaaggcagcagtctccagcgaagcccatcagatgccggaaaatcctcaggagatgaaggcaagaaaccaccaagcgggattgggagatcaactgccacctccagttttggatttaaaaagccctctggcgtcggctccagcgcaatgattactagcagtggcgctacgattacttccggaagcgcgacactaggtaaaattcccaagagtgcggctatcggcggtaagtctaacgccggtcgaaaaactagcctggatggatcccagaatcaagacgatgtggtactccatgtgtctagtaaaacaactctgcagtaccgtagcctgcctcgacctagtaagtctagtacctctggcattcctgggaggggaggacatcgctcatccacaagttctattgatagcaatgtctctagcaagtccgccggagctaccactagtaagctgagagagccgactaaaatcggaagtggcaggagctcaccggtcaccgtgaatcagacagataaggaaaaggagaaggtcgcagtgtcagactccgaaagcgtgagcctgtcaggaagcccgaaaagcagtcctacatccgctagcgcctgtggagcccaggggttgcgccagcccggttctaaatatccagatatcgcctcaccgacattccgaaggctgttcggggcaaaagcagggggtaagagcgctagtgcacctaacacagagggcgtgaagtcaagtagcgttatgccatccccctccaccacgctggctaggcagggtagtctagaaagcccaagcagcggcaccggatcgatgggatctgcgggtggactgtccgggtcgtcctcacctctgtttaataagccctccgaccttaccacagatgttatttcgctcagtcactcactggcaagttcccctgcatccgtccattcctttacctcaggcggtctagtctgggcagcaaacatgtctagttccagcgctgggagtaaagacaccccgtcttatcagtcaatgaccagtttgcatacctccagcgagtcaattgatcttccactcagtcaccacggatccctgtcaggactcacaaccggaacgcacgaggtgcaatcactgcttatgagaactggttccgtcaggtccacattaagcgagagtatgcagttggatcggaatacattgccaaagaagggcctgaggtacactccgtcaagtcgccaggcgaaccaggaagaagggaaggagtggctgaggtctcattctaccggcggactgcaggacacaggaaatcagtcccccctggtgagcccatctgcaatgtcctctagcgccgctgggaagtaccacttcagtaaccttgtgtctcctacaaacctgagtcagtttaatctccctggccctagtatgatgcgctccaactccatccctgcgcaggactccagcttcgatttgtatgacgacagccaactgtgtgggagcgccacttcattggaggagaggcccagagccatctcacactctgggagcttccgagacagcatggaggaagtccatggcagctccttatccctggtcagcagcactagctctttgtactccaccgcagaagagaaggcacactccgagcagatccacaagctacgccgtgagctggtagcctcccaggaaaaagtcgctaccctgacatcccagctttctgctaacgcacaccttgtggccgcttttgaaaagtctctgggcaatatgacgggaagactacaatctcttactatgaccgccgaacaaaaggagtcggaactgattgagcttagggagactattgaaatgctcaaggcccagaatagtgccgcacaggccgctatccagggggcactgaatggtcctgaccaccccccaaaggacctgaggatacgtagacaacactcctctgaatctgtgtcatctattaactcagctacatcccattcatctattggttccgggaacgacgccgactcaaagaaaaaaaagaagaagaattgggttaacagtaggggctctgaactgcgatcttcctttaagcaggcctttgggaaaaagaaatctaccaaacccccttcttcccattctgacatagaagagctcaccgacagctctctccccgcttctcccaagctcccccataacgcgggtgattgtggtagcgcttcaatgaaaccaagtcaatcagcgagtgccagccccctggtgtggccccctaaaaaacgtcagaatggtcccgtcatctacaaacaccgcagcaggatttgtgagtgcaccgaggcggaagctgaaattatactacagctcaaatccgagctccgagaaaaggaactcaaactgacagacattcgtttggaggcactgtcttctgcacaccatctggatcagattcgggaagcgatgaatcggatgcagaacgagatagaaatcttgaaggccgaaaacgacagactcaaggcggagaccggtaacacagcgaagcccactcgcccaccatcagagtcaagttctagcacctcctccagcagcagtaggcagagccttggcttgagtttgaataacttgaacataacagaagctgtctcaagcgacatcctcctggacgatgcaggggatgccactggccataaggacggtagaagtgtgaaaataatcgtctcaatctcaaaaggttacggtcgggcaaaagatcagaaaagtcaggcatatctcataggatcaatcggcgtctccggaaaaaccaagtgggacgtactggacggggttataaggagattgtttaaagagtacgtctttaggattgataccagcacctccctcggattaagctccgattgtattgcttcatattgcataggcgacctgataaggtctcataacctcgaagtgccggagctgctgccatgcggttacctggtcggcgacaacaatattattacagtaaaccttaagggggtggaggaaaatagcctggattccttcgtcttcgacactcttatccccaagccgatcacacagagatactttaatctgctaatggagcaccaccgcattatcctgtcaggccctagcggtacaggaaaaacctaccttgccaacaaactagctgagtacgtgataacaaaatccggacggaaaaagacagaagacgcaattgcaacttttaatgttgatcataagtctagcaaagagctccagcagtaccttgcaaatctagctgagcagtgtagcgctgataataatggagtggaactgccagtggtgatcatcttggataacctgcaccacgttggcagtttgtctgatatcttcaatgggtttctgaactgcaaatataacaagtgcccctatatcatcggtacgatgaatcaaggtgtctctagcagtcctaacttagagctccaccacaatttccgctgggtactgtgtgcaaaccataccgagccagtgaagggctttttgggccgttacttgcgcaggaagttaatagagatcgagatcgaacggaatatccgcaataatgatttagttaaaattattgactggatccctaaaacatggcaccatctgaactcctttcttgaaacgcatagctcttcagatgtcacgattggtcctcggctcttcctgccctgcccaatggatgtggagggcagtagggtgtggtttatggacttgtggaattatagtttagtgccgtacatccttgaggctgtgagggagggtctacagatgtacggtaagagaaccccttgggaagacccgtcaaaatgggtcctggacacttacccgtggtcatcagcaacactccctcaggaatctccagccttactgcagctaaggccggaggatgtgggatatgaaagttgtacttccactaaagaggctaccactagtaagcacataccccagaccgatacagagggggatccgttgatgaacatgttgatgaagctccaggaagcggctaattattccagcacccagagctgcgatagcgaatcaacttcgcatcacgaggacatactagattctagtctcgagtccaccttgtag

SEQ ID NO: 27796 - DNA, 7158 bp, Artificial Sequence
  derived and/or modified sequence
atgcccgtgctgggcgtggccagcaagctgagacagcccgccgtgggcagcaagcccgtgcacaccgccctgcccatccccaacctgggcaccaccggcagccagcactgcagcagcagacccctggagctgaccgagaccgagagcagcatgctgagctgccagctggccctgaagagcacctgcgagttcggcgagaagaagcccctgcagggcaaggccaaggagaaggaggacagcaagatctacaccgactgggccaaccactacctggccaagagcggccacaagagactgatcaaggacctgcagcaggacatcgccgacggcgtgctgctggccgagatcatccagatcatcgccaacgagaaggtggaggacatcaacggctgccccagaagccagagccagatgatcgagaacgtggacgtgtgcctgagcttcctggccgccagaggcgtgaacgtgcagggcctgagcgccgaggagatcagaaacggcaacctgaaggccatcctgggcctgttcttcagcctgagcagatacaagcagcagcagcaccaccagcagcagtactaccagagcctggtggagctgcagcagagagtgacccacgccagcccccccagcgaggccagccaggccaagacccagcaggacatgcagagcagcctggccgccagatacgccacccagagcaaccacagcggcatcgccaccagccagaagaagcccaccagactgcccggccccagcagagtgcccgccgccggcagcagcagcaaggtgcagggcgccagcaacctgaacagaagaagccagagcttcaacagcatcgacaagaacaagccccccaactacgccaacggcaacgagaaggacagcagcaagggcccccagagcagcagcggcgtgaacggcaacgtgcagccccccagcaccgccggccagccccccgccagcgccatccccagccccagcgccagcaagccctggagaagcaagagcatgaacgtgaagcacagcgccaccagcaccatgctgaccgtgaagcagagcagcaccgccaccagccccacccccagcagcgacagactgaagccccccgtgagcgagggcgtgaagaccgcccccagcggccagaagagcatgctggagaagttcaagctggtgaacgccagaaccgccctgagacccccccagccccccagcagcggccccagcgacggcggcaaggacgacgacgccttcagcgagagcggcgagatggagggcttcaacagcggcctgaacagcggcggcagcaccaacagcagccccaaggtgagccccaagctggccccccccaaggccggcagcaagaacctgagcaacaagaagagcctgctgcagcccaaggagaaggaggagaagaacagagacaagaacaaggtgtgcaccgagaagcccgtgaaggaggagaaggaccaggtgaccgagatggcccccaagaagaccagcaagatcgccagcctgatccccaagggcagcaagaccaccgccgccaagaaggagagcctgatccccagcagcagcggcatccccaagcccggcagcaaggtgcccaccgtgaagcagaccatcagccccggcagcaccgccagcaaggagagcgagaagttcagaaccaccaagggcagccccagccagagcctgagcaagcccatcaccatggagaaggccagcgccagcagctgccccgcccccctggagggcagagaggccggccaggccagccccagcggcagctgcaccatgaccgtggcccagagcagcggccagagcaccggcaacggcgccgtgcagctgccccagcagcagcagcacagccaccccaacaccgccaccgtggcccccttcatctacagagcccacagcgagaacgagggcaccgccctgcccagcgccgacagctgcaccagccccaccaagatggacctgagctacagcaagaccgccaagcagtgcctggaggagatcagcggcgaggaccccgagaccagaagaatgagaaccgtgaagaacatcgccgacctgagacagaacctggaggagaccatgagcagcctgagaggcacccagatcagccacagcaccctggagaccaccttcgacagcaccgtgaccaccgaggtgaacggcagaaccatccccaacctgaccagcagacccacccccatgacctggagactgggccaggcctgccccagactgcaggccggcgacgcccccagcctgggcgccggctaccccagaagcggcaccagcagattcatccacaccgaccccagcagattcatgtacaccacccccctgagaagagccgccgtgagcagactgggcaacatgagccagatcgacatgagcgagaaggccagcagcgacctggacatgagcagcgaggtggacgtgggcggctacatgagcgacggcgacatcctgggcaagagcctgagaaccgacgacatcaacagcggctacatgaccgacggcggcctgaacctgtacaccagaagcctgaacagaatccccgacaccgccaccagcagagacatcatccagagaggcgtgcacgacgtgaccgtggacgccgacagctgggacgacagcagcagcgtgagcagcggcctgagcgacaccctggacaacatcagcaccgacgacctgaacaccaccagcagcgtgagcagctacagcaacatcaccgtgcccagcagaaagaacacccagctgagaaccgacagcgagaagagaagcaccaccgacgagacctgggacagccccgaggagctgaagaagcccgaggaggacttcgacagccacggcgacgccggcggcaagtggaagaccgtgagcagcggcctgcccgaggaccccgagaaggccggccagaaggccagcctgagcgtgagccagaccggcagctggagaagaggcatgagcgcccagggcggcgcccccagcagacagaaggccggcaccagcgccctgaagacccccggcaagaccgacgacgccaaggccagcgagaagggcaaggcccccctgaagggcagcagcctgcagagaagccccagcgacgccggcaagagcagcggcgacgagggcaagaagccccccagcggcatcggcagaagcaccgccaccagcagcttcggcttcaagaagcccagcggcgtgggcagcagcgccatgatcaccagcagcggcgccaccatcaccagcggcagcgccaccctgggcaagatccccaagagcgccgccatcggcggcaagagcaacgccggcagaaagaccagcctggacggcagccagaaccaggacgacgtggtgctgcacgtgagcagcaagaccaccctgcagtacagaagcctgcccagacccagcaagagcagcaccagcggcatccccggcagaggcggccacagaagcagcaccagcagcatcgacagcaacgtgagcagcaagagcgccggcgccaccaccagcaagctgagagagcccaccaagatcggcagcggcagaagcagccccgtgaccgtgaaccagaccgacaaggagaaggagaaggtggccgtgagcgacagcgagagcgtgagcctgagcggcagccccaagagcagccccaccagcgccagcgcctgcggcgcccagggcctgagacagcccggcagcaagtaccccgacatcgccagccccaccttcagaagactgttcggcgccaaggccggcggcaagagcgccagcgcccccaacaccgagggcgtgaagagcagcagcgtgatgcccagccccagcaccaccctggccagacagggcagcctggagagccccagcagcggcaccggcagcatgggcagcgccggcggcctgagcggcagcagcagccccctgttcaacaagcccagcgacctgaccaccgacgtgatcagcctgagccacagcctggccagcagccccgccagcgtgcacagcttcaccagcggcggcctggtgtgggccgccaacatgagcagcagcagcgccggcagcaaggacacccccagctaccagagcatgaccagcctgcacaccagcagcgagagcatcgacctgcccctgagccaccacggcagcctgagcggcctgaccaccggcacccacgaggtgcagagcctgctgatgagaaccggcagcgtgagaagcaccctgagcgagagcatgcagctggacagaaacaccctgcccaagaagggcctgagatacacccccagcagcagacaggccaaccaggaggagggcaaggagtggctgagaagccacagcaccggcggcctgcaggacaccggcaaccagagccccctggtgagccccagcgccatgagcagcagcgccgccggcaagtaccacttcagcaacctggtgagccccaccaacctgagccagttcaacctgcccggccccagcatgatgagaagcaacagcatccccgcccaggacagcagcttcgacctgtacgacgacagccagctgtgcggcagcgccaccagcctggaggagagacccagagccatcagccacagcggcagcttcagagacagcatggaggaggtgcacggcagcagcctgagcctggtgagcagcaccagcagcctgtacagcaccgccgaggagaaggcccacagcgagcagatccacaagctgagaagagagctggtggccagccaggagaaggtggccaccctgaccagccagctgagcgccaacgcccacctggtggccgccttcgagaagagcctgggcaacatgaccggcagactgcagagcctgaccatgaccgccgagcagaaggagagcgagctgatcgagctgagagagaccatcgagatgctgaaggcccagaacagcgccgcccaggccgccatccagggcgccctgaacggccccgaccacccccccaaggacctgagaatcagaagacagcacagcagcgagagcgtgagcagcatcaacagcgccaccagccacagcagcatcggcagcggcaacgacgccgacagcaagaagaagaagaagaagaactgggtgaacagcagaggcagcgagctgagaagcagcttcaagcaggccttcggcaagaagaagagcaccaagccccccagcagccacagcgacatcgaggagctgaccgacagcagcctgcccgccagccccaagctgccccacaacgccggcgactgcggcagcgccagcatgaagcccagccagagcgccagcgccagccccctggtgtggccccccaagaagagacagaacggccccgtgatctacaagcacagaagcagaatctgcgagtgcaccgaggccgaggccgagatcatcctgcagctgaagagcgagctgagagagaaggagctgaagctgaccgacatcagactggaggccctgagcagcgcccaccacctggaccagatcagagaggccatgaacagaatgcagaacgagatcgagatcctgaaggccgagaacgacagactgaaggccgagaccggcaacaccgccaagcccaccagaccccccagcgagagcagcagcagcaccagcagcagcagcagcagacagagcctgggcctgagcctgaacaacctgaacatcaccgaggccgtgagcagcgacatcctgctggacgacgccggcgacgccaccggccacaaggacggcagaagcgtgaagatcatcgtgagcatcagcaagggctacggcagagccaaggaccagaagagccaggcctacctgatcggcagcatcggcgtgagcggcaagaccaagtgggacgtgctggacggcgtgatcagaagactgttcaaggagtacgtgttcagaatcgacaccagcaccagcctgggcctgagcagcgactgcatcgccagctactgcatcggcgacctgatcagaagccacaacctggaggtgcccgagctgctgccctgcggctacctggtgggcgacaacaacatcatcaccgtgaacctgaagggcgtggaggagaacagcctggacagcttcgtgttcgacaccctgatccccaagcccatcacccagagatacttcaacctgctgatggagcaccacagaatcatcctgagcggccccagcggcaccggcaagacctacctggccaacaagctggccgagtacgtgatcaccaagagcggcagaaagaagaccgaggacgccatcgccaccttcaacgtggaccacaagagcagcaaggagctgcagcagtacctggccaacctggccgagcagtgcagcgccgacaacaacggcgtggagctgcccgtggtgatcatcctggacaacctgcaccacgtgggcagcctgagcgacatcttcaacggcttcctgaactgcaagtacaacaagtgcccctacatcatcggcaccatgaaccagggcgtgagcagcagccccaacctggagctgcaccacaacttcagatgggtgctgtgcgccaaccacaccgagcccgtgaagggcttcctgggcagatacctgagaagaaagctgatcgagatcgagatcgagagaaacatcagaaacaacgacctggtgaagatcatcgactggatccccaagacctggcaccacctgaacagcttcctggagacccacagcagcagcgacgtgaccatcggccccagactgttcctgccctgccccatggacgtggagggcagcagagtgtggttcatggacctgtggaactacagcctggtgccctacatcctggaggccgtgagagagggcctgcagatgtacggcaagagaaccccctgggaggaccccagcaagtgggtgctggacacctacccctggagcagcgccaccctgccccaggagagccccgccctgctgcagctgagacccgaggacgtgggctacgagagctgcaccagcaccaaggaggccaccaccagcaagcacatcccccagaccgacaccgagggcgaccccctgatgaacatgctgatgaagctgcaggaggccgccaactacagcagcacccagagctgcgacagcgagagcaccagccaccacgaggacatcctggacagcagcctggagagcaccctgtag

SEQ ID NO: 27797 - protein, 222 aa, Artificial Sequence
  derived and/or modified sequence
MLSRAVCGTSRQLAPVLGYLGSRQKHSLPDLPYDYGALEPHINAQIMQLHHSKHHAAYVNNLNVTEEKYQEALAKGDVTAQIALQPALKFNGGGHINHSIFWTNLSPNGGGEPKGELLEAIKRDFGSFDKFKEKLTAASVGVQGSGWGWLGFNKERGHLQIAACPNQDPLQGTTGLIPLLGIDVWEHAYYLQYKNVRPDYLKAIWNVINWENVTERYMACKK

SEQ ID NO: 27798 - protein, 176 aa, Artificial Sequence
  derived and/or modified sequence
MQLHHSKHHAAYVNNLNVTEEKYQEALAKGDVTAQIALQPALKFNGGGHINHSIFWTNLSPNGGGEPKGELLEAIKRDFGSFDKFKEKLTAASVGVQGSGWGWLGFNKERGHLQIAACPNQDPLQGTTGLIPLLGIDVWEHAYYLQYKNVRPDYLKAIWNVINWENVTERYMACKK

SEQ ID NO: 27799 - DNA, 669 bp, Artificial Sequence
  derived and/or modified sequence
atgctgagcagagccgtgtgcggcaccagcagacagctggcccccgtgctgggctacctgggcagcagacagaagcacagcctgcccgacctgccctacgactacggcgccctggagccccacatcaacgcccagatcatgcagctgcaccacagcaagcaccacgccgcctacgtgaacaacctgaacgtgaccgaggagaagtaccaggaggccctggccaagggcgacgtgaccgcccagatcgccctgcagcccgccctgaagttcaacggcggcggccacatcaaccacagcatcttctggaccaacctgagccccaacggcggcggcgagcccaagggcgagctgctggaggccatcaagagagacttcggcagcttcgacaagttcaaggagaagctgaccgccgccagcgtgggcgtgcagggcagcggctggggctggctgggcttcaacaaggagagaggccacctgcagatcgccgcctgccccaaccaggaccccctgcagggcaccaccggcctgatccccctgctgggcatcgacgtgtgggagcacgcctactacctgcagtacaagaacgtgagacccgactacctgaaggccatctggaacgtgatcaactgggagaacgtgaccgagagatacatggcctgcaagaagtag

SEQ ID NO: 27800 - DNA, 531 bp, Artificial Sequence
  derived and/or modified sequence
atgcagctgcaccacagcaagcaccacgccgcctacgtgaacaacctgaacgtgaccgaggagaagtaccaggaggccctggccaagggcgacgtgaccgcccagatcgccctgcagcccgccctgaagttcaacggcggcggccacatcaaccacagcatcttctggaccaacctgagccccaacggcggcggcgagcccaagggcgagctgctggaggccatcaagagagacttcggcagcttcgacaagttcaaggagaagctgaccgccgccagcgtgggcgtgcagggcagcggctggggctggctgggcttcaacaaggagagaggccacctgcagatcgccgcctgccccaaccaggaccccctgcagggcaccaccggcctgatccccctgctgggcatcgacgtgtgggagcacgcctactacctgcagtacaagaacgtgagacccgactacctgaaggccatctggaacgtgatcaactgggagaacgtgaccgagagatacatggcctgcaagaagtag

SEQ ID NO: 27801 - DNA, 669 bp, Artificial Sequence
  derived and/or modified sequence
atgttgagccgcgccgtgtgcgggacaagtcgtcagctggctcccgtcttgggctatctgggtagccgacagaaacacagcctgcccgaccttccatatgactacggcgccctggaaccacatatcaacgcgcagatcatgcaactgcaccacagtaagcaccacgcagcctacgtcaataacctcaatgtcacagaagagaagtatcaggaggccttagcaaagggggatgttacagctcagatcgctctgcagcctgctctgaaattcaacggagggggacacattaaccacagcatattctggacgaatctctcacctaacggcgggggcgagcctaagggcgagctgctggaagcaatcaaaagggacttcgggtccttcgataaattcaaggagaaacttacagcggctagtgttggcgtgcagggctccgggtgggggtggctgggttttaataaggaacgcggccacctccagatcgctgcatgccctaatcaggaccccttacagggaactactggacttattcctcttcttggaattgacgtatgggagcatgcatactacttacagtacaaaaacgtgaggccagactatctgaaggctatctggaacgtcattaattgggaaaatgtgaccgaaaggtatatggcgtgcaaaaagtag

SEQ ID NO: 27802 - DNA, 669 bp, Artificial Sequence
  derived and/or modified sequence
atgctatcaagagcagtgtgtggaactagcaggcagctggcccctgtgctgggctacttgggctcccgccagaagcacagtctgccagatttaccatatgactacggggcacttgaaccacatattaacgcccagataatgcagctacatcattcaaagcatcacgcagcctacgttaataatctgaacgtgactgaggaaaaataccaggaagcactggcgaagggtgacgtcaccgcccagattgcactccaacccgcgctgaagtttaatgggggcggacatattaaccatagcatattctggacaaatctatctcccaacggcggaggggagccgaaaggcgagcttctcgaggcgatcaagcgtgacttcgggtcttttgacaaatttaaggagaagctgactgccgcttccgtgggagtccaggggagcggatggggctggctgggattcaataaggagcggggtcacttacaaatagcagcttgcccgaaccaagaccccctccagggaactactgggctaatacctttattaggtatcgatgtctgggagcatgcctactacttgcagtataaaaatgtccgtcccgattatttgaaagcaatctggaacgtcatcaattgggagaacgtgacagaaagatatatggcctgcaagaaatag

SEQ ID NO: 27803 - DNA, 531 bp, Artificial Sequence
  derived and/or modified sequence
atgcagctgcatcacagtaagcatcacgccgcctacgtgaacaatttgaatgttactgaagagaagtaccaggaagcactggcaaaaggcgacgtgacagcccagattgcgctgcagcccgcgctcaagttcaacggtggcggacacattaatcattctattttctggacgaacctttcccctaacggaggaggtgagccaaagggagaattgctggaggcaatcaagagggactttggctcattcgacaagtttaaggagaagttaacagctgccagtgtgggagttcagggatctgggtgggggtggctgggcttcaataaggagcgaggccacctccagatcgctgcctgccctaaccaggatcccctacaaggcacgaccggactgatcccgctgctgggcatagatgtctgggagcatgcctattacctgcaatataagaatgtacgaccagattacctgaaggctatttggaatgtgattaactgggaaaacgtgaccgagcgctacatggcctgcaaaaagtag

SEQ ID NO: 27804 - DNA, 669 bp, Artificial Sequence
  derived and/or modified sequence
atgctgagcagagctgtgtgtggcaccagccggcagctggcccctgtgctgggctacctgggcagccggcagaagcacagcctgcctgacctgccctatgactatggagccctggagccccacatcaatgcccagatcatgcagctgcaccacagcaagcaccacgccgcctacgtgaacaacctgaatgtgacagaggagaagtaccaggaggccctggccaagggagatgtgacagcccagatcgccctgcagcctgccctgaagttcaatggaggcggccacatcaaccacagcatcttctggaccaacctgagccccaacggcggcggggagcccaagggggagctgctggaggccatcaagagggactttggcagctttgacaagttcaaggagaagctgacagctgcctctgtgggcgtgcagggcagcggctggggctggctgggcttcaacaaggagcggggccacctgcagattgctgcctgccccaaccaggaccccctgcagggcaccaccggcctcatccccctgctgggcattgatgtgtgggagcacgcctactacctgcagtacaagaatgtgcggccagactacctgaaggccatctggaatgtcatcaactgggagaatgtgacagagcgctacatggcctgcaagaagtag

SEQ ID NO: 27805 - DNA, 531 bp, Artificial Sequence
  derived and/or modified sequence
atgcagctgcaccacagcaagcaccacgccgcctacgtgaacaacctgaatgtgacagaggagaagtaccaggaggccctggccaagggagatgtgacagcccagatcgccctgcagcctgccctgaagttcaatggaggcggccacatcaaccacagcatcttctggaccaacctgagccccaacggcggcggggagcccaagggggagctgctggaggccatcaagagggactttggcagctttgacaagttcaaggagaagctgacagctgcctctgtgggcgtgcagggcagcggctggggctggctgggcttcaacaaggagcggggccacctgcagattgctgcctgccccaaccaggaccccctgcagggcaccaccggcctcatccccctgctgggcattgatgtgtgggagcacgcctactacctgcagtacaagaatgtgcggccagactacctgaaggccatctggaatgtcatcaactgggagaatgtgacagagcgctacatggcctgcaagaagtag

SEQ ID NO: 27806 - DNA, 669 bp, Artificial Sequence
  derived and/or modified sequence
atgctgagccgggccgtgtgcggcaccagccggcagctggcccccgtactgggctaccttggtagccgccagaagcactctcttccagacctgccgtatgattatggtgcgctggagccccacattaatgcccagatcatgcagctccatcactccaagcatcacgccgcatatgtcaacaatcttaatgtcactgaggaaaagtatcaagaggccttggctaagggagacgtgacggcgcagattgctttacaaccagcactgaagttcaacggggggggtcacatcaaccactctatcttttggactaatctttcaccaaatggcggcggcgaaccgaagggggaactgctggaggccattaagcgggactttggttctttcgataaattcaaagagaagctaacagccgcaagcgtgggcgttcagggtagtgggtgggggtggttggggttcaacaaagaacgcggccatctgcagatcgcagcctgtccaaatcaggatccgctgcaaggcactaccggtctgatccccctccttgggatcgacgtgtgggagcacgcctactacctgcagtacaagaacgtgcggcctgactatcttaaggccatctggaacgtgataaattgggagaacgtgacagaacggtatatggcctgtaagaagtag

SEQ ID NO: 27807 - DNA, 669 bp, Artificial Sequence
  derived and/or modified sequence
atgctgagccgggccgtgtgcggcaccagccggcagctggcccccgtgctggggtatcttggttctaggcaaaaacattctctgcccgatctgccctacgattatggagcactggagccccacatcaatgctcaaatcatgcaactgcatcattcaaagcaccacgcagcttatgttaataatctgaatgtaaccgaggaaaagtaccaggaggccctggctaagggcgacgtgaccgcccagatcgctctccaaccagcccttaaattcaacggcgggggccacattaatcattcgatcttctggaccaacctatccccaaacggaggtggtgagcccaagggcgagctgcttgaagctatcaaacgagacttcggatcttttgacaagttcaaggaaaaattaaccgctgccagcgtcggtgtgcagggctcgggctggggatggctgggcttcaacaaagaacgtggccacctacaaatagccgcatgcccaaatcaggatcctctgcaaggcactaccgggcttatacccctcctgggcatcgacgtgtgggaacacgcctactacctccagtataagaacgtcagacccgactacctcaaggccatctggaatgtgatcaattgggagaatgtaaccgaacggtatatggcgtgtaagaagtag

SEQ ID NO: 27808 - DNA, 531 bp, Artificial Sequence
  derived and/or modified sequence
atgcagctgcaccacagcaagcaccacgccgcctacgtgaacaaccttaacgtgacggaggaaaaataccaagaagctttggccaaaggggacgtgactgcacagattgcactgcagccagcactgaagttcaatggcggaggccacatcaaccatagtatattttggacgaacttgtctccgaacggcggaggcgaaccgaagggcgagctgctcgaggcaatcaagagagacttcggcagctttgacaagttcaaagaaaagttaaccgctgctagcgtgggggtgcagggaagcggatgggggtggctgggatttaacaaggagagaggccacctgcagattgccgcctgcccgaatcaggatccccttcagggcacaaccgggctgatcccccttctggggatcgacgtgtgggagcacgcatattatttgcagtataaaaacgtgagaccagactatctgaaagcaatctggaacgtaatcaactgggagaacgtgactgaacggtacatggcctgcaagaagtag

SEQ ID NO: 27809 - DNA, 669 bp, Artificial Sequence
  derived and/or modified sequence
atgctcagtagagcagtgtgcggaacatctcggcagctagcacctgttttaggataccttggcagccgccaaaagcactcactccccgacctgccatatgactatggcgctctcgagcctcacattaatgcacagattatgcaattgcaccatagcaagcaccacgctgcgtacgtcaacaacctcaacgtcacagaggaaaaatatcaggaggctctggcaaagggagacgttaccgcccaaatagcactgcagccagcactgaagttcaacggaggaggtcacatcaaccattccatcttctggaccaatctaagcccgaatgggggaggtgaaccaaagggcgaactgctcgaggctattaaaagagattttgggtctttcgataagtttaaggagaaactcacggctgcctctgtcggggttcaggggtcaggatggggatggctaggatttaacaaggagcggggacatctgcagatagccgcttgtccaaaccaggatcctttacagggtaccaccggactgatccctctgttaggcatagatgtctgggagcatgcctactacttacagtacaagaatgtgcgccctgactatctgaaagcgatctggaatgtgatcaattgggagaatgtgaccgagcggtatatggcctgcaaaaaatag

SEQ ID NO: 27810 - DNA, 669 bp, Artificial Sequence
  derived and/or modified sequence
atgctcagtcgcgctgtatgcggaacatccaggcaattggctcctgttcttggctatctcggtagtcgccagaaacattccttgcccgatctaccgtatgattacggcgcactggagccacatattaacgcacagatcatgcagttgcatcactccaagcaccacgctgcatacgtgaacaatctcaatgtcacagaggaaaagtatcaagaggccctcgccaagggggacgtgacagctcagatagcattgcagcccgcacttaagtttaacggcggaggccacattaaccactccatattctggacaaacttgagtccgaatggaggcggtgaaccgaagggggagcttctcgaggcgatcaagagggattttggcagcttcgataagttcaaagaaaaattgaccgcagcttctgtgggtgtacagggaagcggctggggctggctgggcttcaataaggaaaggggacacctgcaaatagccgcttgtcccaaccaggatcccctccagggaaccaccggcttgattcccctcttaggcatcgatgtgtgggagcacgcatactacctgcagtataagaacgtacggccagactatctgaaagccatctggaatgtcattaactgggagaatgtgaccgagcgatatatggcctgcaaaaagtag

SEQ ID NO: 27811 - DNA, 531 bp, Artificial Sequence
  derived and/or modified sequence
atgcagttacaccacagtaagcaccatgccgcatacgtgaataatcttaacgtcacggaagaaaaataccaagaggcgctagccaagggcgatgtcacagctcagattgcgctgcagccagccctcaagtttaacggcggtggccacatcaaccattctatattttggacaaatctatctccgaacggtggcggagaacctaagggcgagctgctggaagccattaagcgggactttgggtcgtttgacaagtttaaagagaagttaactgctgcatccgtgggggttcagggctccggttggggatggctcggcttcaataaagagagagggcacctacaaatcgcagcttgtccgaaccaggacccactgcaggggaccacagggttaatccctctgctcggcatcgacgtctgggagcatgcttattatttgcagtataaaaacgtgcgccctgattatctaaaggctatctggaacgttattaattgggagaacgtcacggagcggtacatggcttgtaagaaatag

SEQ ID NO: 27812 - DNA, 990 bp, Artificial Sequence
  derived and/or modified sequence
gctgtggtggcttcggcagcggcttcagcagatcggcggcatcagcggtagcaccagcactagcagcatgttgagccgggcagtgtgcggcaccagcaggcagctggctccggttttggggtatctgggctccaggcagaagcacagcctccccgacctgccctacgactacggcgccctggaacctcacatcaacgcgcagatcatgcagctgcaccacagcaagcaccacgcggcctacgtgaacaacctgaacgtcaccgaggagaagtaccaggaggcgttggccaagggagatgttacagcccagatagctcttcagcctgcactgaagttcaatggtggtggtcatatcaatcatagcattttctggacaaacctcagccctaacggtggtggagaacccaaaggggagttgctggaagccatcaaacgtgactttggttcctttgacaagtttaaggagaagctgacggctgcatctgttggtgtccaaggctcaggttggggttggcttggtttcaataaggaacggggacacttacaaattgctgcttgtccaaatcaggatccactgcaaggaacaacaggccttattccactgctggggattgatgtgtgggagcacgcttactaccttcagtataaaaatgtcaggcctgattatctaaaagctatttggaatgtaatcaactgggagaatgtaactgaaagatacatggcttgcaaaaagtaaaccacgatcgttatgctgatcataccctaatgatcccagcaagataatgtcctgtcttctaagatgtgcatcaagcctggtacatactgaaaaccctataaggtcctggataatttttgtttgattattcattgaagaaacatttattttccaattgtgtgaagtttttgactgttaataaaagaatctgtcaaccatcaaagaggtctgcattatgcttgcatgtcaaaaactttaaaaatcctataatcttc

SEQ ID NO: 27813 - DNA, 4259 bp, Artificial Sequence
  derived and/or modified sequence
cggggcggcggtgcccttgcggcgcagctggggtcgcggccctgctccccgcgctttcttaaggcccgcgggcggcgcaggagcggcactcgtggctgtggtggcttcggcagcggcttcagcagatcggcggcatcagcggtagcaccagcactagcagcatgttgagccgggcagtgtgcggcaccagcaggcagctggctccggttttggggtatctgggctccaggcagaagcacagcctccccgacctgccctacgactacggcgccctggaacctcacatcaacgcgcagatcatgcagctgcaccacagcaagcaccacgcggcctacgtgaacaacctgaacgtcaccgaggagaagtaccaggaggcgttggccaagggagatgttacagcccagatagctcttcagcctgcactgaagttcaatggtggtggtcatatcaatcatagcattttctggacaaacctcagccctaacggtggtggagaacccaaaggggagttgctggaagccatcaaacgtgactttggttcctttgacaagtttaaggagaagctgacggctgcatctgttggtgtccaaggctcaggttggggttggcttggtttcaataaggaacggggacacttacaaattgctgcttgtccaaatcaggatccactgcaaggaacaacaggccttattccactgctggggattgatgtgtgggagcacgcttactaccttcagtataaaaatgtcaggcctgattatctaaaagctatttggaatgtaatcaactgggagaatgtaactgaaagatacatggcttgcaaaaagtaaaccacgatcgttatgctgagtatgttaagctctttatgactgtttttgtagtggtatagagtactgcagaatacagtaagctgctctattgtagcatttcttgatgttgcttagtcacttatttcataaacaacttaatgttctgaataatttcttactaaacattttgttattgggcaagtgattgaaaatagtaaatgctttgtgtgattgaatctgattggacattttcttcagagagctaaattacaattgtcatttataaaaccatcaaaaatattccatccatatactttggggacttgtagggatgcctttctagtcctattctattgcagttatagaaaatctagtcttttgccccagttacttaaaaataaaatattaacactttcccaagggaaacactcggctttctatagaaaattgcactttttgtcgagtaatcctctgcagtgatacttctggtagatgtcacccagtggtttttgttaggtcaaatgttcctgtatagtttttgcaaatagagctgtatactgtttaaatgtagcaggtgaactgaactggggtttgctcacctgcacagtaaaggcaaacttcaacagcaaaactgcaaaaaggtggtttttgcagtaggagaaaggaggatgtttatttgcagggcgccaagcaaggagaattgggcagctcatgcttgagacccaatctccatgatgacctacaagctagagtatttaaaggcagtggtaaatttcaggaaagcagaagttaaaggcaaaattgtaaatcagtcgagatcgggtgccttcagggtggtatggctgtataccaaaattgtaaatcactacatgaagcttatatattggtttggcctgaaaggtgaagtggggtaggcagggggcgggcttacaggttatggtggattcaaagactccctgatttgtgattggttaaggaagcaaagctttgtctaaaaacttggggtccgcagaaaggaacattaaggtctggccaggcccctcaggaagaaactgagagcaaagaatggaggtcagagtttagtccctggtgttcccccttatctgacgtctgtgtgaatccatttggtgggggtctgggtttctgaaaagtagctcaggggcacgtgttaaggatgtctctaggtgactctaacttccctggctattgtttgaaactgttatgaccttcttgcttatcagcttgctggtttccttctcggggcgagctgggtgcctggagttttcggtgaaggaaactcaagattctcctttatttctgtgcttgtgggaatccccctggcacaccccaaagaggggtccctgctccgtctcacagggatctttttgtatatttggcttagcatcatacatttgccatgttgtttcatcatctgcctaatttactgtttttgaatatttcatttgtttctaattgttactacagataatgctggggtgagcaactctgtgtacataggtttatctcctattggaatattttctttatataggcgttttttttttttctttttttttggagacagagtcttgctctgttgcccaggctggagtgcagtggcgcgaccggagctcactgcaacctccacttcccgggttcaagtgattgtcccacctcagcctcctgaatagctgggattacaggtgcatgctaccatgcctggctactttttgtatttttagcagagacagggtttcaccatgttggccagggtggtctcgaactcctgacctcaagtgatccgtctggctcagcctcccaaagtgctgggattacaggtgtgagccactgcacctggcctatataggcttttttcttaaacctatttagtaatgttttcccaagtttattttttatttttaattttttccccaagtttatttttctatttttttttcatggaaaaatggggtaacttagcagtttcaatattgaagactgaagtttaaaaaaaatttaaattcaaggtacttttaaaattcagttagaaaagtaggctttaaaaattattagagacaagagtaccaaagcggtgtgtgtatgtgtgtgtgtgtatgcatgcttgtggattggaaaaactttggagactgattacttttcattatatatgtgtcacagtgaaacagcttttatgtgtcatgtaagattactgcttgcctctctaaggaaggtcgtgactgtttaaatagacgggcaaggtggaaccttttgaaagatgagcttttgaatataagttgtctgctagatcatggtttgtattgaactaacaaggtttgcagatctgctgacttatataaagctttttgattcctactaagctttaagatttaaaaaatgttcaatgttgaaatttctgtggggctctatttttgctttggctttctggtgagagagtgaggaagcattctttccttcactaagtttgtctttcttgtcttctggatagattgattttaagagactaagggaatttacaaactaaagattttagtcatctggtggaaaaggagactttaagattgtttagggctgggcggggtgactcacatctgtaatcccagcactttgggaggccaaggcaggcagaacacttgaaggagttcaagaccagcgtggccaacgtggtgaaaccctgtctctactaaaaatacaaaaattgtttagctctgtttttcataatagaaatagaaaaggtaaaattgcttttcttctgaaaagaacaagtattgttcatccaagaagggtttttgtgactgaatcagcagtgcctgccctagtcatagctgtgcttcaaaaacctcagcatgattagtgttggagcaaaacaaggaagcaaagcaaatactgtttttgaaattctatctgttgcttgaactattttgtaataattaaactttgatgttgagaaatcacaactttattgtacacttcattgcaacttgaaattcatggtcttaaagtgagatttgaatttctattgagcgcctttaaaaaagtaataccaaaccataaagttaaaatctatgtatattgagtcatatctaaaaccacgtataaacataaattgtatttcctgttttaattccaggggaagtactgtttgggaaagctattattaggtaaatgttttacaaattactgtttctcactttcagtcataccctaatgatcccagcaagataatgtcctgtcttctaagatgtgcatcaagcctggtacatactgaaaaccctataaggtcctggataatttttgtttgattattcattgaagaaacatttattttccaattgtgtgaagtttttgactgttaataaaagaatctgtcaaccatcaaagaggtctgcattatgcttgcatgtcaaaaactttaaaaatcctataatcttc

SEQ ID NO: 27814 - DNA, 2558 bp, Artificial Sequence
  derived and/or modified sequence
aaagccgggctcagaccacctagcagttccgcccctgccgcaggcattaccgatggcgcctcccggagccggccaatcaggggccccggaggagaacacctccctacgccaaccaatgggagaggcaggccacgcgatggctctaccccgggagccaatccaagcacgagggacggagtgcgcacatcgggagaggagagggtggggctgtagcaccaggtcagggaacgcgggagccgcagggttccagggatcccgcggctcctcgcggcttggcctgaccggcttcctccacatacgcccctctcctacacaagtccggccctcggcgctcctgccgaagcagcaggcgcctcggactctgcgcggctcccgccggccactcacctatgatggtccgcgccgccgagacgatgaccacaggatctgagcctgcattcatcttgcttctcctgccgccgtctgccctgcgctgcctgcaagctaggcaaagctcctcctcgcagcccacaggcctgccgcgggcgggacctgaggtagccccgcccctcgccctccacctccccgcgcaccacctccccgcgcatcccactgtgcgcaggcgcaaggccggagcaggggcgggcggaggcgcgcggggcgcggggcgcggggcgcggggcggaagtgaggccggggcgcggggcgcggggcggaagtgaggccggggtctgggcttgcgggcagaaccgcggacctcggacgcatttacagagcgcctgaaaccccagtgtttctggacaccccaatgttggagttccccgacttgacgtcttgggcttttttttaaaaaatcttagggtttctcgaaacagtaaagactggggggtgacaaagacttatctctcgttcagctcaggactggaatcccacgggcgagaatctcgagtgcgagcccggcccgcggcgggtctcagcacagctctgatgggtccttttgctctcggcggcttcgggaggtcctatgcgtttctcctggcgccagtcattcgctcgcgtgaggggcttgctaggagcgtctcggtgcgagccccctgccttctaagatcaactctggctgtgaacgggtgaggacgccgggagcgtcttagcgtcacaaaagttcctttggttgacgtttggacagtgaaaggagcatgtaacaagtggggtcagttttgtttaaaaccctttctgacttcccagcctcttactgggcaaagttcataatttttctgagctttctagggtttccaggcaagcttatgaggggccaccgttacagcaacttgttgggaacacctggatagtggaacaagaaagctttgtcacaaagtcatgaaggggaaaactgttgacggacctggagaatcttcctgaagaactttaaagttgattgaaagaatcattaaatcctggaaacctacattaagactttgcagagatatgcggatgggtcagataaatcagagaagaaacatttctcaagtgtctacatgttctagaaggggaatttttcggaggtggccacttcttcggaatagtccgacgccatcaggcctctgaagcaaggggaaggggaaaagaaaaaagctgaaacacaaggttcatctgtagagacagcgtttcactatgttggccaggctggtctccaactcctgacattggcttatgttctttttaaaaagtttgatgcaccagcaggcagctggctccggttttggggtatctgggctccaggcagaagcacagcctccccgacctgccctacgactacggcgccctggaacctcacatcaacgcgcagatcatgcagctgcaccacagcaagcaccacgcggcctacgtgaacaacctgaacgtcaccgaggagaagtaccaggaggcgttggccaagggagatgttacagcccagatagctcttcagcctgcactgaagttcaatggtggtggtcatatcaatcatagcattttctggacaaacctcagccctaacggtggtggagaacccaaaggggagttgctggaagccatcaaacgtgactttggttcctttgacaagtttaaggagaagctgacggctgcatctgttggtgtccaaggctcaggttggggttggcttggtttcaataaggaacggggacacttacaaattgctgcttgtccaaatcaggatccactgcaaggaacaacaggccttattccactgctggggattgatgtgtgggagcacgcttactaccttcagtataaaaatgtcaggcctgattatctaaaagctatttggaatgtaatcaactgggagaatgtaactgaaagatacatggcttgcaaaaagtaaaccacgatcgttatgctgatcataccctaatgatcccagcaagataatgtcctgtcttctaagatgtgcatcaagcctggtacatactgaaaaccctataaggtcctggataatttttgtttgattattcattgaagaaacatttattttccaattgtgtgaagtttttgactgttaataaaagaatctgtcaaccatc

SEQ ID NO: 27815 - protein, 183 aa, Artificial Sequence
  derived and/or modified sequence
MLSRAVCGTSRQLAPVLGYLGSRQKHSLPDLPYDYGALEPHINAQIMQLHHSKHHAAYVNNLNVTEEKYQEALAKGELLEAIKRDFGSFDKFKEKLTAASVGVQGSGWGWLGFNKERGHLQIAACPNQDPLQGTTGLIPLLGIDVWEHAYYLQYKNVRPDYLKAIWNVINWENVTERYMACKK

SEQ ID NO: 27816 - DNA, 552 bp, Artificial Sequence
  derived and/or modified sequence
atgctgagcagagccgtgtgcggcaccagcagacagctggcccccgtgctgggctacctgggcagcagacagaagcacagcctgcccgacctgccctacgactacggcgccctggagccccacatcaacgcccagatcatgcagctgcaccacagcaagcaccacgccgcctacgtgaacaacctgaacgtgaccgaggagaagtaccaggaggccctggccaagggcgagctgctggaggccatcaagagagacttcggcagcttcgacaagttcaaggagaagctgaccgccgccagcgtgggcgtgcagggcagcggctggggctggctgggcttcaacaaggagagaggccacctgcagatcgccgcctgccccaaccaggaccccctgcagggcaccaccggcctgatccccctgctgggcatcgacgtgtgggagcacgcctactacctgcagtacaagaacgtgagacccgactacctgaaggccatctggaacgtgatcaactgggagaacgtgaccgagagatacatggcctgcaagaagtag

SEQ ID NO: 27817 - DNA, 552 bp, Artificial Sequence
  derived and/or modified sequence
atgttatccagagcggtgtgtggtacaagccggcagctggcccccgtgctagggtatctgggcagcagacagaaacattccctacccgatctgccctatgactatggagcgttggaacctcacattaacgcacagataatgcagctccaccatagcaagcaccatgccgcttatgttaacaaccttaacgttacagaggagaaataccaggaagctctagcaaaaggtgagctgctggaggccattaaaagagactttggctctttcgacaagtttaaggaaaagctaacggccgcatcagtaggcgtccaggggtctggctgggggtggctcggatttaacaaggaaagagggcacctacagatagctgcttgcccaaatcaagatccgttacaaggaaccacaggcctgattcctttgctcggaattgacgtgtgggagcacgcttactatttgcaatacaagaacgtccgacctgactatctgaaggctatttggaacgtaatcaactgggagaatgtgaccgaacgctacatggcgtgtaaaaagtag

SEQ ID NO: 27818 - DNA, 552 bp, Artificial Sequence
  derived and/or modified sequence
atgctctcaagggctgtgtgcgggactagtagacagttggcccctgtcctcggctatctgggctccagacaaaagcacagcctgccggacctgccctacgactacggtgcgctggaaccgcacatcaacgcgcagatcatgcagcttcaccattcgaaacaccacgccgcctatgtgaacaatctgaacgtaactgaggaaaaatatcaggaggccctggcaaagggggagctgttagaggccataaaaagggatttcgggtccttcgacaaattcaaagagaagctgaccgccgcaagcgtgggggtgcagggctcaggatggggctggcttggttttaacaaagaacggggtcacctgcagattgcggcctgtcctaaccaagatcctcttcaggggaccacaggtctcattcctctcctcgggatcgatgtgtgggagcatgcttattacctgcagtacaaaaacgtgcgccccgactacctgaaggctatatggaacgttatcaattgggagaacgtcacagagagatatatggcctgcaagaaatag

SEQ ID NO: 27819 - DNA, 552 bp, Artificial Sequence
  derived and/or modified sequence
atgctgagcagagctgtgtgtggcaccagccggcagctggcccctgtgctgggctacctgggcagccggcagaagcacagcctgcctgacctgccctatgactatggagccctggagccccacatcaatgcccagatcatgcagctgcaccacagcaagcaccacgccgcctacgtgaacaacctgaatgtgacagaggagaagtaccaggaggccctggccaagggggagctgctggaggccatcaagagggactttggcagctttgacaagttcaaggagaagctgacagctgcctctgtgggcgtgcagggcagcggctggggctggctgggcttcaacaaggagcggggccacctgcagattgctgcctgccccaaccaggaccccctgcagggcaccaccggcctcatccccctgctgggcattgatgtgtgggagcacgcctactacctgcagtacaagaatgtgcggccagactacctgaaggccatctggaatgtcatcaactgggagaatgtgacagagcgctacatggcctgcaagaagtag

SEQ ID NO: 27820 - DNA, 552 bp, Artificial Sequence
  derived and/or modified sequence
atgctgagccgggccgtgtgcggcaccagccggcagctggcccccgttcttgggtacctagggtccagacagaagcattccctgccggatctgccctacgattacggagccctggaaccccacattaacgcacagattatgcagctgcaccattccaagcatcatgctgcgtacgtgaataacctaaacgtgaccgaagaaaagtaccaagaggccctcgccaagggagaattactggaggcgattaagagggatttcggtagcttcgacaagttcaaagaaaaacttaccgctgcaagcgtgggagtgcagggaagtggctggggctggttggggttcaacaaggaacggggtcaccttcagatcgccgcatgtccaaaccaggatcccctgcagggcacaacaggccttatcccactgttgggcatagacgtatgggaacatgcctattatttgcagtataagaatgtgagacccgactaccttaaagccatttggaatgttatcaattgggaaaatgtaaccgaacggtatatggcctgcaagaagtag

SEQ ID NO: 27821 - DNA, 552 bp, Artificial Sequence
  derived and/or modified sequence
atgctgagccgggccgtgtgcggcaccagccggcagctggcccccgtgctcggctatcttggttctcgccagaagcattctttgccagacctaccctacgattacggagctctggagcctcatattaacgcccagatcatgcagctacatcacagcaagcatcatgctgcttatgtgaataacttgaatgtgacggaggagaagtatcaggaagccctggctaagggggaacttctggaggcaattaaacgcgatttcggcagtttcgataagtttaaggagaaattaacagcagcatccgttggcgtccaggggtctggctgggggtggctgggctttaacaaagagagaggacacttgcaaattgcggcttgtccgaaccaggaccctctccagggtactaccggactcattcctctgttaggcatcgacgtgtgggaacatgcctattacctccagtataaaaacgtcagaccggactatctcaaggcaatctggaatgttattaactgggaaaatgttacggagcgatatatggcttgcaagaaatag

SEQ ID NO: 27822 - DNA, 552 bp, Artificial Sequence
  derived and/or modified sequence
atgttatccagagcagtctgcgggacctcacgacaactggcaccagtgctaggttacctcggctcccgtcaaaaacactcattgcctgatctcccatacgactacggcgctctggaaccacacattaacgcccagatcatgcagttacatcactcaaagcatcatgccgcttacgtgaacaacctgaatgtgacagaagagaagtaccaggaagccttggccaagggagaattactggaggcaattaaaagggactttggttccttcgacaagttcaaagaaaagctgaccgccgcttccgttggggtccaaggcagcggctgggggtggcttggtttcaataaggagcgtgggcaccttcagattgccgcatgtccaaatcaggaccctttgcagggcaccacagggctgatccccctgctagggatcgacgtttgggagcatgcttactacttgcaatataagaatgtgcgtccggattatctcaaggcaatatggaatgtcattaactgggaaaatgttacagaacgctatatggcttgtaaaaaatag

SEQ ID NO: 27823 - DNA, 552 bp, Artificial Sequence
  derived and/or modified sequence
atgctcagcagggcggtctgcggtacctcccggcaacttgcacccgtcttgggctacctgggaagccgtcagaagcattcactgccagatctgccttatgattatggtgcactcgagcctcacatcaatgcacagataatgcaactgcatcattccaaacaccacgccgcttacgtgaacaatctgaacgtcacagaagaaaaataccaggaagccctggccaagggagagctcctcgaggccatcaagagagacttcggctcctttgataagttcaaggaaaagcttacagctgcgagtgtcggagtgcagggctccggttggggctggctgggatttaacaaggaacggggtcaccttcaaattgcagcctgccctaatcaagacccactccaggggacaacaggtctgatccccctgttggggatcgatgtgtgggagcacgcgtactacttgcagtataagaatgtcaggccggactatttgaaagccatttggaacgtgataaactgggaaaatgtgaccgagcgctacatggcttgtaaaaaatag

SEQ ID NO: 27824 - DNA, 991 bp, Artificial Sequence
  derived and/or modified sequence
gcgctttcttaaggcccgcgggcggcgcaggagcggcactcgtggctgtggtggcttcggcagcggcttcagcagatcggcggcatcagcggtagcaccagcactagcagcatgttgagccgggcagtgtgcggcaccagcaggcagctggctccggttttggggtatctgggctccaggcagaagcacagcctccccgacctgccctacgactacggcgccctggaacctcacatcaacgcgcagatcatgcagctgcaccacagcaagcaccacgcggcctacgtgaacaacctgaacgtcaccgaggagaagtaccaggaggcgttggccaagggggagttgctggaagccatcaaacgtgactttggttcctttgacaagtttaaggagaagctgacggctgcatctgttggtgtccaaggctcaggttggggttggcttggtttcaataaggaacggggacacttacaaattgctgcttgtccaaatcaggatccactgcaaggaacaacaggccttattccactgctggggattgatgtgtgggagcacgcttactaccttcagtataaaaatgtcaggcctgattatctaaaagctatttggaatgtaatcaactgggagaatgtaactgaaagatacatggcttgcaaaaagtaaaccacgatcgttatgctgagtatgttaagctctttatgactgtttttgtagtggtatagagtactgcagaatacagtaagctgctctattgtagcatttcttgatgttgcttagtcacttatttcataaacaacttaatgttctgaataatttcttactaaacattttgttattgggcaagtgattgaaaatagtaaatgctttgtgtgattgaatctgattggacattttcttcagagagctaaattacaattgtcatttataaaaccatcaaaaatattccatccatatactttggggacttgtagggatgcctttctagtcctat

SEQ ID NO: 27825 - DNA, 815 bp, Artificial Sequence
  derived and/or modified sequence
gtggcttcggcagcggcttcagcagatcggcggcatcagcggtagcaccagcactagcagcatgttgagccgggcagtgtgcggcaccagcaggcagctggctccggttttggggtatctgggctccaggcagaagcacagcctccccgacctgccctacgactacggcgccctggaacctcacatcaacgcgcagatcatgcagctgcaccacagcaagcaccacgcggcctacgtgaacaacctgaacgtcaccgaggagaagtaccaggaggcgttggccaagggggagttgctggaagccatcaaacgtgactttggttcctttgacaagtttaaggagaagctgacggctgcatctgttggtgtccaaggctcaggttggggttggcttggtttcaataaggaacggggacacttacaaattgctgcttgtccaaatcaggatccactgcaaggaacaacaggccttattccactgctggggattgatgtgtgggagcacgcttactaccttcagtataaaaatgtcaggcctgattatctaaaagctatttggaatgtaatcaactgggagaatgtaactgaaagatacatggcttgcaaaaagtaaaccacgatcgttatgctgatcataccctaatgatcccagcaagataatgtcctgtcttctaagatgtgcatcaagcctggtacatactgaaaaccctataaggtcctggataatttttgtttgattattcattgaagaaacatttattttccaattgtgtgaagtttttgactgttaataaaagaatctgtcaaccatcaaa

SEQ ID NO: 27826 - protein, 471 aa, Artificial Sequence
  derived and/or modified sequence
MDSSCHNATTKMLATAPARGNMMSTSKPLAFSIERIMARTPEPKALPVPHFLQGALPKGEPKHSLHLNSSIPCMIPFVPVAYDTSPKAGVTGSEPRKASLEAPAAPAAVPSAPAFSCSDLLNCALSLKGDLARDALPLQQYKLVRPRVVNHSSFHAMGALCYLNRGDGPCHPAAGVNIHPVASYFLSSPLHPQPKTYLAERNKLVVPAVEKYPSGVAFKDLSQAQLQHYMKESAQLLSEKIAFKTSDFSRGSPNAKPKVFTCEVFNAHYNLTRHMPVHTGARPFVCKVCGKGFRQASTLCRHKIIHTQEKPHKCNQCGKAFNRSSTLNTHTRIHAGYKPFVCEFCGKGFHQKGNYKNHKLTHSGEKQFKCNICNKAFHQVYNLTFHMHTHNDKKPFTCPTCGKGFCRNFDLKKHVRKLHDSSLGLARTPAGEPGTEPPPPLPQQPPMTLPPLQPPLPTPGPLQPGLHQGHQ

SEQ ID NO: 27827 - protein, 35 aa, Artificial Sequence
  derived and/or modified sequence
MDSSCHNATTKMLATAPARGNMMSTSKPLAFSIER

SEQ ID NO: 27828 - protein, 475 aa, Artificial Sequence
  derived and/or modified sequence
MDSSCHNATTKMLATAPARGNMMSTSKPLAFSIERIMARTPEPKALPVPHFLQGALPKGEPKHSLHLNSSIPCMIPFVPVAYDTSPKAGVTGSEPRKASLEAPAAPAAVPSAPAFSCSDLLNCALSLKGDLARDALPLQQYKLVRPRVVNHSSFHAMGALCYLNRGDGPCHPAAGVNIHPVASYFLSSPLHPQPKTYLAERNKLVVPAVEKYPSGVAFKDLSQAQLQHYMKESAQLLSEKIAFKTSDFSRGSPNAKPKVFTCEVCGKVFNAHYNLTRHMPVHTGARPFVCKVCGKGFRQASTLCRHKIIHTQEKPHKCNQCGKAFNRSSTLNTHTRIHAGYKPFVCEFCGKGFHQKGNYKNHKLTHSGEKQFKCNICNKAFHQVYNLTFHMHTHNDKKPFTCPTCGKGFCRNFDLKKHVRKLHDSSLGLARTPAGEPGTEPPPPLPQQPPMTLPPLQPPLPTPGPLQPGLHQGHQ

SEQ ID NO: 27829 - DNA, 2019 bp, Artificial Sequence
  derived and/or modified sequence
atggacagtagctgccacaacgcgactaccaaaatgttagcgactgctccagctcggggcaacatgatgagcacgtccaaacccttggctttctccattgaacgaatcatggcgcgcaccccagagcccaaggccctgccagtcccccacttcctgcagggagccttacccaagggggaacccaagcactctctgcatctcaactcgtcgatcccctgcatgatccccttcgtgcctgtggcctacgacacgagccccaaggcaggagtgacgggctccgagccgcggaaggccagtctggaggccccggcggcgcccgcggcggtgccctcggctcccgcattcagctgcagcgacctgctcaactgcgcactgagtctcaagggcgacctggcccgcgacgcgctgccgctgcagcagtacaagctggtaaggccgcgtgtggtcaaccactcttcattccacgccatgggcgccttgtgctacctgaaccgaggtgacggcccatgccacccggcagccggcgtgaacatccacccggtggcctcctacttcctcagttcccctttgcacccgcagccaaaaacgtatttagccgaaaggaataaactggtggtcccggcggtggagaaatacccttctggagtagctttcaaagacctgtcccaggctcagctgcagcattacatgaaagaaagcgcccagcttctgtcggaaaaaatcgcgttcaaaacctcggatttcagccgaggctctcctaatgccaagcccaaagttttcacttgcgaagtctttaatgcgcactataacttaacccgtcacatgccagtgcacacaggagccagacccttcgtttgcaaagtgtgcggaaaaggtttcaggcaagcaagcaccctgtgcaggcacaagatcattcacacgcaggaaaaacctcacaaatgtaaccagtgtggcaaagcatttaatagaagttccactttaaacactcatacccgaatacacgcgggctacaaaccgtttgtgtgtgaattctgtggcaaagggtttcatcaaaaagggaattacaaaaaccacaagttgacccacagcggggagaagcagttcaagtgcaatatctgcaacaaggctttccaccaggtttacaacctcaccttccacatgcacacccacaacgacaagaagcctttcacctgccccacgtgcggcaagggtttctgcaggaactttgacctcaagaagcatgtccgcaagctgcacgacagcagcctggggctggcccgcacgccagctggcgaaccaggcactgaaccgccgcccccgctaccgcagcagccgccgatgacgctgcctcctctgcagccgccgctgccaaccccggggcccctgcagcccgggctccaccagggccaccagtgatcgaggctaagggtcctcccagcctcagccgtgcccccacgctgaggcagcggcagactagagctcctggtccgagttcgtctgcagaccccagggcatgttgggccccacacttcagggccgaccagaagcctctgcatcccctggcctttcgcctcttgcatgcacctgctaaatggttttgtgtattatattctatataggcactaacaattatgaaaaatttggagggttttgcttgttttctgtttttctttttctttttttttaatttggaaagacttttcatcttgggtggagagatggtgtttattttgttttgttttgtttaaacaaatttctgctatatttattgagatctgtattattctacccgggaatgctgcatcattttaattttattattgtatatatttccattgtgttgattctccggtctcaagatgtctgctggatgttgatcatttcctctttccctgaagtaacaaaacactgtgtgtatgtcatatatacacgcatagatgtgtgcgcccataggggtacattccacattcgtgagcacacacccatacacattagataagggtggttcattatggatga

SEQ ID NO: 27830 - DNA, 2099 bp, Artificial Sequence
  derived and/or modified sequence
gacaagcagggaacaaggcaacggacggcgcaacccagccccggctgacggacgctggcgactcagacatggacagtagctgccacaacgcgactaccaaaatgttagcgactgctccagctcggggcaacatgatgagcacgtccaaacccttggctttctccattgaacgaatcatggcgcgcaccccagagcccaaggccctgccagtcccccacttcctgcagggagccttacccaagggggaacccaagcactctctgcatctcaactcgtcgatcccctgcatgatccccttcgtgcctgtggcctacgacacgagccccaaggcaggagtgacgggctccgagccgcggaaggccagtctggaggccccggcggcgcccgcggcggtgccctcggctcccgcattcagctgcagcgacctgctcaactgcgcactgagtctcaagggcgacctggcccgcgacgcgctgccgctgcagcagtacaagctggtaaggccgcgtgtggtcaaccactcttcattccacgccatgggcgccttgtgctacctgaaccgaggtgacggcccatgccacccggcagccggcgtgaacatccacccggtggcctcctacttcctcagttcccctttgcacccgcagccaaaaacgtatttagccgaaaggaataaactggtggtcccggcggtggagaaatacccttctggagtagctttcaaagacctgtcccaggctcagctgcagcattacatgaaagaaagcgcccagcttctgtcggaaaaaatcgcgttcaaaacctcggatttcagccgaggctctcctaatgccaagcccaaagttttcacttgcgaagtgtgtggaaaggtctttaatgcgcactataacttaacccgtcacatgccagtgcacacaggagccagacccttcgtttgcaaagtgtgcggaaaaggtttcaggcaagcaagcaccctgtgcaggcacaagatcattcacacgcaggaaaaacctcacaaatgtaaccagtgtggcaaagcatttaatagaagttccactttaaacactcatacccgaatacacgcgggctacaaaccgtttgtgtgtgaattctgtggcaaagggtttcatcaaaaagggaattacaaaaaccacaagttgacccacagcggggagaagcagttcaagtgcaatatctgcaacaaggctttccaccaggtttacaacctcaccttccacatgcacacccacaacgacaagaagcctttcacctgccccacgtgcggcaagggtttctgcaggaactttgacctcaagaagcatgtccgcaagctgcacgacagcagcctggggctggcccgcacgccagctggcgaaccaggcactgaaccgccgcccccgctaccgcagcagccgccgatgacgctgcctcctctgcagccgccgctgccaaccccggggcccctgcagcccgggctccaccagggccaccagtgatcgaggctaagggtcctcccagcctcagccgtgcccccacgctgaggcagcggcagactagagctcctggtccgagttcgtctgcagaccccagggcatgttgggccccacacttcagggccgaccagaagcctctgcatcccctggcctttcgcctcttgcatgcacctgctaaatggttttgtgtattatattctatataggcactaacaattatgaaaaatttggagggttttgcttgttttctgtttttctttttctttttttttaatttggaaagacttttcatcttgggtggagagatggtgtttattttgttttgttttgtttaaacaaatttctgctatatttattgagatctgtattattctacccgggaatgctgcatcattttaattttattattgtatatatttccattgtgttgattctccggtctcaagatgtctgctggatgttgatcatttcctctttccctgaagtaacaaaacactgtgtgtatgtcatatatacacgcatagatgtgtgcgcccataggggtacattccacattcgtgagcacacacccatacacattagataagggtggttcattatggatga

SEQ ID NO: 27831 - DNA, 1416 bp, Artificial Sequence
  derived and/or modified sequence
atggatagctcttgccataatgcaacgaccaagatgctggccaccgcgcctgcaagaggtaatatgatgagtacctccaagcctctggcattttcaattgagaggattatggcacgaacaccagagcctaaagccctgcccgtgccacactttctccagggagcactgcccaagggagagcccaagcattctctccatctcaattctagtatcccatgcatgatcccattcgtgcctgtggcctacgatacttctccaaaggcgggggtgaccggaagcgagccgaggaaggcttccctagaagcccccgcagccccagcggctgtgcctagtgcccctgcgttctcatgttccgacctgttgaactgtgctctgtccctgaagggcgacctggcccgggatgctctgcccctccagcagtataagctcgtgaggccccgcgtggtgaaccacagctcgttccatgcgatgggggctctatgctatttgaaccgaggcgatgggccctgccaccccgcagcaggggtcaacatacatccagtggcaagttactttctgtccagccctcttcacccccagccaaagacctatttggccgagcgcaacaagctggttgtccccgctgtcgagaagtacccatcaggagtagcattcaaagatctctcccaggcgcaacttcagcattatatgaaagagtccgcccaactgctatccgaaaagattgcatttaaaactagcgacttctcccgtgggtcccctaacgccaaacccaaagttttcacatgtgaagttttcaatgcgcactacaacctgaccaggcatatgcccgtgcacactggggcgcgtccattcgtctgcaaagtgtgtggtaaaggttttcgacaggccagtaccttgtgtcgacacaagatcatacatactcaggaaaaaccgcataagtgtaaccagtgtggcaaggcctttaaccgcagctctaccttaaacacccataccaggattcacgccgggtacaagccttttgtttgcgagttctgtggcaaagggttccatcagaaaggcaactataaaaatcacaaactgacacactccggcgagaagcagtttaaatgtaatatttgtaacaaggcgttccaccaagtgtacaacctaaccttccatatgcatactcataatgacaagaagccatttacatgccccacctgcggcaagggcttctgccggaactttgaccttaaaaagcacgtaagaaagttgcacgacagctcattgggtctcgccagaactccagccggggagccaggtaccgagcccccacccccccttccacagcagcctccaatgactctgccacctctccaaccgccgctccctacccccgggccccttcagccagggctccatcagggtcaccaatag

SEQ ID NO: 27832 - DNA, 1428 bp, Artificial Sequence
  derived and/or modified sequence
atggacagtagttgtcataacgccacaaccaagatgctggcgactgctcctgcccggggcaacatgatgagcacttcaaaacctcttgccttttctatcgagaggattatggcccgtacacccgaaccaaaggccctgccggttccacatttcctgcagggagcactgcctaaaggggagccaaagcatagcttacacctgaattcttctatcccttgcatgataccctttgtccccgtcgcgtacgacacctccccgaaagctggggtcactgggtctgagcctcgcaaagcttccctggaagctcccgccgcacccgctgccgtcccgtcagctccagctttttcctgttctgatttgctcaattgcgccctaagcttaaaaggtgatctcgccagggacgcgcttccacttcaacagtacaaattggttagaccacgggtggtgaaccacagctccttccatgctatgggggctttatgttacctgaaccggggcgacggtccatgccaccccgcggccggagtcaacatccacccagtggcttcatacttcctgtctagccccctgcatccacagccaaagacctacctggccgagagaaataaactcgtcgtgccggccgtggagaagtacccgagcggagtcgctttcaaggacctctctcaggctcagctccagcactatatgaaggagtcagcacagctgctctcagagaaaatagcgttcaagacgtccgatttctcacgcgggtctcctaatgcaaagccaaaggtcttcacatgtgaggtctgcggaaaggtgtttaatgcccactataacctaactcgccacatgccagtccataccggagcacgtccatttgtatgtaaagtatgtggaaagggattccggcaggctagcacactttgtaggcacaagataatacacacccaggagaagccgcacaagtgcaaccaatgcgggaaggccttcaaccgtagctctacactcaacacgcacaccagaatccacgccggctataagccctttgtatgtgagttctgcggcaagggcttccatcagaagggcaactacaagaaccacaagctgacccattcaggtgagaaacaattcaaatgcaatatttgtaataaagcgttccatcaggtgtataatttaacttttcatatgcacactcataatgataagaagcccttcacctgtccgacctgcggaaaaggcttctgtagaaatttcgacctcaaaaagcacgtgcggaaacttcacgacagcagcttaggactcgccagaacaccggcaggcgagccaggcactgagccacccccgcccctgccccagcagcctcccatgacgctgccccctctgcagcccccacttccaacgcctggcccgctgcagccaggcctgcatcagggtcaccagtag

SEQ ID NO: 27833 - DNA, 1416 bp, Artificial Sequence
  derived and/or modified sequence
atggacagcagctgccacaatgccaccaccaagatgctggccacagccccagcccggggcaacatgatgagcaccagcaagcccctggccttcagcattgagcgcatcatggcccggaccccagagcccaaggccctgcctgtgccccacttcctgcagggcgccctgcccaagggggagcccaagcacagcctgcacctgaacagcagcatcccctgcatgatcccctttgtgcctgtggcctatgacaccagccccaaggccggcgtgactggaagtgagcccaggaaggccagcctggaggccccagctgccccagctgctgtgcccagcgccccagccttcagctgcagcgacctgctgaactgtgccctgagcctgaagggggacctggccagagatgccctgcccctgcagcagtacaagctggtgcggccccgggtggtgaaccacagcagcttccacgccatgggcgccctgtgctacctgaacagaggagatggcccctgccaccctgctgctggggtgaacatccaccctgtggccagctacttcctgagcagccccctgcacccccagcccaagacctacctggccgagaggaacaagctggtggtgcctgctgtggagaagtaccccagcggcgtggccttcaaggacctgagccaggcccagctgcagcactacatgaaggagagcgcccagctgctgtctgagaagatcgccttcaagaccagtgacttcagccggggcagccccaatgccaagcccaaggtgttcacctgtgaggtgttcaatgcccactacaacctgaccaggcacatgcctgtgcacactggagcccggccctttgtgtgcaaggtgtgtgggaagggcttccggcaggccagcaccctgtgccgccacaagatcatccacacccaggagaagccccacaagtgcaaccagtgtgggaaggccttcaacagaagcagcaccctgaacacccacacccgcatccatgctggctacaagccctttgtgtgtgagttctgtgggaagggcttccaccagaagggcaactacaagaaccacaagctgacccacagcggggagaagcagttcaagtgcaacatctgcaacaaggccttccaccaggtgtacaacctgaccttccacatgcacacccacaatgacaagaagcccttcacctgccccacctgtgggaagggcttctgcaggaactttgacctgaagaagcacgtgaggaagctgcatgacagcagcctgggcctggcccggaccccagctggggagcctggaacagagcccccaccacccctgccccagcagccccccatgaccctgccccccctgcagccccccctgcccaccccaggccccctgcagcccggcctgcaccagggccaccagtag

SEQ ID NO: 27834 - DNA, 1428 bp, Artificial Sequence
  derived and/or modified sequence
atggacagcagctgccacaatgccaccaccaagatgctggccacagccccagcccggggcaacatgatgagcaccagcaagcccctggccttcagcattgagcgcatcatggcccggaccccagagcccaaggccctgcctgtgccccacttcctgcagggcgccctgcccaagggggagcccaagcacagcctgcacctgaacagcagcatcccctgcatgatcccctttgtgcctgtggcctatgacaccagccccaaggccggcgtgactggaagtgagcccaggaaggccagcctggaggccccagctgccccagctgctgtgcccagcgccccagccttcagctgcagcgacctgctgaactgtgccctgagcctgaagggggacctggccagagatgccctgcccctgcagcagtacaagctggtgcggccccgggtggtgaaccacagcagcttccacgccatgggcgccctgtgctacctgaacagaggagatggcccctgccaccctgctgctggggtgaacatccaccctgtggccagctacttcctgagcagccccctgcacccccagcccaagacctacctggccgagaggaacaagctggtggtgcctgctgtggagaagtaccccagcggcgtggccttcaaggacctgagccaggcccagctgcagcactacatgaaggagagcgcccagctgctgtctgagaagatcgccttcaagaccagtgacttcagccggggcagccccaatgccaagcccaaggtgttcacctgtgaggtgtgtgggaaggtgttcaatgcccactacaacctgaccaggcacatgcctgtgcacactggagcccggccctttgtgtgcaaggtgtgtgggaagggcttccggcaggccagcaccctgtgccgccacaagatcatccacacccaggagaagccccacaagtgcaaccagtgtgggaaggccttcaacagaagcagcaccctgaacacccacacccgcatccatgctggctacaagccctttgtgtgtgagttctgtgggaagggcttccaccagaagggcaactacaagaaccacaagctgacccacagcggggagaagcagttcaagtgcaacatctgcaacaaggccttccaccaggtgtacaacctgaccttccacatgcacacccacaatgacaagaagcccttcacctgccccacctgtgggaagggcttctgcaggaactttgacctgaagaagcacgtgaggaagctgcatgacagcagcctgggcctggcccggaccccagctggggagcctggaacagagcccccaccacccctgccccagcagccccccatgaccctgccccccctgcagccccccctgcccaccccaggccccctgcagcccggcctgcaccagggccaccagtag

SEQ ID NO: 27835 - DNA, 1416 bp, Artificial Sequence
  derived and/or modified sequence
atggacagcagctgccacaacgccaccaccaagatgctggccaccgcccctgccagggggaacatgatgtccacgtcgaaacccctggccttttcaatcgagaggattatggccagaactccagaacctaaggccttacccgtcccacacttcctccagggtgcactgccaaaaggcgagccaaaacattccttgcacctgaattcatctatcccctgtatgatacccttcgtacccgtggcttacgacacctctcctaaggctggcgttaccgggagtgagccacggaaagccagccttgaagccccagcagctccggccgcggtcccatcagccccagctttcagttgcagtgacctgctgaactgcgcactgagtctcaagggggacctcgctagagacgccctgccactgcagcagtataaattggttcgacccagggttgtcaatcacagctcatttcatgccatgggcgctctatgttatctcaatcggggagacgggccttgtcaccccgccgcaggagtgaacatccaccctgtcgcatcctacttcttaagttctcccctgcaccctcagcctaaaacttacctggccgaaagaaataaactagtcgtgccagccgtggaaaaatacccttcgggtgtagcgtttaaggacctcagccaggcccagctccagcactatatgaaagaatccgctcaactgctctcggaaaaaattgcatttaagaccagcgatttctcccggggatcgccaaacgccaagcctaaagtattcacatgtgaggtctttaatgctcattataatttgaccagacatatgcccgtccatactggcgcaagaccatttgtttgcaaagtttgtggtaagggcttccggcaggctagtactctctgtaggcataaaattatccacacacaagagaagcctcacaagtgtaaccaatgcgggaaagccttcaacaggtcaagtacactgaatacacacaccaggatccatgccggttacaagccattcgtgtgtgaattctgtgggaagggctttcatcagaaaggcaactataagaaccataagctgacccactctggagagaaacagtttaaatgcaacatttgtaacaaggcattccaccaggtttataacctcacttttcatatgcacacgcacaacgataagaaacccttcacatgtcctacttgtggaaaggggttctgcaggaacttcgacttgaaaaaacatgttcggaagttgcacgactccagtctcggactggctcgaacgccagctggcgagccaggcacagagcctccccctcctctgccacagcaaccccccatgacattgccaccactgcagccccccctgcccactcctgggcctttgcagcccggcctgcaccagggtcatcagtag

SEQ ID NO: 27836 - DNA, 1428 bp, Artificial Sequence
  derived and/or modified sequence
atggacagcagctgccacaacgccaccaccaagatgctggccaccgcacccgcacgaggtaatatgatgagcacaagtaaacccctggcgtttagcatcgagagaatcatggctcggacccccgagcctaaagctctgccagtgccacacttcttacagggggccctacccaagggcgaacctaagcactctttgcacctcaactccagtattccatgcatgatcccctttgtgcccgttgcctacgacacgtctccaaaggcaggggtgactggttccgagccaagaaaggcctcgctggaggcccctgccgcgcccgcggcggtgccatctgctcctgcattttcttgtagtgacctcttgaattgtgccctgagtctcaaaggggacctggcccgggatgcactgccactgcaacaatataaactcgtacgcccccgggttgtcaatcactcttcattccatgcaatgggggcactgtgctatctgaacagaggcgacggtccctgccaccccgccgccggggttaacatccaccctgtcgcgtcttactttctcagctcacccctccatcctcagcctaaaacctacctggccgaaagaaacaagctggtcgtgcctgcagtcgagaaatatccgagtggggttgcattcaaggatttgagccaggcgcaactacagcactacatgaaggagagcgcccagttgctgtcagagaagatcgccttcaagaccagcgacttttcacgaggaagccccaacgcgaagccgaaggtctttacgtgcgaagtttgtggcaaggtctttaacgctcattacaacttgactcgccacatgccagtacacacaggcgctcgcccctttgtgtgcaaagtgtgtggaaaaggtttccgacaggcgagtaccctctgcaggcataaaattattcatacccaagagaaaccgcacaagtgcaatcagtgcggcaaagctttcaatcggagcagcacactgaacacacataccaggattcacgccgggtacaaacctttcgtctgcgaattttgcgggaagggattccatcagaagggcaattacaaaaatcacaaactgacacacagcggcgaaaagcaattcaagtgcaatatatgcaacaaagcctttcatcaggtgtataacctaacctttcacatgcatacccataatgataagaaaccctttacatgcccaacttgcgggaaaggattttgccgtaactttgatttaaagaagcatgtgcgcaagctgcatgattccagtctggggctagcccgcacgcccgcaggggagcctgggactgagccaccgccccctttgccccagcagccacctatgacgctgcctcctctacagccacctttaccaacaccgggtcccctgcagcctggacttcatcaaggtcatcagtag

SEQ ID NO: 27837 - DNA, 1416 bp, Artificial Sequence
  derived and/or modified sequence
atggactcgtcctgtcataatgctaccaccaagatgcttgctactgcgccagcccgaggtaatatgatgtcgacttctaagccgctggcatttagcattgaaagaattatggccagaacccctgaacctaaagccctgcccgttccacacttcctgcagggagctctgccaaagggcgagcctaagcactccttgcatttgaacagtagcattccatgtatgatccccttcgtgcctgttgcttatgatacgtcacctaaggcaggagtgaccggcagtgagcctaggaaggctagtctggaagctccagcagctccagcggctgtcccttcagcccctgcatttagctgtagtgatctgctaaactgtgcactgagcctgaagggcgatctggctcgggatgcacttcctctgcagcaatataaactggtgaggccccgagtcgtaaaccactcatccttccacgccatgggggcactgtgctatctcaatcgcggagatggaccgtgtcacccagcggctggcgtcaacattcatccggtagcaagctacttcctctcatcccccctccatccccaaccaaagacatatctggccgaaagaaataaattggtggtgcccgcagtggagaagtatccaagcggagtagcctttaaggacctcagtcaggcccagttacaacactatatgaaggagtctgcacagcttctctccgagaagatagcctttaagaccagtgacttctctcgcggttcccctaacgccaaaccgaaggtgttcacatgtgaagtgttcaatgcccattacaacctaacaaggcatatgcctgtccataccggggctcgaccattcgtctgtaaagtatgcggtaagggttttaggcaggccagcactctgtgtcgccataagattatccacacccaggagaagccgcacaaatgcaatcagtgtggcaaggcttttaatcggtcatctaccctgaacactcatacacgaattcatgccggttacaagcctttcgtatgcgaattctgtggcaagggcttccatcagaaggggaattacaaaaatcataaactgacccatagcggagagaaacagtttaagtgcaacatctgtaataaggccttccaccaggtatataacctgaccttccacatgcacacccataatgacaaaaagccttttacatgtcccacttgcgggaaaggattttgtcgaaacttcgatctaaagaaacacgtccgcaaactgcacgatagcagcttaggccttgcccgtactcccgcaggggaaccaggcacggaaccgccaccacctttacctcagcaaccacccatgacactgcccccactgcagccaccccttcccacgcccggacctcttcaacctggcctccatcaaggtcaccagtag

SEQ ID NO: 27838 - DNA, 1428 bp, Artificial Sequence
  derived and/or modified sequence
atggattccagctgccataacgctaccacaaagatgctggctaccgcacccgctaggggaaatatgatgtccacctccaagccacttgctttctctattgaacgcatcatggcccgtacacctgaacccaaagcactgcccgtcccacactttttacagggggcacttcctaaaggtgagcccaagcactctttacacctgaactcatcgattccttgcatgatcccattcgtgcccgtggcttacgacacttcccccaaggccggagtcactggtagtgaaccacgcaaggcgtcacttgaagccccagctgctccagccgcagttccttccgctccagcattttcatgcagtgatctactcaactgcgccctgtcgctgaagggagacctagcgagagacgccctgcctttgcaacagtacaaacttgtccgaccacgcgttgtcaaccattctagcttccatgccatgggcgcactgtgctatttgaatcgcggagatgggccttgccaccctgccgctggtgtgaacatacatccagtggcatcatacttcctgtcatccccactacatcctcagcccaagacctacctggcagaaagaaacaagcttgttgtgcctgcagtggagaagtacccttccggagtcgcgtttaaagatttatcccaggcccaactgcagcactacatgaaagagtccgcgcagcttctgagcgagaagatcgccttcaagaccagtgacttctctcgcggatctccaaacgcgaagcccaaggtgtttacttgcgaagtttgcggtaaggtctttaacgcccactacaacctcacacgacatatgcccgtccacaccggcgctcgccctttcgtttgcaaggtatgcggaaaggggtttcggcaggcttccactctgtgccgccacaaaataatccatacacaagaaaaaccacataagtgtaatcagtgtggaaaagcattcaatagaagcagcacacttaatacacatacacgtattcacgctggctataaaccattcgtttgcgaattttgtgggaagggatttcaccagaaaggaaactataagaatcacaagctcacacacagtggagaaaagcagttcaaatgtaatatttgtaacaaggctttccatcaggtatacaatctgacatttcatatgcatacccacaatgataagaaacccttcacttgcccaacttgtggtaaaggattctgccggaacttcgacctgaagaaacatgttcgcaaattgcatgattccagccttggcctggctagaactccagccggagagcctggcaccgaacctcctcccccactccctcagcagccaccaatgactctgccgcctctgcagccgccacttcccacacccggacctctccagccaggtctgcaccaaggtcatcaatag

SEQ ID NO: 27839 - DNA, 1416 bp, Artificial Sequence
  derived and/or modified sequence
atggacagcagctgccacaacgccaccaccaagatgctggccaccgcccccgccagaggcaacatgatgagcaccagcaagcccctggccttcagcatcgagagaatcatggccagaacccccgagcccaaggccctgcccgtgccccacttcctgcagggcgccctgcccaagggcgagcccaagcacagcctgcacctgaacagcagcatcccctgcatgatccccttcgtgcccgtggcctacgacaccagccccaaggccggcgtgaccggcagcgagcccagaaaggccagcctggaggcccccgccgcccccgccgccgtgcccagcgcccccgccttcagctgcagcgacctgctgaactgcgccctgagcctgaagggcgacctggccagagacgccctgcccctgcagcagtacaagctggtgagacccagagtggtgaaccacagcagcttccacgccatgggcgccctgtgctacctgaacagaggcgacggcccctgccaccccgccgccggcgtgaacatccaccccgtggccagctacttcctgagcagccccctgcacccccagcccaagacctacctggccgagagaaacaagctggtggtgcccgccgtggagaagtaccccagcggcgtggccttcaaggacctgagccaggcccagctgcagcactacatgaaggagagcgcccagctgctgagcgagaagatcgccttcaagaccagcgacttcagcagaggcagccccaacgccaagcccaaggtgttcacctgcgaggtgttcaacgcccactacaacctgaccagacacatgcccgtgcacaccggcgccagacccttcgtgtgcaaggtgtgcggcaagggcttcagacaggccagcaccctgtgcagacacaagatcatccacacccaggagaagccccacaagtgcaaccagtgcggcaaggccttcaacagaagcagcaccctgaacacccacaccagaatccacgccggctacaagcccttcgtgtgcgagttctgcggcaagggcttccaccagaagggcaactacaagaaccacaagctgacccacagcggcgagaagcagttcaagtgcaacatctgcaacaaggccttccaccaggtgtacaacctgaccttccacatgcacacccacaacgacaagaagcccttcacctgccccacctgcggcaagggcttctgcagaaacttcgacctgaagaagcacgtgagaaagctgcacgacagcagcctgggcctggccagaacccccgccggcgagcccggcaccgagccccccccccccctgccccagcagccccccatgaccctgccccccctgcagccccccctgcccacccccggccccctgcagcccggcctgcaccagggccaccagtag

SEQ ID NO: 27840 - DNA, 1428 bp, Artificial Sequence
  derived and/or modified sequence
atggacagcagctgccacaacgccaccaccaagatgctggccaccgcccccgccagaggcaacatgatgagcaccagcaagcccctggccttcagcatcgagagaatcatggccagaacccccgagcccaaggccctgcccgtgccccacttcctgcagggcgccctgcccaagggcgagcccaagcacagcctgcacctgaacagcagcatcccctgcatgatccccttcgtgcccgtggcctacgacaccagccccaaggccggcgtgaccggcagcgagcccagaaaggccagcctggaggcccccgccgcccccgccgccgtgcccagcgcccccgccttcagctgcagcgacctgctgaactgcgccctgagcctgaagggcgacctggccagagacgccctgcccctgcagcagtacaagctggtgagacccagagtggtgaaccacagcagcttccacgccatgggcgccctgtgctacctgaacagaggcgacggcccctgccaccccgccgccggcgtgaacatccaccccgtggccagctacttcctgagcagccccctgcacccccagcccaagacctacctggccgagagaaacaagctggtggtgcccgccgtggagaagtaccccagcggcgtggccttcaaggacctgagccaggcccagctgcagcactacatgaaggagagcgcccagctgctgagcgagaagatcgccttcaagaccagcgacttcagcagaggcagccccaacgccaagcccaaggtgttcacctgcgaggtgtgcggcaaggtgttcaacgcccactacaacctgaccagacacatgcccgtgcacaccggcgccagacccttcgtgtgcaaggtgtgcggcaagggcttcagacaggccagcaccctgtgcagacacaagatcatccacacccaggagaagccccacaagtgcaaccagtgcggcaaggccttcaacagaagcagcaccctgaacacccacaccagaatccacgccggctacaagcccttcgtgtgcgagttctgcggcaagggcttccaccagaagggcaactacaagaaccacaagctgacccacagcggcgagaagcagttcaagtgcaacatctgcaacaaggccttccaccaggtgtacaacctgaccttccacatgcacacccacaacgacaagaagcccttcacctgccccacctgcggcaagggcttctgcagaaacttcgacctgaagaagcacgtgagaaagctgcacgacagcagcctgggcctggccagaacccccgccggcgagcccggcaccgagccccccccccccctgccccagcagccccccatgaccctgccccccctgcagccccccctgcccacccccggccccctgcagcccggcctgcaccagggccaccagtag

SEQ ID NO: 27841 - protein, 139 aa, Artificial Sequence
  derived and/or modified sequence
MDDSKRKAKSFEGNNNYDTPELRTFPALSTRFIRIYPERATHGGLGLRMELLGCEVEAPTAGPTTPNGNLVDECDDDQANCHSGTGDDFQLTGGTTVLATEKPTVIDSTIQSGSRFFKHHHKQQSMRPQNLHHNSILLL

SEQ ID NO: 27842 - protein, 644 aa, Artificial Sequence
  derived and/or modified sequence
MERGLPLLCAVLALVLAPAGAFRNDKCGDTIKIESPGYLTSPGYPHSYHPSEKCEWLIQAPDPYQRIMINFNPHFDLEDRDCKYDYVEVFDGENENGHFRGKFCGKIAPPPVVSSGPFLFIKFVSDYETHGAGFSIRYEIFKRGPECSQNYTTPSGVIKSPGFPEKYPNSLECTYIVFVPKMSEIILEFESFDLEPDSNPPGGMFCRYDRLEIWDGFPDVGPHIGRYCGQKTPGRIRSSSGILSMVFYTDSAIAKEGFSANYSVLQSSVSEDFKCMEALGMESGEIHSDQITASSQYSTNWSAERSRLNYPENGWTPGEDSYREWIQVDLGLLRFVTAVGTQGAISKETKKKYYVKTYKIDVSSNGEDWITIKEGNKPVLFQGNTNPTDVVVAVFPKPLITRFVRIKPATWETGISMRFEVYGCKITDYPCSGMLGMVSGLISDSQITSSNQGDRNWMPENIRLVTSRSGWALPPAPHSYINEWLQIDLGEEKIVRGIIIQGGKHRENKVFMRKFKIGYSNNGSDWKMIMDDSKRKAKSFEGNNNYDTPELRTFPALSTRFIRIYPERATHGGLGLRMELLGCEVEAPTAGPTTPNGNLVDECDDDQANCHSGTGDDFQLTGGTTVLATEKPTVIDSTIQSGIK

SEQ ID NO: 27843 - protein, 100 aa, Artificial Sequence
  derived and/or modified sequence
  misc_feature (1)..(1): Xaa can be any naturally occurring amino acid
XTHGGLGLRMELLGCEVEAPTAGPTTPNGNLVDECDDDQANCHSGTGDDFQLTGGTTVLATEKPTVIDSTIQSGSRFFKHHHKQQSMRPQNLHHNSILLL

SEQ ID NO: 27844 - DNA, 420 bp, Artificial Sequence
  derived and/or modified sequence
atggacgacagcaagagaaaggccaagagcttcgagggcaacaacaactacgacacccccgagctgagaaccttccccgccctgagcaccagattcatcagaatctaccccgagagagccacccacggcggcctgggcctgagaatggagctgctgggctgcgaggtggaggcccccaccgccggccccaccacccccaacggcaacctggtggacgagtgcgacgacgaccaggccaactgccacagcggcaccggcgacgacttccagctgaccggcggcaccaccgtgctggccaccgagaagcccaccgtgatcgacagcaccatccagagcggcagcagattcttcaagcaccaccacaagcagcagagcatgagaccccagaacctgcaccacaacagcatcctgctgctgtag

SEQ ID NO: 27845 - DNA, 1935 bp, Artificial Sequence
  derived and/or modified sequence
atggagagaggcctgcccctgctgtgcgccgtgctggccctggtgctggcccccgccggcgccttcagaaacgacaagtgcggcgacaccatcaagatcgagagccccggctacctgaccagccccggctacccccacagctaccaccccagcgagaagtgcgagtggctgatccaggcccccgacccctaccagagaatcatgatcaacttcaacccccacttcgacctggaggacagagactgcaagtacgactacgtggaggtgttcgacggcgagaacgagaacggccacttcagaggcaagttctgcggcaagatcgcccccccccccgtggtgagcagcggccccttcctgttcatcaagttcgtgagcgactacgagacccacggcgccggcttcagcatcagatacgagatcttcaagagaggccccgagtgcagccagaactacaccacccccagcggcgtgatcaagagccccggcttccccgagaagtaccccaacagcctggagtgcacctacatcgtgttcgtgcccaagatgagcgagatcatcctggagttcgagagcttcgacctggagcccgacagcaacccccccggcggcatgttctgcagatacgacagactggagatctgggacggcttccccgacgtgggcccccacatcggcagatactgcggccagaagacccccggcagaatcagaagcagcagcggcatcctgagcatggtgttctacaccgacagcgccatcgccaaggagggcttcagcgccaactacagcgtgctgcagagcagcgtgagcgaggacttcaagtgcatggaggccctgggcatggagagcggcgagatccacagcgaccagatcaccgccagcagccagtacagcaccaactggagcgccgagagaagcagactgaactaccccgagaacggctggacccccggcgaggacagctacagagagtggatccaggtggacctgggcctgctgagattcgtgaccgccgtgggcacccagggcgccatcagcaaggagaccaagaagaagtactacgtgaagacctacaagatcgacgtgagcagcaacggcgaggactggatcaccatcaaggagggcaacaagcccgtgctgttccagggcaacaccaaccccaccgacgtggtggtggccgtgttccccaagcccctgatcaccagattcgtgagaatcaagcccgccacctgggagaccggcatcagcatgagattcgaggtgtacggctgcaagatcaccgactacccctgcagcggcatgctgggcatggtgagcggcctgatcagcgacagccagatcaccagcagcaaccagggcgacagaaactggatgcccgagaacatcagactggtgaccagcagaagcggctgggccctgccccccgccccccacagctacatcaacgagtggctgcagatcgacctgggcgaggagaagatcgtgagaggcatcatcatccagggcggcaagcacagagagaacaaggtgttcatgagaaagttcaagatcggctacagcaacaacggcagcgactggaagatgatcatggacgacagcaagagaaaggccaagagcttcgagggcaacaacaactacgacacccccgagctgagaaccttccccgccctgagcaccagattcatcagaatctaccccgagagagccacccacggcggcctgggcctgagaatggagctgctgggctgcgaggtggaggcccccaccgccggccccaccacccccaacggcaacctggtggacgagtgcgacgacgaccaggccaactgccacagcggcaccggcgacgacttccagctgaccggcggcaccaccgtgctggccaccgagaagcccaccgtgatcgacagcaccatccagagcggcatcaagtag

SEQ ID NO: 27846 - DNA, 303 bp, Artificial Sequence
  derived and/or modified sequence
tgaacccacggcggcctgggcctgagaatggagctgctgggctgcgaggtggaggcccccaccgccggccccaccacccccaacggcaacctggtggacgagtgcgacgacgaccaggccaactgccacagcggcaccggcgacgacttccagctgaccggcggcaccaccgtgctggccaccgagaagcccaccgtgatcgacagcaccatccagagcggcagcagattcttcaagcaccaccacaagcagcagagcatgagaccccagaacctgcaccacaacagcatcctgctgctgtag

SEQ ID NO: 27847 - DNA, 420 bp, Artificial Sequence
  derived and/or modified sequence
atggacgacagcaaacgtaaagcaaagagcttcgaagggaataacaactatgacacacccgaactgcggacattcccggctttgtcaacaagattcatccgaatataccctgagcgggccacccacggcggcctgggtctcaggatggaactgttaggctgtgaggttgaggcacccaccgctggacccaccactccaaacggaaacctggtcgacgagtgcgatgacgaccaggctaattgtcacagtggaactggagatgatttccagctcactggaggaactacagtcctagctacagagaaacccactgtgatcgactccacaatccagtcaggttcccgctttttcaagcaccatcataagcagcagtccatgcgacctcagaatctccatcacaactctatactgttgctctag

SEQ ID NO: 27848 - DNA, 1935 bp, Artificial Sequence
  derived and/or modified sequence
atggagcgtgggcttcctcttctctgcgccgtgctcgctctcgttttagcacccgcgggagcgttccgaaacgataaatgtggagatactattaagatagagagtcctggatacctcacaagtccgggttaccctcactcttatcatccgagcgaaaaatgtgaatggttgatccaagctcccgatccgtatcagaggatcatgatcaattttaacccccacttcgatctggaggatcgtgactgtaaatacgattatgtggaagtgttcgacggcgaaaacgagaatggacactttagaggcaagttctgtggaaaaatcgcacctccaccagtggtgtcttcggggcccttcctcttcatcaaatttgtgtctgactatgaaacacacggagcaggcttctctatcaggtacgaaatctttaaacgtggacccgagtgttctcagaactatactacaccctctggcgttattaagtcccctggctttcctgaaaagtatccgaactcgctcgagtgcacgtatatcgtgttcgttccgaagatgtctgagatcatcctggaattcgagagttttgacttggagccggattcgaatcctccaggtggaatgttttgccggtacgacagactggagatctgggacggctttcccgacgtgggcccccacatcggccgttactgcggccaaaaaactcccggaaggataagatcgtcttcagggatcctatctatggtgttctacactgattcggctatcgctaaggagggcttctccgctaactattccgtcctccagtcaagtgtgtccgaggattttaagtgcatggaggctctgggtatggaatccggcgaaatccattcagatcagatcacagcttcgtctcaatatagtacaaattggagcgcagaacggtcccggctgaactatccagaaaatggctggaccccaggcgaggattcttatcgagaatggatccaggtggatttaggattgctaaggtttgtcaccgcagttggcacccagggtgccataagtaaggagactaaaaaaaaatactatgtgaaaacatataagatagacgtgtcgtctaatggcgaggactggattacaattaaagagggcaacaagcccgtgcttttccaagggaacacaaacccaactgacgtagtggtggccgtgttcccaaaaccactcattacccggtttgttcgtataaagccggcaacctgggaaaccggcatctcaatgagatttgaagtatatggttgcaaaattaccgattacccttgcagcggcatgcttgggatggtatctggactcatcagcgactctcagatcacaagctcaaatcaaggtgaccgcaactggatgccagagaatatccggctggtgacaagccgatcgggatgggccctgccccctgccccccactcttatatcaatgagtggttgcagattgacctgggagaagagaaaatcgtgagaggaataatcatacagggaggtaagcacagggaaaataaggtatttatgagaaaatttaagattgggtatagcaacaacggtagtgattggaagatgataatggatgattccaaaagaaaggccaaatcctttgaaggtaataacaattatgatacaccggagctccgcacgtttccagctctgtctacacggttcattcggatatatccagagcgggccacacatggagggctgggacttaggatggaacttctcggttgcgaggtggaggcgcctactgctgggccgacgacacccaacggaaacctggtcgatgaatgcgacgacgatcaagcaaattgccactccggtacaggagatgacttccagctgacaggcgggacaacagttttagcaacggagaagccaaccgtcattgactctaccatccagagtggcatcaaatag

SEQ ID NO: 27849 - DNA, 303 bp, Artificial Sequence
  derived and/or modified sequence
tagacccatggtgggctgggtcttcgcatggagctgctgggctgcgaagtggaggccccgaccgcaggcccaactactcccaacggaaatttggtcgatgagtgtgatgatgaccaggccaattgtcactcaggaacaggcgatgactttcagttgacaggggggaccactgtgctagctaccgagaagccaacagtaattgactctaccattcagagcgggagtcggttctttaaacaccatcacaaacagcagtctatgagacctcagaacctgcaccataactccatactgttgctgtag

SEQ ID NO: 27850 - DNA, 420 bp, Artificial Sequence
  derived and/or modified sequence
atggatgacagcaagaggaaggccaagagctttgagggcaacaacaactatgacaccccagagctgcggaccttccctgccctgagcacccgcttcatccgcatctacccagagcgggccacccacggcggcctgggcctgaggatggagctgctgggctgtgaggtggaggcccccacagctggccccaccaccccaaatggaaacctggtggatgaatgtgatgatgaccaggccaactgccacagcggcactggagatgacttccagctgaccggcggcaccaccgtgctggccacagagaagcccaccgtcatcgacagcaccatccagagcggcagccgcttcttcaagcaccaccacaagcagcagagcatgaggccccagaacctgcaccacaacagcatcctgctgctgtag

SEQ ID NO: 27851 - DNA, 1935 bp, Artificial Sequence
  derived and/or modified sequence
atggagcggggcctgcccctgctgtgtgctgtgctggccctggtgctggccccagctggggccttcagaaatgacaagtgtggggacaccatcaagattgagagccctggctacctgaccagccctggctacccccacagctaccaccccagcgagaagtgtgagtggctgatccaggccccagacccctaccagaggatcatgatcaacttcaacccccactttgacctggaggaccgggactgcaagtatgactatgtggaggtgtttgatggagaaaatgaaaatggccacttccggggcaagttctgtgggaagatcgcccctcctcctgtggtgagcagcggccccttcctgttcatcaagtttgtgtctgactatgagacccacggggccggcttcagcatccgctatgagatcttcaagaggggccctgagtgcagccagaactacaccaccccatctggagtcatcaagagccctggcttccctgagaagtaccccaacagcctggagtgcacctacatcgtgtttgtgcccaagatgtctgagatcatcctggagtttgagagctttgacctggagccagacagcaaccccccaggcggcatgttctgccgctatgaccggctggagatctgggatggcttcccagatgtgggcccccacatcggccgctactgcggccagaagaccccaggccgcatccgcagcagcagcggcatcctgtccatggtgttctacacagattctgccatcgccaaggagggcttcagcgccaactacagcgtgctgcagagctctgtgtctgaggacttcaagtgcatggaggccctgggcatggagagcggggagatccacagcgaccagatcacagccagcagccagtacagcaccaactggagcgctgagaggagccggctgaactacccagaaaatggctggaccccaggagaagattcctaccgggagtggatccaggtggacctgggcctgctgcgctttgtgacagctgtgggcacccagggcgccatcagcaaggagaccaagaagaagtactacgtgaagacctacaagattgatgtgagcagcaatggagaggactggatcaccatcaaggagggcaacaagcctgtgctcttccagggcaacaccaaccccacagatgtggtggtggccgtgttccccaagcccctcatcaccaggtttgtgcgcatcaagccagccacctgggagaccggcatctccatgagatttgaggtgtatggctgcaagatcacagactacccctgcagcggcatgctgggcatggtgtctggcctcatcagtgacagccagatcaccagcagcaaccagggcgacaggaactggatgcctgagaacatccggctggtgaccagccgcagcggctgggccctgcccccagccccccacagctacatcaatgagtggctgcagattgacctgggggaggagaagatcgtgcggggcatcatcatccagggcggcaagcaccgggagaacaaggtgttcatgaggaagttcaagattggctacagcaacaacggcagtgactggaagatgatcatggatgacagcaagaggaaggccaagagctttgagggcaacaacaactatgacaccccagagctgcggaccttccctgccctgagcacccgcttcatccgcatctacccagagcgggccacccatggaggcctgggcctgaggatggagctgctgggctgtgaggtggaggcccccacagctggccccaccacccccaacggcaacctggtggatgaatgtgatgatgaccaggccaactgccacagcggcactggagatgacttccagctgactggaggcaccaccgtgctggccacagagaagcccaccgtgattgacagcaccatccagagcggcatcaagtag

SEQ ID NO: 27852 - DNA, 303 bp, Artificial Sequence
  derived and/or modified sequence
tgaacacatggaggcctgggcctgaggatggagctgctgggctgtgaggtggaggcccccacagctggccccaccacccccaacggcaacctggtggatgaatgtgatgatgaccaggccaactgccacagcggcactggagatgacttccagctgactggaggcaccaccgtgctggccacagagaagcccaccgtgattgacagcaccatccagagcggcagccgcttcttcaagcaccaccacaagcagcagagcatgaggccccagaacctgcaccacaacagcatcctgctgctgtag

SEQ ID NO: 27853 - DNA, 420 bp, Artificial Sequence
  derived and/or modified sequence
atggacgacagcaagcggaaggccaagagcttcgagggcaacaacaattacgacacaccagagctgaggaccttccccgctctcagcacacggtttatccggatctacccggagagagcaacacacggcggtctggggctgagaatggaacttcttggctgcgaagtcgaagccccaactgcaggccccaccactcccaacgggaatctggttgacgagtgcgatgacgatcaggctaactgccatagtggcaccggcgacgatttccagcttacaggtggcaccacagtcctggctactgagaaaccaactgtgattgatagcacgattcaatcaggatcccggttttttaagcaccaccacaaacaacaaagtatgcgcccacaaaacctgcatcataattccattctcctcctctag

SEQ ID NO: 27854 - DNA, 1935 bp, Artificial Sequence
  derived and/or modified sequence
atggagcggggcctgcccctgctgtgcgccgtgctggccctggtgctggcaccggctggcgccttccggaatgataaatgtggcgacaccataaaaattgagtccccaggatacctgacatctcccggttatccccactcttatcacccctctgagaagtgcgaatggctgatccaagcacctgacccctaccagagaattatgattaacttcaatccacatttcgatttagaagatcgggattgtaagtatgattacgtcgaagtcttcgacggcgagaatgaaaacggacacttccgaggcaagttctgtggcaagattgcccccccacccgtggtctcgtccgggcccttcctttttatcaagtttgtgagcgactatgaaactcatggcgccggtttttccatccgatacgagatcttcaaacgcgggccagaatgctcacagaattacaccaccccgagtggagtgatcaagtcacctggatttcctgagaagtacccaaattctctggagtgtacatacatcgtgttcgttcccaagatgtccgaaatcatcctcgagttcgagtcttttgacctggagccagatagcaatccgccaggcggaatgttctgcagatatgaccgcttggaaatttgggacggctttccagatgtgggaccccatataggacgttactgtggacagaaaaccccgggccggatccgatcgtccagcggaatactgtcaatggtgttttataccgacagcgcaatcgccaaggaggggttttctgccaattactcagtgctacagtcttccgtgtctgaagatttcaagtgtatggaggcgctgggaatggagagtggcgagattcatagtgaccagataactgcatccagtcagtattctacaaattggtcagcagagcggtcgcgtctgaattatcctgaaaacggttggactccaggtgaggactcttatcgcgagtggatccaggtcgacctgggtctgctcaggttcgtgaccgccgtgggcacacagggtgctatatcgaaggagactaagaagaagtactatgtcaagacttataaaatcgatgtttcatcaaatggagaagattggattacaattaaggaggggaataaacctgtcctcttccagggaaacacaaaccccactgacgtcgtggtcgctgtgtttccaaagcctctgataacccggttcgtccgcatcaagccggccacgtgggaaaccggtatcagcatgcgattcgaagtgtacggatgcaagatcactgattacccatgcagcggcatgctcggcatggtgagtggcctcatttccgacagccagataaccagctctaaccagggggacagaaattggatgcccgagaacatccggctggttacatctaggagtggttgggcgcttcccccagctcctcactcatatattaacgagtggctccaaattgacctcggagaggaaaagatcgtcagaggaatcataatccagggtggtaagcatagggaaaacaaggtgttcatgcgcaaattcaagatcgggtactcgaataacggctccgactggaagatgataatggatgactctaagcgtaaggcgaagagtttcgagggaaacaataattacgacaccccagaacttagaacgttcccagccctcagcactagattcatccgcatctaccctgagagagctactcatggaggccttggactgcggatggaactgttgggttgcgaagttgaagccccaaccgccggtccgaccactccaaatggcaacctcgtcgacgagtgtgatgacgatcaggccaactgtcattcggggacaggagatgatttccaactgaccggaggcactacagtgctcgccaccgagaaaccaacagtcattgatagtacaattcagtccggcattaaatag

SEQ ID NO: 27855 - DNA, 303 bp, Artificial Sequence
  derived and/or modified sequence
tgaacccacggcggcctgggcctgcggatggagctgctgggctgcgaagtagaagccccaaccgctggacccactacacccaatgggaatctcgtggacgagtgcgatgacgatcaggccaactgccatagcggaactggagacgacttccagcttaccgggggaaccaccgtgctggccaccgagaaacctactgtgattgactccacaatccaaagtggcagcagattttttaaacaccaccataaacagcagtccatgcggcctcagaacttgcaccataactcaatcctgctgctctag

SEQ ID NO: 27856 - DNA, 2007 bp, Artificial Sequence
  derived and/or modified sequence
atggagagggggctgccgctcctctgcgccgtgctcgccctcgtcctcgccccggccggcgcttttcgcaacgataaatgtggcgatactataaaaattgaaagccccgggtaccttacatctcctggttatcctcattcttatcacccaagtgaaaaatgcgaatggctgattcaggctccggacccataccagagaattatgatcaacttcaaccctcacttcgatttggaggacagagactgcaagtatgactacgtggaagtcttcgatggagaaaatgaaaatggacattttaggggaaagttctgtggaaagatagcccctcctcctgttgtgtcttcagggccatttctttttatcaaatttgtctctgactacgaaacacatggtgcaggattttccatacgttatgaaattttcaagagaggtcctgaatgttcccagaactacacaacacctagtggagtgataaagtcccccggattccctgaaaaatatcccaacagccttgaatgcacttatattgtctttgtgccaaagatgtcagagattatcctggaatttgaaagctttgacctggagcctgactcaaatcctccaggggggatgttctgtcgctacgaccggctagaaatctgggatggattccctgatgttggccctcacattgggcgttactgtggacagaaaacaccaggtcgaatccgatcctcatcgggcattctctccatggttttttacaccgacagcgcgatagcaaaagaaggtttctcagcaaactacagtgtcttgcagagcagtgtctcagaagatttcaaatgtatggaagctctgggcatggaatcaggagaaattcattctgaccagatcacagcttcttcccagtatagcaccaactggtctgcagagcgctcccgcctgaactaccctgagaatgggtggactcccggagaggattcctaccgagagtggatacaggtagacttgggccttctgcgctttgtcacggctgtcgggacacagggcgccatttcaaaagaaaccaagaagaaatattatgtcaagacttacaagatcgacgttagctccaacggggaagactggatcaccataaaagaaggaaacaaacctgttctctttcagggaaacaccaaccccacagatgttgtggttgcagtattccccaaaccactgataactcgatttgtccgaatcaagcctgcaacttgggaaactggcatatctatgagatttgaagtatacggttgcaagataacagattatccttgctctggaatgttgggtatggtgtctggacttatttctgactcccagatcacatcatccaaccaaggggacagaaactggatgcctgaaaacatccgcctggtaaccagtcgctctggctgggcacttccacccgcacctcattcctacatcaatgagtggctccaaatagacctgggggaggagaagatcgtgaggggcatcatcattcagggtgggaagcaccgagagaacaaggtgttcatgaggaagttcaagatcgggtacagcaacaacggctcggactggaagatgatcatggatgacagcaaacgcaaggcgaagtcttttgagggcaacaacaactatgatacacctgagctgcggacttttccagctctctccacgcgattcatcaggatctaccccgagagagccactcatggcggactggggctcagaatggagctgctgggctgtgaagtggaagcccctacagctggaccgaccactcccaacgggaacttggtggatgaatgtgatgacgaccaggccaactgccacagtggaacaggtgatgacttccagctcacaggtggcaccactgtgctggccacagaaaagcccacggtcatagacagcaccatacaatcaggctccagattcttcaagcatcatcacaagcagcagtcaatgagacctcaaaaccttcatcataattccattttgctattatag

SEQ ID NO: 27857 - DNA, 2213 bp, Artificial Sequence
  derived and/or modified sequence
ggaagaggaacaagtgtgggaaaagggagaggaagccggagctaaatgacaggatgcaggcgacttgagacacaaaaagagaagcgttcctctcggatccaggcattgcctcgctgctttcttttctccaagacgggctgaggattgtacagctctaggcggagttggggctcttcggatcgcttagattctcctctttgctgcatttccccccacgtcctcgttctcccgcgtctgcctgcggacccggagaagggagaatggagagggggctgccgctcctctgcgccgtgctcgccctcgtcctcgccccggccggcgcttttcgcaacgataaatgtggcgatactataaaaattgaaagccccgggtaccttacatctcctggttatcctcattcttatcacccaagtgaaaaatgcgaatggctgattcaggctccggacccataccagagaattatgatcaacttcaaccctcacttcgatttggaggacagagactgcaagtatgactacgtggaagtcttcgatggagaaaatgaaaatggacattttaggggaaagttctgtggaaagatagcccctcctcctgttgtgtcttcagggccatttctttttatcaaatttgtctctgactacgaaacacatggtgcaggattttccatacgttatgaaattttcaagagaggtcctgaatgttcccagaactacacaacacctagtggagtgataaagtcccccggattccctgaaaaatatcccaacagccttgaatgcacttatattgtctttgtgccaaagatgtcagagattatcctggaatttgaaagctttgacctggagcctgactcaaatcctccaggggggatgttctgtcgctacgaccggctagaaatctgggatggattccctgatgttggccctcacattgggcgttactgtggacagaaaacaccaggtcgaatccgatcctcatcgggcattctctccatggttttttacaccgacagcgcgatagcaaaagaaggtttctcagcaaactacagtgtcttgcagagcagtgtctcagaagatttcaaatgtatggaagctctgggcatggaatcaggagaaattcattctgaccagatcacagcttcttcccagtatagcaccaactggtctgcagagcgctcccgcctgaactaccctgagaatgggtggactcccggagaggattcctaccgagagtggatacaggtagacttgggccttctgcgctttgtcacggctgtcgggacacagggcgccatttcaaaagaaaccaagaagaaatattatgtcaagacttacaagatcgacgttagctccaacggggaagactggatcaccataaaagaaggaaacaaacctgttctctttcagggaaacaccaaccccacagatgttgtggttgcagtattccccaaaccactgataactcgatttgtccgaatcaagcctgcaacttgggaaactggcatatctatgagatttgaagtatacggttgcaagataacagattatccttgctctggaatgttgggtatggtgtctggacttatttctgactcccagatcacatcatccaaccaaggggacagaaactggatgcctgaaaacatccgcctggtaaccagtcgctctggctgggcacttccacccgcacctcattcctacatcaatgagtggctccaaatagacctgggggaggagaagatcgtgaggggcatcatcattcagggtgggaagcaccgagagaacaaggtgttcatgaggaagttcaagatcgggtacagcaacaacggctcggactggaagatgatcatggatgacagcaaacgcaaggcgaagtcttttgagggcaacaacaactatgatacacctgagctgcggacttttccagctctctccacgcgattcatcaggatctaccccgagagagccactcatggcggactggggctcagaatggagctgctgggctgtgaagtggaagcccctacagctggaccgaccactcccaacgggaacttggtggatgaatgtgatgacgaccaggccaactgccacagtggaacaggtgatgacttccagctcacaggtggcaccactgtgctggccacagaaaagcccacggtcatagacagcaccatacaatcaggtatcaaataaaatacgaaatgtgacaga

SEQ ID NO: 27858 - DNA, 372 bp, Artificial Sequence
  derived and/or modified sequence
ccactcatggcggactggggctcagaatggagctgctgggctgtgaagtggaagcccctacagctggaccgaccactcccaacgggaacttggtggatgaatgtgatgacgaccaggccaactgccacagtggaacaggtgatgacttccagctcacaggtggcaccactgtgctggccacagaaaagcccacggtcatagacagcaccatacaatcaggctccagattcttcaagcatcatcacaagcagcagtcaatgagacctcaaaaccttcatcataattccattttgctattatagactcaactcagagtcttactatttcatcttgctgattctcatcaatataataaactccatgggcatataa

SEQ ID NO: 27859 - DNA, 420 bp, Artificial Sequence
  derived and/or modified sequence
atggatgatagcaagcgtaaagctaaaagtttcgaggggaataataattatgatacaccagaacttcgtacctttcctgctctgtctactagattcattaggatctaccctgaacgcgcaacgcacggcggtctggggctgcggatggagctgcttgggtgtgaagtcgaagccccaactgccggtccaacgactcctaatgggaatctggtcgatgaatgtgacgacgaccaagccaactgtcattctggcaccggtgatgattttcaacttaccgggggaaccacagtattagcgactgagaagcccacagtgatcgacagtacaatccagagtggttccagattttttaagcaccatcacaaacagcagagcatgaggccgcagaatttgcaccacaattcaatactactgctctag

SEQ ID NO: 27860 - DNA, 1935 bp, Artificial Sequence
  derived and/or modified sequence
atggaaagagggctacctttactgtgcgctgtacttgctttagttctcgctccagccggtgcgtttcgaaatgacaaatgcggggacaccatcaagatcgaaagtccaggatacctgacgtctcccggatatccccactcttaccacccctctgagaaatgtgaatggttgattcaggccccagacccttatcagcggatcatgatcaacttcaacccccactttgatttggaggaccgcgattgcaagtatgactacgtcgaggtctttgacggtgaaaatgagaacggacactttaggggaaaattttgcggaaagatcgccccaccaccagtcgtgtctagtggcccatttctgttcatcaagtttgtctccgattacgagacgcatggtgctggcttcagcatcagatatgagatcttcaagcggggtcccgagtgcagtcaaaattacactacacccagcggggtcattaagagccctggctttccagagaagtaccctaacagcttggagtgcacctatatagtgtttgtccccaaaatgtcagaaataatcctagagttcgaaagttttgacttagaacccgactcgaatccgccaggtggaatgttctgtcgctacgaccggctggaaatctgggatggattccccgacgtgggccctcacatcgggcgttattgcgggcagaaaactccaggtcgcatccgctctagcagtggcatcctgagtatggtcttctataccgactccgctatcgctaaggagggcttcagcgccaactactcagtcttgcagagcagcgtgtccgaggacttcaaatgtatggaggcccttgggatggagtcaggcgaaattcactcggatcaaattaccgcatcaagccaatacagtacgaattggagcgctgagcgatctcggttaaattacccagagaacggctggaccccaggagaagacagctacagagagtggatacaggtcgatttaggcctgttgcgatttgttaccgctgtcgggactcaaggagctatctcgaaggaaacgaagaaaaagtattatgtgaaaacttacaagattgatgtctcttccaacggggaggactggatcaccattaaagagggcaataagccagtgttattccagggcaatactaatcccacggatgtcgtggtcgctgtcttccctaaaccacttataacccgatttgtacgaattaaacctgcaacgtgggagaccggcataagcatgcgcttcgaggtatacgggtgtaagatcaccgactacccatgctctggcatgcttggtatggtgtctggactaatcagtgattcccagatcacatcctccaaccagggggaccgtaactggatgcccgaaaatatcaggctggtgacttcaagatccggatgggcactccccccagctccgcattcttatataaacgagtggttacagatcgatcttggggaggaaaagattgtgcgcggaattattatacaggggggaaagcatagagagaataaagtgttcatgcgcaagtttaaaatagggtatagtaataacggtagtgattggaaaatgatcatggatgactctaagaggaaggccaagagttttgaagggaataataactacgatactcctgagctgaggactttccccgctctttcaacccggtttattcggatttacccagagagagccacccacggtggcctgggactcaggatggagttattgggttgtgaagtggaagctcctacagccggtcccacaacacctaacggaaatctcgtggacgagtgtgacgatgaccaggccaactgccattccggcactggcgacgattttcagctgacaggcggaacaacagtcctggccactgaaaaacccactgtgatcgatagcactatccagtcaggtatcaagtag

SEQ ID NO: 27861 - DNA, 303 bp, Artificial Sequence
  derived and/or modified sequence
tgaacgcacgggggattgggccttcgcatggagttgctaggctgcgaggtggaggcccctactgctgggccaaccacgcctaacggtaacctagttgatgagtgcgatgatgatcaagccaactgtcattcgggcaccggggatgatttccaacttaccgggggtaccacagtcttggctaccgagaagccgactgtcatcgactccacaattcagtccgggtcaaggttctttaagcatcaccataaacagcaatccatgcgaccacagaaccttcaccacaatagcatacttttgctgtag

SEQ ID NO: 27862 - protein, 609 aa, Artificial Sequence
  derived and/or modified sequence
MERGLPLLCAVLALVLAPAGAFRNDKCGDTIKIESPGYLTSPGYPHSYHPSEKCEWLIQAPDPYQRIMINFNPHFDLEDRDCKYDYVEVFDGENENGHFRGKFCGKIAPPPVVSSGPFLFIKFVSDYETHGAGFSIRYEIFKRGPECSQNYTTPSGVIKSPGFPEKYPNSLECTYIVFVPKMSEIILEFESFDLEPDSNPPGGMFCRYDRLEIWDGFPDVGPHIGRYCGQKTPGRIRSSSGILSMVFYTDSAIAKEGFSANYSVLQSSVSEDFKCMEALGMESGEIHSDQITASSQYSTNWSAERSRLNYPENGWTPGEDSYREWIQVDLGLLRFVTAVGTQGAISKETKKKYYVKTYKIDVSSNGEDWITIKEGNKPVLFQGNTNPTDVVVAVFPKPLITRFVRIKPATWETGISMRFEVYGCKITDYPCSGMLGMVSGLISDSQITSSNQGDRNWMPENIRLVTSRSGWALPPAPHSYINEWLQIDLGEEKIVRGIIIQGGKHRENKVFMRKFKIGYSNNGSDWKMIMDDSKRKAKSFEGNNNYDTPELRTFPALSTRFIRIYPERATHGGLGLRMELLGCEVEGGTTVLATEKPTVIDSTIQSGIK

SEQ ID NO: 27863 - DNA, 567 bp, Artificial Sequence
  derived and/or modified sequence
atgagcgagatcatcctggagttcgagagcttcgacctggagcccgacagcaacccccccggcggcatgttctgcagatacgacagactggagatctgggacggcttccccgacgtgggcccccacatcggcagatactgcggccagaagacccccggcagaatcagaagcagcagcggcatcctgagcatggtgttctacaccgacagcgccatcgccaaggagggcttcagcgccaactacagcgtgctgcagagcagcgtgagcgaggacttcaagtgcatggaggccctgggcatggagagcggcgagatccacagcgaccagatcaccgccagcagccagtacagcaccaactggagcgccgagagaagcagactgaactaccccgagaacggctggacccccggcgaggacagctacagagagtggatccaggacgccaagtacagactgagagtgagcgtggtgagaagcaagagcagcagcagcagcaccagcctggagcccagacccctgagcagcctgaagctgagcttcttcagctacaagatcaagatcacctag

SEQ ID NO: 27864 - DNA, 1830 bp, Artificial Sequence
  derived and/or modified sequence
atggagagaggcctgcccctgctgtgcgccgtgctggccctggtgctggcccccgccggcgccttcagaaacgacaagtgcggcgacaccatcaagatcgagagccccggctacctgaccagccccggctacccccacagctaccaccccagcgagaagtgcgagtggctgatccaggcccccgacccctaccagagaatcatgatcaacttcaacccccacttcgacctggaggacagagactgcaagtacgactacgtggaggtgttcgacggcgagaacgagaacggccacttcagaggcaagttctgcggcaagatcgcccccccccccgtggtgagcagcggccccttcctgttcatcaagttcgtgagcgactacgagacccacggcgccggcttcagcatcagatacgagatcttcaagagaggccccgagtgcagccagaactacaccacccccagcggcgtgatcaagagccccggcttccccgagaagtaccccaacagcctggagtgcacctacatcgtgttcgtgcccaagatgagcgagatcatcctggagttcgagagcttcgacctggagcccgacagcaacccccccggcggcatgttctgcagatacgacagactggagatctgggacggcttccccgacgtgggcccccacatcggcagatactgcggccagaagacccccggcagaatcagaagcagcagcggcatcctgagcatggtgttctacaccgacagcgccatcgccaaggagggcttcagcgccaactacagcgtgctgcagagcagcgtgagcgaggacttcaagtgcatggaggccctgggcatggagagcggcgagatccacagcgaccagatcaccgccagcagccagtacagcaccaactggagcgccgagagaagcagactgaactaccccgagaacggctggacccccggcgaggacagctacagagagtggatccaggtggacctgggcctgctgagattcgtgaccgccgtgggcacccagggcgccatcagcaaggagaccaagaagaagtactacgtgaagacctacaagatcgacgtgagcagcaacggcgaggactggatcaccatcaaggagggcaacaagcccgtgctgttccagggcaacaccaaccccaccgacgtggtggtggccgtgttccccaagcccctgatcaccagattcgtgagaatcaagcccgccacctgggagaccggcatcagcatgagattcgaggtgtacggctgcaagatcaccgactacccctgcagcggcatgctgggcatggtgagcggcctgatcagcgacagccagatcaccagcagcaaccagggcgacagaaactggatgcccgagaacatcagactggtgaccagcagaagcggctgggccctgccccccgccccccacagctacatcaacgagtggctgcagatcgacctgggcgaggagaagatcgtgagaggcatcatcatccagggcggcaagcacagagagaacaaggtgttcatgagaaagttcaagatcggctacagcaacaacggcagcgactggaagatgatcatggacgacagcaagagaaaggccaagagcttcgagggcaacaacaactacgacacccccgagctgagaaccttccccgccctgagcaccagattcatcagaatctaccccgagagagccacccacggcggcctgggcctgagaatggagctgctgggctgcgaggtggagggcggcaccaccgtgctggccaccgagaagcccaccgtgatcgacagcaccatccagagcggcatcaagtag

SEQ ID NO: 27865 - DNA, 711 bp, Artificial Sequence
  derived and/or modified sequence
gtggacctgggcctgctgagattcgtgaccgccgtgggcacccagggcgccatcagcaaggagaccaagaagaagtactacgtgaagacctacaagatcgacgtgagcagcaacggcgaggactggatcaccatcaaggagggcaacaagcccgtgctgttccagggcaacaccaaccccaccgacgtggtggtggccgtgttccccaagcccctgatcaccagattcgtgagaatcaagcccgccacctgggagaccggcatcagcatgagattcgaggtgtacggctgcaagatcaccgactacccctgcagcggcatgctgggcatggtgagcggcctgatcagcgacagccagatcaccagcagcaaccagggcgacagaaactggatgcccgagaacatcagactggtgaccagcagaagcggctgggccctgccccccgccccccacagctacatcaacgagtggctgcagatcgacctgggcgaggagaagatcgtgagaggcatcatcatccagggcggcaagcacagagagaacaaggtgttcatgagaaagttcaagatcggctacagcaacaacggcagcgactggaagatgatcatggacgacagcaagagaaaggccaaggtgagagccggcgactgggaggaggtgatcccctacgtgctggacttcaaccagggccccctggccttcagcagatag

SEQ ID NO: 27866 - DNA, 513 bp, Artificial Sequence
  derived and/or modified sequence
tgacccggcggcatgttctgcagatacgacagactggagatctgggacggcttccccgacgtgggcccccacatcggcagatactgcggccagaagacccccggcagaatcagaagcagcagcggcatcctgagcatggtgttctacaccgacagcgccatcgccaaggagggcttcagcgccaactacagcgtgctgcagagcagcgtgagcgaggacttcaagtgcatggaggccctgggcatggagagcggcgagatccacagcgaccagatcaccgccagcagccagtacagcaccaactggagcgccgagagaagcagactgaactaccccgagaacggctggacccccggcgaggacagctacagagagtggatccaggacgccaagtacagactgagagtgagcgtggtgagaagcaagagcagcagcagcagcaccagcctggagcccagacccctgagcagcctgaagctgagcttcttcagctacaagatcaagatcacctag

SEQ ID NO: 27867 - DNA, 567 bp, Artificial Sequence
  derived and/or modified sequence
atgtccgagataatactcgaattcgagagctttgacctcgagccggacagcaatccacccgggggcatgttttgtagatatgaccgcctagagatctgggatgggtttcccgacgtcggcccccacattggacgctactgtggacagaagacacccgggcgcataagatcgtcatctggaattctcagcatggtgttctacacggattcggcaattgcgaaggagggcttttccgctaactacagtgtgctgcaaagcagtgtgtccgaagacttcaagtgcatggaagcactgggcatggagtccggggaaatccacagtgaccaaataacggcttcttctcaatatagtactaattggtccgcggagaggtctaggctgaactaccctgaaaacggctggacacccggcgaggactcctacagagagtggatccaggacgccaagtaccgactcagggttagcgtcgtgagatccaagagttcctccagttcaactagtctggagcctaggcctttgtcctctttgaagctttcttttttttcctataagattaaaattacatag

SEQ ID NO: 27868 - DNA, 1830 bp, Artificial Sequence
  derived and/or modified sequence
atggagagagggctgccgctgctctgtgcagtgctggccttagtgctggcacccgcaggagcattccgcaatgacaagtgcggcgatacaattaagattgaaagtccggggtacttaacctccccaggttatccccatagctaccatccgtcagagaaatgcgagtggctgatccaggctcccgacccttatcagcggataatgattaatttcaaccctcattttgatctcgaagacagggactgtaagtatgactacgtggaagtcttcgacggcgaaaatgagaatggacattttagaggcaagttctgtggaaagatagccccaccacctgtagtgtcaagtggaccattcctgtttatcaagtttgtctccgactatgaaacgcatggggcaggattctcgattagatacgagatttttaagcggggacctgagtgctctcaaaactatactacgccaagtggtgttattaagtctcccggtttccccgaaaaatatcctaattcccttgagtgtacttacattgtcttcgtgcctaaaatgtccgaaataatcctggagttcgagagcttcgatctggaaccagacagcaacccccctggcggcatgttttgtcggtatgaccgcctggagatttgggacggctttccggatgtgggccctcatatcggtaggtattgcggacagaagacacccggcaggattcgctctagctccgggatcctctctatggtcttctacaccgattccgccattgccaaggaaggtttctctgctaattacagcgtgctccagtccagcgtgtctgaggactttaagtgtatggaggctctcgggatggagtcaggagagatacactcagatcagatcaccgcctccagccagtatagtactaactggagcgctgagaggagtcgcctgaattacccggagaatggctggactcccggcgaggatagctaccgggagtggatccaggtcgacctggggctcctcaggttcgtcacagctgtgggaacacaaggggccatctccaaagaaaccaagaagaagtactatgtgaagacttacaaaatagatgtgtcatcaaatggcgaggactggatcacaattaaagaaggtaataaacctgtactctttcaagggaatacgaaccccaccgacgtagtggttgctgtgtttccgaaaccgctgatcacacggttcgtcagaattaagcccgcaacatgggaaacaggcatcagtatgagattcgaggtctacggctgcaaaattactgattatccttgctctggaatgcttggcatggtatccggtctgatctcagatagccagattacaagctcaaatcagggggaccggaattggatgcccgaaaacatccggctggtcacgagccggagtggatgggctctaccccctgctccacattcttacatcaatgaatggctacaaatagatcttggtgaggagaagatcgttcgcggaataataatccagggaggcaaacatcgcgaaaacaaggtattcatgcggaagtttaaaatcgggtatagtaataatgggtcggactggaagatgattatggacgactcaaaacggaaggctaagtccttcgagggcaataataactacgacaccccggagctgcgtaccttccctgctctgtccacccggtttatcaggatctaccccgaacgagccacccacggaggactggggctccgcatggaactgcttggctgtgaggtagagggaggtactaccgtactcgctacagagaaacctacggtgatcgacagcacaatccagagtgggattaagtag

SEQ ID NO: 27869 - DNA, 711 bp, Artificial Sequence
  derived and/or modified sequence
gtggacttaggactgctgcgctttgttaccgccgtcggcacccagggagcaatttccaaggaaactaaaaaaaaatattatgttaaaacgtacaaaatcgacgtgtcctcaaacggtgaagattggataacaatcaaggaaggtaacaaacctgtgttattccagggcaataccaatcccactgacgtcgtagtggcagtttttcccaaacccttgattacccgttttgtccgcataaagcccgctacttgggagaccggaatctcaatgagattcgaggtgtacggttgtaagatcaccgattacccttgttctggcatgctgggcatggtctcaggattaatctcagactcccaaataacttcatccaatcagggtgaccggaactggatgcccgaaaacatcagactcgtcaccagccgtagcggatgggcgctgcctcccgcaccacacagctacattaatgagtggttgcagattgacctgggagaggagaagattgtgcgtggcatcatcattcaaggggggaagcatagagagaacaaagtcttcatgcgtaaatttaaaataggttacagcaacaatggtagtgactggaaaatgatcatggatgactcgaagcgaaaggctaaggtccgggcaggagactgggaggaggtaatcccatacgtgcttgacttcaaccaggggcccctcgcgttctctaggtag

SEQ ID NO: 27870 - DNA, 513 bp, Artificial Sequence
  derived and/or modified sequence
taacctggaggcatgttctgcaggtatgaccgcctggagatatgggacggtttccctgacgtggggccccatatcggcaggtattgcggccagaaaacacccggtagaatccgcagctcttcaggaatccttagtatggtgttctatacggacagtgcgatagctaaggaaggtttttccgcgaattacagcgtcttgcaatcttcagtctccgaagacttcaagtgcatggaagcactcggaatggagtccggggagatccatagcgaccagatcaccgctagctcccagtattccactaactggtctgcagagcgcagtcggttaaactatcccgaaaatggatggactcctggcgaagattcttatagagagtggatccaggatgctaagtacaggctgagagtttcagtcgtgagatctaaaagctcttcctcgtccacatcgttggaaccaaggcctctgtcatcactgaagttatcatttttttcctacaagatcaagattacatag

SEQ ID NO: 27871 - DNA, 567 bp, Artificial Sequence
  derived and/or modified sequence
atgtctgagatcatcctggagtttgagagctttgacctggagccagacagcaaccccccaggcggcatgttctgccgctatgaccggctggagatctgggatggcttcccagatgtgggcccccacatcggccgctactgcggccagaagaccccaggccgcatccgcagcagcagcggcatcctgtccatggtgttctacacagacagcgccatcgccaaggagggcttcagcgccaactacagcgtgctgcagagctctgtgtctgaggacttcaagtgcatggaggccctgggcatggagagcggggagatccacagcgaccagatcacagccagcagccagtacagcaccaactggagcgctgagaggagccggctgaactacccagaaaatggctggaccccaggagaggacagctaccgggagtggatccaggatgccaagtaccgcctgcgggtgtctgtggtgcgcagcaagagcagcagcagcagcaccagcctggagccccggcccctgagcagcctgaagctgtccttcttctcctacaagatcaagatcacctag

SEQ ID NO: 27872 - DNA, 1830 bp, Artificial Sequence
  derived and/or modified sequence
atggagcggggcctgcccctgctgtgtgctgtgctggccctggtgctggccccagctggggccttcagaaatgacaagtgtggggacaccatcaagattgagagccctggctacctgaccagccctggctacccccacagctaccaccccagcgagaagtgtgagtggctgatccaggccccagacccctaccagaggatcatgatcaacttcaacccccactttgacctggaggaccgggactgcaagtatgactatgtggaggtgtttgatggagaaaatgaaaatggccacttccggggcaagttctgtgggaagatcgcccctcctcctgtggtgagcagcggccccttcctgttcatcaagtttgtgtctgactatgagacccacggggccggcttcagcatccgctatgagatcttcaagaggggccctgagtgcagccagaactacaccaccccatctggagtcatcaagagccctggcttccctgagaagtaccccaacagcctggagtgcacctacatcgtgtttgtgcccaagatgtctgagatcatcctggagtttgagagctttgacctggagccagacagcaaccccccaggcggcatgttctgccgctatgaccggctggagatctgggatggcttcccagatgtgggcccccacatcggccgctactgcggccagaagaccccaggccgcatccgcagcagcagcggcatcctgtccatggtgttctacacagattctgccatcgccaaggagggcttcagcgccaactacagcgtgctgcagagctctgtgtctgaggacttcaagtgcatggaggccctgggcatggagagcggggagatccacagcgaccagatcacagccagcagccagtacagcaccaactggagcgctgagaggagccggctgaactacccagaaaatggctggaccccaggagaagattcctaccgggagtggatccaggtggacctgggcctgctgcgctttgtgacagctgtgggcacccagggcgccatcagcaaggagaccaagaagaagtactacgtgaagacctacaagattgatgtgagcagcaatggagaggactggatcaccatcaaggagggcaacaagcctgtgctcttccagggcaacaccaaccccacagatgtggtggtggccgtgttccccaagcccctcatcaccaggtttgtgcgcatcaagccagccacctgggagaccggcatctccatgagatttgaggtgtatggctgcaagatcacagactacccctgcagcggcatgctgggcatggtgtctggcctcatcagtgacagccagatcaccagcagcaaccagggcgacaggaactggatgcctgagaacatccggctggtgaccagccgcagcggctgggccctgcccccagccccccacagctacatcaatgagtggctgcagattgacctgggggaggagaagatcgtgcggggcatcatcatccagggcggcaagcaccgggagaacaaggtgttcatgaggaagttcaagattggctacagcaacaacggcagtgactggaagatgatcatggatgacagcaagaggaaggccaagagctttgagggcaacaacaactatgacaccccagagctgcggaccttccctgccctgagcacccgcttcatccgcatctacccagagcgggccacccatggaggcctgggcctgaggatggagctgctgggctgtgaggtggagggcggcaccaccgtgctggccacagagaagcccaccgtcatcgacagcaccatccagagcggcatcaagtag

SEQ ID NO: 27873 - DNA, 711 bp, Artificial Sequence
  derived and/or modified sequence
gtggacctgggcctgctgcgctttgtgacagctgtgggcacccagggcgccatcagcaaggagaccaagaagaagtactacgtgaagacctacaagattgatgtgagcagcaatggagaggactggatcaccatcaaggagggcaacaagcctgtgctcttccagggcaacaccaaccccacagatgtggtggtggccgtgttccccaagcccctcatcaccaggtttgtgcgcatcaagccagccacctgggagaccggcatctccatgagatttgaggtgtatggctgcaagatcacagactacccctgcagcggcatgctgggcatggtgtctggcctcatcagtgacagccagatcaccagcagcaaccagggcgacaggaactggatgcctgagaacatccggctggtgaccagccgcagcggctgggccctgcccccagccccccacagctacatcaatgagtggctgcagattgacctgggggaggagaagatcgtgcggggcatcatcatccagggcggcaagcaccgggagaacaaggtgttcatgaggaagttcaagattggctacagcaacaatggaagtgactggaagatgatcatggatgacagcaagaggaaggccaaggtgcgggccggggactgggaggaggtgatcccctacgtgctggacttcaaccagggccccctggccttcagcaggtag

SEQ ID NO: 27874 - DNA, 513 bp, Artificial Sequence
  derived and/or modified sequence
tgaccaggcggcatgttctgccgctatgaccggctggagatctgggatggcttcccagatgtgggcccccacatcggccgctactgcggccagaagaccccaggccgcatccgcagcagcagcggcatcctgtccatggtgttctacacagacagcgccatcgccaaggagggcttcagcgccaactacagcgtgctgcagagctctgtgtctgaggacttcaagtgcatggaggccctgggcatggagagcggggagatccacagcgaccagatcacagccagcagccagtacagcaccaactggagcgctgagaggagccggctgaactacccagaaaatggctggaccccaggagaggacagctaccgggagtggatccaggatgccaagtaccgcctgcgggtgtctgtggtgcgcagcaagagcagcagcagcagcaccagcctggagccccggcccctgagcagcctgaagctgtccttcttctcctacaagatcaagatcacctag

SEQ ID NO: 27875 - DNA, 567 bp, Artificial Sequence
  derived and/or modified sequence
atgagcgagatcatcctggagttcgagagcttcgacctggagcccgatagcaatccgcccgggggaatgttttgccgatatgacagacttgagatctgggatggctttcctgacgttggccctcacattggacggtattgtgggcaaaaaacacctggaaggatccgcagcagtagcggcatcctgtcaatggtattctacacagattccgcaatagctaaggagggattctccgccaattatagtgtactgcagagttccgtatctgaagacttcaagtgcatggaggccctaggaatggagagcggcgagattcactcagatcaaattactgcgtcatcacagtactccactaactggagcgcagaacgctctcggctgaattaccctgagaacggatggacccccggcgaagactcttacagggagtggatccaggacgccaaataccggctgcgggtgtccgtcgttagatcgaagtcatcttcctcgtctacatcccttgagccccgccccctctcttcactgaagctctcatttttctcttacaaaatcaagattacctag

SEQ ID NO: 27876 - DNA, 1830 bp, Artificial Sequence
  derived and/or modified sequence
atggagcggggcctgcccctgctgtgcgccgtgctggccctggtgcttgctcctgcaggagcttttcggaatgacaaatgtggtgacacaattaaaatagagagtccggggtacctgacgagtcctggctatccacattcctatcacccatccgagaagtgtgaatggcttatccaggcgcctgacccctaccagcggatcatgataaattttaatcctcatttcgatctcgaagatcgcgattgtaaatatgattatgtagaagtgtttgacggcgagaacgagaacgggcattttagggggaagttttgcggaaagatcgcacctccgcccgtagtttcaagcggaccatttcttttcattaaattcgtgagcgattatgaaacccacggcgcaggatttagcatccggtacgagatcttcaagcgagggccggagtgcagccaaaattacaccaccccatccggcgttattaagagccctggctttccagaaaaataccccaactcgttggaatgtacatatatcgttttcgtgccgaaaatgtccgaaattattctagagttcgaatcattcgacttagaaccggactcaaacccacccggcgggatgttttgcaggtatgatcgcctggagatctgggacggatttcccgacgtaggtccccatattggtcgctattgcggtcagaagacccctggcagaatccgaagctcgtctggcatcctcagcatggttttctacactgacagcgcaatcgcgaaggagggcttcagcgctaactactctgtacttcaatcctccgttagcgaggatttcaaatgcatggaggcccttggaatggaatccggagagatacattccgaccagatcaccgcctcaagccagtattccacaaactggagcgccgagcgatctcgcctgaactatccagagaatggttggacccccggagaggattcttatagagaatggatacaggtggatcttggattgctgaggttcgtcacagccgtgggcacccaaggtgccatcagcaaggagacgaagaaaaagtactacgtgaaaacatacaaaattgatgtgagctcaaatggagaagactggattacgattaaagagggaaacaagccagtcttgtttcaggggaacaccaacccaacagatgtcgtagtcgccgtgttccccaaaccccttattacaagattcgttcggatcaagcccgcgacttgggagaccggcatttcaatgcgcttcgaagtttatgggtgtaagattactgattatccatgctccggcatgctgggcatggtctctggactcatcagcgattcccaaattacctcttccaaccagggagacaggaactggatgcccgagaatattcggcttgtgacatccagatccggctgggccctcccgccagctcctcacagctacatcaacgaatggctgcaaattgatctgggcgaagagaaaattgtgagaggcatcattatacaaggagggaaacatagggagaacaaagtctttatgcgcaaatttaaaatcggctattcgaataacgggtcagactggaaaatgatcatggacgactctaaacggaaagcgaaatcttttgagggcaataacaattacgatacaccggaattgagaacttttcctgccctaagcacaagattcattcggatttaccccgagcgagcaacccacggaggtttgggattgcgtatggagctgctgggctgtgaagtggaggggggcaccactgtcctcgctactgagaaacccacagtcatcgatagtactatccagtcgggcataaaatag

SEQ ID NO: 27877 - DNA, 711 bp, Artificial Sequence
  derived and/or modified sequence
gtggacctgggcctgctgcggttcgtgaccgccgtgggcacccagggcgccatctctaaggagaccaagaagaagtactacgtcaaaacttacaagatagacgtgtcttctaacggagaggactggattaccattaaggaaggtaataaaccggtactgtttcagggaaacactaaccccaccgacgttgtggtggcagtcttcccaaaacccctgataactagatttgtgcgaataaaacccgccacctgggagaccgggatttctatgagatttgaagtgtatggctgtaaaatcactgattacccctgtagcgggatgttgggtatggtcagtggactgatctcggacagtcagatcactagttcaaatcaaggggataggaactggatgcctgagaacataaggctcgtgacctctcggtcaggatgggctctgccccccgcaccccattcttacattaacgaatggttacagatagatcttggcgaagaaaaaatcgtgaggggtatcattatccagggaggaaaacatcgggaaaataaagtgttcatgcggaagtttaaaataggctatagtaataatggaagcgactggaagatgatcatggacgacagtaagcgcaaggcaaaggttagagcaggggattgggaggaagtgatcccatatgttttggactttaaccagggccccctggccttctcccgctag

SEQ ID NO: 27878 - DNA, 513 bp, Artificial Sequence
  derived and/or modified sequence
tgacccggcggcatgttctgccggtacgaccggctggagatctgggacggctttccagatgtggggcctcacattggccgctactgtggccaaaagaccccaggacggatccggagctcatcaggtatcctgtctatggtcttctatacagattctgcgatcgctaaggaggggttttctgcaaattacagcgtgcttcagtcatctgtctcagaggatttcaagtgtatggaggcattaggcatggaatcaggagagatacattcagatcagataacggcgtcctctcagtactcaaccaactggagcgctgagcggtcgaggctgaattaccccgagaatggatggacgcccggagaggactcctacagagagtggattcaagatgccaagtatagactcagagtatctgtggtgcgaagcaagtcaagctcatcaagtacctctctggagccacgcccactatcatccttgaaattgtcctttttttcttataaaattaagattacatag

SEQ ID NO: 27879 - DNA, 1988 bp, Artificial Sequence
  derived and/or modified sequence
cttttctccaagacgggctgaggattgtacagctctaggcggagttggggctcttcggatcgcttagattctcctctttgctgcatttccccccacgtcctcgttctcccgcgtctgcctgcggacccggagaagggagaatggagagggggctgccgctcctctgcgccgtgctcgccctcgtcctcgccccggccggcgcttttcgcaacgataaatgtggcgatactataaaaattgaaagccccgggtaccttacatctcctggttatcctcattcttatcacccaagtgaaaaatgcgaatggctgattcaggctccggacccataccagagaattatgatcaacttcaaccctcacttcgatttggaggacagagactgcaagtatgactacgtggaagtcttcgatggagaaaatgaaaatggacattttaggggaaagttctgtggaaagatagcccctcctcctgttgtgtcttcagggccatttctttttatcaaatttgtctctgactacgaaacacatggtgcaggattttccatacgttatgaaattttcaagagaggtcctgaatgttcccagaactacacaacacctagtggagtgataaagtcccccggattccctgaaaaatatcccaacagccttgaatgcacttatattgtctttgtgccaaagatgtcagagattatcctggaatttgaaagctttgacctggagcctgactcaaatcctccaggggggatgttctgtcgctacgaccggctagaaatctgggatggattccctgatgttggccctcacattgggcgttactgtggacagaaaacaccaggtcgaatccgatcctcatcgggcattctctccatggttttttacaccgacagcgcgatagcaaaagaaggtttctcagcaaactacagtgtcttgcagagcagtgtctcagaagatttcaaatgtatggaagctctgggcatggaatcaggagaaattcattctgaccagatcacagcttcttcccagtatagcaccaactggtctgcagagcgctcccgcctgaactaccctgagaatgggtggactcccggagaggattcctaccgagagtggatacaggtagacttgggccttctgcgctttgtcacggctgtcgggacacagggcgccatttcaaaagaaaccaagaagaaatattatgtcaagacttacaagatcgacgttagctccaacggggaagactggatcaccataaaagaaggaaacaaacctgttctctttcagggaaacaccaaccccacagatgttgtggttgcagtattccccaaaccactgataactcgatttgtccgaatcaagcctgcaacttgggaaactggcatatctatgagatttgaagtatacggttgcaagataacagattatccttgctctggaatgttgggtatggtgtctggacttatttctgactcccagatcacatcatccaaccaaggggacagaaactggatgcctgaaaacatccgcctggtaaccagtcgctctggctgggcacttccacccgcacctcattcctacatcaatgagtggctccaaatagacctgggggaggagaagatcgtgaggggcatcatcattcagggtgggaagcaccgagagaacaaggtgttcatgaggaagttcaagatcgggtacagcaacaacggctcggactggaagatgatcatggatgacagcaaacgcaaggcgaagtcttttgagggcaacaacaactatgatacacctgagctgcggacttttccagctctctccacgcgattcatcaggatctaccccgagagagccactcatggcggactggggctcagaatggagctgctgggctgtgaagtggaaggtggcaccactgtgctggccacagaaaagcccacggtcatagacagcaccatacaatcaggtatcaaataaaatacgaaatgtgacaga

SEQ ID NO: 27880 - DNA, 709 bp, Artificial Sequence
  derived and/or modified sequence
gtagacttgggccttctgcgctttgtcacggctgtcgggacacagggcgccatttcaaaagaaaccaagaagaaatattatgtcaagacttacaagatcgacgttagctccaacggggaagactggatcaccataaaagaaggaaacaaacctgttctctttcagggaaacaccaaccccacagatgttgtggttgcagtattccccaaaccactgataactcgatttgtccgaatcaagcctgcaacttgggaaactggcatatctatgagatttgaagtatacggttgcaagataacagattatccttgctctggaatgttgggtatggtgtctggacttatttctgactcccagatcacatcatccaaccaaggggacagaaactggatgcctgaaaacatccgcctggtaaccagtcgctctggctgggcacttccacccgcacctcattcctacatcaatgagtggctccaaatagacctgggggaggagaagatcgtgaggggcatcatcattcagggtgggaagcaccgagagaacaaggtgttcatgaggaagttcaagatcgggtacagcaacaacggctcggactggaagatgatcatggatgacagcaaacgcaaggcgaaggtgagggctggggactgggaggaggtcatcccttatgtccttgacttcaatcaagggcctctggcattctcccgag

SEQ ID NO: 27881 - DNA, 518 bp, Artificial Sequence
  derived and/or modified sequence
tccaggggggatgttctgtcgctacgaccggctagaaatctgggatggattccctgatgttggccctcacattgggcgttactgtggacagaaaacaccaggtcgaatccgatcctcatcgggcattctctccatggttttttacaccgacagcgcgatagcaaaagaaggtttctcagcaaactacagtgtcttgcagagcagtgtctcagaagatttcaaatgtatggaagctctgggcatggaatcaggagaaattcattctgaccagatcacagcttcttcccagtatagcaccaactggtctgcagagcgctcccgcctgaactaccctgagaatgggtggactcccggagaggattcctaccgagagtggatacaggatgcaaaatacagactccgtgtatcagtggtgcgatcaaaatcttcctcttcaagcacatcattagaacccaggccattaagctcattgaaactgagtttcttttcctataaaataaaaataacgtagccttcac

SEQ ID NO: 27882 - DNA, 567 bp, Artificial Sequence
  derived and/or modified sequence
atgtctgagatcatactggaattcgaatcttttgatctcgagccagactctaacccacccggagggatgttctgtcgatatgaccggcttgagatctgggacggctttccagatgtcggaccacacatcggacgctattgtggccagaagactcctggtaggatcaggtcatcgagtgggatcctatccatggtgttttacaccgatagcgccatagccaaagagggctttagcgcaaattactcagttcttcagagtagtgtgagtgaagactttaaatgtatggaggcactcggcatggaatccggagagattcatagcgatcagatcaccgcctccagtcagtattccaccaactggagcgctgagcgctcacgactcaactaccccgaaaatggttggacccctggtgaggattcttaccgggagtggattcaggacgcaaagtatcggctaagagtgtcagtggttcggagcaagtcctctagttcaagtacatcactggaaccccgacctctgagctctttaaagctcagctttttttcatataaaatcaaaattacctag

SEQ ID NO: 27883 - DNA, 1830 bp, Artificial Sequence
  derived and/or modified sequence
atggaaagggggttgccacttctgtgcgctgtgctggccctggtgctggcccctgcaggggcattccgaaatgataagtgcggtgatactatcaagatcgaaagcccaggctacttgacgtcgcccggatatccacactcctaccatccttccgagaaatgtgagtggctcattcaggcccctgacccctatcagagaatcatgatcaatttcaacccccatttcgacttggaggatcgggattgtaaatatgattatgtagaagtctttgatggcgagaacgaaaacgggcacttccggggaaagttctgcggaaagattgcgcctcccccagtggtttcaagcggcccttttctgttcatcaaattcgtgtcagactacgaaacacacggtgcagggtttagtatcagatacgagatctttaagcgaggaccagaatgttctcagaattataccacgccttctggcgttatcaaaagtcctggctttcctgaaaagtatcctaattccctcgagtgtacatacatcgttttcgtgccaaagatgtccgaaatcatccttgagtttgagtcattcgaccttgagcctgatagtaaccccccagggggaatgttctgtagatatgatcggttagagatctgggatggctttcccgacgtggggccacacatcggcagatactgcggacagaagactccgggtcggatcagaagctcctctggaatcctcagcatggtgttctataccgacagtgcaattgctaaggaaggcttctctgcgaattatagtgtgctccaaagttctgtctctgaagactttaaatgtatggaagccctgggtatggagtcgggggaaatccacagtgaccaaattacagcttccagtcagtattccacaaactggtcagcagagaggtcaaggttaaactatcccgaaaacggttggaccccaggcgaagactcttaccgcgaatggattcaagtggaccttggcttactgaggttcgtgacggcggtggggacacagggcgcaattagcaaagaaaccaagaaaaaatattacgtgaagacatacaaaatcgacgtgagcagtaacggcgaagattggattacgattaaagaaggcaataaacccgtgttgtttcagggcaataccaaccctaccgacgtagtggtggccgtttttccaaagcccctgattacacgtttcgtcaggataaaacccgctacgtgggaaacgggaatttccatgaggtttgaagtgtatgggtgtaagattacagactatccttgtagtggtatgcttggcatggtatcagggctgattagtgattcacagattacctccagcaatcagggagataggaactggatgccggagaacatcaggcttgttacttcccgcagcggctgggccctcccgccagcccctcactcctacattaatgaatggcttcaaatcgacctgggcgaagagaaaattgtgcggggaatcatcatacagggcggaaagcatcgggagaataaggtgtttatgcgaaagttcaagatcggctacagcaataatggcagcgattggaagatgattatggatgattctaagcgaaaggccaaatccttcgaggggaataacaattatgatactcccgagcttagaactttccccgcattgagcacacgcttcattcgcatttatcctgaaagagctacccatggtggtcttggcttgcgtatggaactgctcggatgcgaagtagagggcggaaccaccgtattagcaaccgagaagccaactgtaatagacagcaccatccagagtggtatcaagtag

SEQ ID NO: 27884 - DNA, 711 bp, Artificial Sequence
  derived and/or modified sequence
gtggacctcggtctactcaggtttgtgacagcggtgggcactcagggcgcaatcagcaaagaaacgaagaagaagtattacgtcaaaacgtataagattgacgtgtcatccaacggggaggactggatcacaatcaaggaggggaacaaaccagtgctcttccaggggaacactaaccccaccgacgtcgtggtcgccgtctttcctaagccattaatcacccggttcgtgaggatcaaaccggctacgtgggagactgggatcagcatgagattcgaagtctatgggtgtaaaatcaccgattacccctgttctgggatgctgggtatggtttcagggctcatatctgacagccaaatcacgtccagcaatcagggtgacaggaactggatgcccgagaatattcggcttgttacaagtcgctcaggatgggccctgcccccagctcctcactcttacattaatgagtggctgcaaatagacctgggcgaagaaaaaatcgttagaggaatcattatccagggaggcaagcatcgggagaataaggtatttatgagaaaattcaaaattgggtattccaataatggcagcgactggaaaatgataatggacgatagtaaaaggaaggccaaggtccgagccggagactgggaagaggtcatcccctatgtccttgacttcaaccaggggccattggcatttagtcgttag

SEQ ID NO: 27885 - DNA, 513 bp, Artificial Sequence
  derived and/or modified sequence
tagcctggtggcatgttctgtcggtatgacagattggaaatctgggacggctttcccgatgtgggacctcatatcgggcgatattgtggacagaagactcccggtagaattagaagctcatcaggtatcctttcaatggtgttttacaccgactctgccattgccaaagagggtttctccgctaactattcggtgctgcagtcctcggtatccgaagattttaaatgcatggaagcattagggatggagtcaggtgagatccatagcgatcagatcactgcaagctcccagtacagcacaaattggagcgccgagaggagccgcctgaattatcctgagaacggctggactcccggtgaggattcttatcgtgaatggatccaggatgctaagtaccgtctgagagtgagcgtggtgcgcagcaaaagttcttcatcctcaacatccctggaaccgagacccctttcctccctcaagctctctttctttagttacaagattaaaatcacttag

SEQ ID NO: 27886 - DNA, 5720 bp, Artificial Sequence
  derived and/or modified sequence
ggactccaactgggagggggcgccagcgcacccaggacgcggtgccccaagggaccccattccaagctgcaaactcaagtcccccgcctccccaggccaaacacacccccgcgcccgttcgcagctgccaccccgggtgttccaaagactccggcaaagatctgcgcctcccgggtctccctacccgccagcccgactgcgccgcatcgccagactctgttggcccatcagactccgcccggcagtcggcctcatcaaacttgatttctcacctcctcagccccatcacctccatcctctttccccccgtctcgccttcacccccccaatttcctccttgcccctcatttccaccctcctccccctcccccggccacttcgctaacttgtggctgttgtgatgcgtattcccgtagatccgagcaccagccggcgcttcagccccccctccagcagcctgcagcccggcaaaatgagcgacgtgagcccggtggtggctgcgcaacagcagcagcaacagcagcagcagcaacagcagcagcagcagcagcaacagcagcagcagcagcaggaggcggcggcggcggctgcggcggcggcggcggctgcggcggcggcagctgcagtgccccggttgcggccgccccacgacaaccgcaccatggtggagatcatcgccgaccacccggccgaactcgtccgcaccgacagccccaacttcctgtgctcggtgctgccctcgcactggcgctgcaacaagaccctgcccgtggccttcaaggtggtagccctcggagaggtaccagatgggactgtggttactgtcatggcgggtaacgatgaaaattattctgctgagctccggaatgcctctgctgttatgaaaaaccaagtagcaaggttcaacgatctgagatttgtgggccggagtggacgaggcaagagtttcaccttgaccataaccgtcttcacaaatcctccccaagtagctacctatcacagagcaattaaagttacagtagatggacctcgggaacccagaaggcacagacagaagcttgatgactctaaacctagtttgttctctgaccgcctcagtgatttagggcgcattcctcatcccagtatgagagtaggtgtcccgcctcagaacccacggccctccctgaactctgcaccaagtccttttaatccacaaggacagagtcagattacagaccccaggcaggcacagtcttccccgccgtggtcctatgaccagtcttacccctcctacctgagccagatgacgtccccgtccatccactctaccaccccgctgtcttccacacggggcactgggcttcctgccatcaccgatgtgcctaggcgcatttcagatgatgacactgccacctctgacttctgcctctggccttccactctcagtaagaagagccaggcaggtgcttcagaactgggccctttttcagaccccaggcagttcccaagcatttcatccctcactgagagccgcttctccaacccacgaatgcactatccagccacctttacttacaccccgccagtcacctcaggcatgtccctcggtatgtccgccaccactcactaccacacctacctgccaccaccctaccccggctcttcccaaagccagagtggacccttccagaccagcagcactccatatctctactatggcacttcgtcaggatcctatcagtttcccatggtgccggggggagaccggtctccttccagaatgcttccgccatgcaccaccacctcgaatggcagcacgctattaaatccaaatttgcctaaccagaatgatggtgttgacgctgatggaagccacagcagttccccaactgttttgaattctagtggcagaatggatgaatctgtttggcgaccatattgaaattcctcagcagtggcccagtggtatctgggggccacatcccacacgtatcaatatatacatatatagagagagtgcatatatatgtatatcgattagctatctacaaagtgcctattttttagaagatttttcattcactcactcagtcatgatcttgcagccataagagggtagatattgagaagcagaaggctcaagagagacaattgcaatcgagcttcagattgtttactatttaagatgtacttttacaaaggaacaaagaagggaaaaggtatttttgtttttgttgtttggtctgttatcatcaataacctgttcatatgccaattcagagaggtggactccaggttcaggagggagaagagcaaagccgcttcctctctgtgctttgaaacttcacaccctcacggtggcagctgtgtatggaccagtgccctccgcagacagctcacaaaaccagttgaggtgcactaaagggacatgaggtagaatggatgcttccatcacagtaccatcattcagaataactcttccaatttctgctttcagacatgctgcaggtcctcatctgaactgttgggttcgtttttttttttttttttcctgctccaagaaagtgacttcaaaaataactgatcaggatagattattttattttactttttaacactccttctccccttttcccactgaaccaaaaagaaatcccatccctaaaacctgccttctccttttatgcaaaactgaaaatggcaatacattattatagccataatggtatagatagtgattgcgtttggctatgtgttgttttctttttttttaaattatgaatatgtgtaaaatctgaggtaacttgctaacgtgaatggtcatataactttaaagatatatttataattatttaatgacatttggacccttgaaacatttcttagtgtattgatatgttgacttcggtctctaaaagtgctctttattaaataacaaatttcttcagtggtctagagccatatctgaaatattgctaagcaatttcagttcatccaggcacaatgtgattttaaaaaatacttccatctccaaatattttagatatagattgtttttgtgatgtatgaaggaaatgttatgtttagttctttcagatctttgaatgcctctaacacagctttgccttctaaagcggtaattagggatttaaaaaacaacctttagccctttatcagcatgaaatgctggagtgatgtggttttctaatttctttggggtaattatgactcttgtcatattaaaaagacaagcacaagtaaatcattgaactacagaaaaatgttctgtggtttcatagttaagcaaaactctaaatcgccaggcttcatagcaaagacatagtcagctaaaagccgcacatgtggatagagggttcaattatgagacacctagtacaggagagcaaaattgcaccagagattcttaaccaaccagccttaccaaacaacacaacaggggaaccccaatctgccttacccaaggccccactggcagctttccacagaatttgcatttagaggagcagaatgacatcactgtcctttgggagtaggtcctctgaaaaggcagcaggttccagcaggtagctgagctgagaggacatatggcccacggggacctacagacagcctttgacatttgtatttcttacaatggagggccaaggagggcaaggggctgtggagtttggtgtctactagtgtgtatgaatttgagctagagtccttctgtggcatgcactttgaccactcctggcagtcacatggcagatttccaagtgcaaatccttaatccaaacaaggatcatctaatgacaccaccaggccaatccctgctctcctccccgaaaagtcagggtcccttcattggaatcctccacccacccaagcagaatttagcagagatttgccttcaaaccctaacggcccccttgttctctggtccttctcaaacccacctttgtaggccacccagcattgcaggacagcgtgtggggcagctggacctgtgcttcctgcctgggagtctcccttggaattcatcctgactccttctaataaaaatggatgggaaagcaaaacactttgccttctaaaggccgtataccaagtatgcttagataaataagccacttttctattacttaagtaagaaggaagtagtaattgatactatttattgtttgtgtgtggtagcttgaagcacaccactgtccatttatttgtaagtgtaaaatatgtgtgtttgtttcagcagcacttaaaaaagccagtgtctggttacacatttcaattttaattaattgacataaaaatgctaccgccagtgccagctgcatcctatttaattaaaaaggtactatatttgtacattattttttaatgttaaaagggcttttttaagtttacagtacacataccgagtgactttagggatgcttttgtgttgaaatgttactatagtggctgcaggcagcaacccagaaacactttagaagctttttttccttgggaaaaattcaagcacttcttccctccaccctcactccaaccaccccaatgggggtaattcacatttcttagaacaaattctgcccttttttggtctagggattaaaattttgtttttctttctttctttttttttttttttcactgaacccttaatttgcactgggtcatgtgtttgatttgtgatttcaagaccaaagcaaagtcttactactactgtggaaccatgtactagttcctgggaattaaaatagcgtggttctctttgtagcacaaacattgctggaatttgcagtcttttcaatgcagccacatttttatccatttcagttgtctcacaaattttaacccatatcagagttccagaacaggtaccacagctttggttttagattagtggaataacattcagcccagaactgagaaactcaacagattaactatcgtttgctctttagacggtctcactgcctctcacttgccagagccctttcaaaatgagcagagaagtccacaccattagggaccatctgtgataaattcagaagggaggagatgtgtgtacagctttaaggattccctcaattccgaggaaagggactggcccagaatccaggttaatacatggaaacacgaagcattagcaaaagtaataattatacctatggtatttgaaagaacaataataaaagacacttcttccaaaccttgaatttgttgtttttagaaaacgaatgcatttaaaaatattttctatgtgagaattttttagatgtgtgtttacttcatgtttacaaataactgtttgctttttaatgcagtactttgaaatatatcagccaaaaccataacttacaataatttcttaggtattctgaataaaattccatttcttttggatatgctttaccattcttaggtttctgtggaacaaaaatatttgtagcattttgtgtaaatacaagctttcatttttattttttccaattgctattgcccaagaattgctttccatgcacatattgtaaaaattccgctttgtgccacaggtcatgattgtggatgagtttactcttaacttcaaagggactatttgtattgtatgttgcaactgtaaattgaattatttggcatttttctcatgattgtaatattaatttgaagtttgaatttaattttcaataaaatggcttttttggttttgttaaaaaaaaaaaaaaaaaaaa

SEQ ID NO: 27887 - DNA, 1524 bp, Artificial Sequence
  derived and/or modified sequence
atgagaatccccgtggaccccagcaccagcagaagattcagcccccccagcagcagcctgcagcccggcaagatgagcgacgtgagccccgtggtggccgcccagcagcagcagcagcagcagcagcagcagcagcagcagcagcagcagcagcagcagcagcagcagcaggaggccgccgccgccgccgccgccgccgccgccgccgccgccgccgccgccgccgtgcccagactgagacccccccacgacaacagaaccatggtggagatcatcgccgaccaccccgccgagctggtgagaaccgacagccccaacttcctgtgcagcgtgctgcccagccactggagatgcaacaagaccctgcccgtggccttcaaggtggtggccctgggcgaggtgcccgacggcaccgtggtgaccgtgatggccggcaacgacgagaactacagcgccgagctgagaaacgccagcgccgtgatgaagaaccaggtggccagattcaacgacctgagattcgtgggcagaagcggcagaggcaagagcttcaccctgaccatcaccgtgttcaccaaccccccccaggtggccacctaccacagagccatcaaggtgaccgtggacggccccagagagcccagaagacacagacagaagctggacgacagcaagcccagcctgttcagcgacagactgagcgacctgggcagaatcccccaccccagcatgagagtgggcgtgcccccccagaaccccagacccagcctgaacagcgcccccagccccttcaacccccagggccagagccagatcaccgaccccagacaggcccagagcagccccccctggagctacgaccagagctaccccagctacctgagccagatgaccagccccagcatccacagcaccacccccctgagcagcaccagaggcaccggcctgcccgccatcaccgacgtgcccagaagaatcagcgacgacgacaccgccaccagcgacttctgcctgtggcccagcaccctgagcaagaagagccaggccggcgccagcgagctgggccccttcagcgaccccagacagttccccagcatcagcagcctgaccgagagcagattcagcaaccccagaatgcactaccccgccaccttcacctacaccccccccgtgaccagcggcatgagcctgggcatgagcgccaccacccactaccacacctacctgccccccccctaccccggcagcagccagagccagagcggccccttccagaccagcagcaccccctacctgtactacggcaccagcagcggcagctaccagttccccatggtgcccggcggcgacagaagccccagcagaatgctgcccccctgcaccaccaccagcaacggcagcaccctgctgaaccccaacctgcccaaccagaacgacggcgtggacgccgacggcagccacagcagcagccccaccgtgctgaacagcagcggcagaatggacgagagcgtgtggagaccctactag

SEQ ID NO: 27888 - DNA, 1566 bp, Artificial Sequence
  derived and/or modified sequence
atggccagcaacagcctgttcagcaccgtgaccccctgccagcagaacttcttctgggaccccagcaccagcagaagattcagcccccccagcagcagcctgcagcccggcaagatgagcgacgtgagccccgtggtggccgcccagcagcagcagcagcagcagcagcagcagcagcagcagcagcagcagcagcagcagcagcagcagcaggaggccgccgccgccgccgccgccgccgccgccgccgccgccgccgccgccgccgtgcccagactgagacccccccacgacaacagaaccatggtggagatcatcgccgaccaccccgccgagctggtgagaaccgacagccccaacttcctgtgcagcgtgctgcccagccactggagatgcaacaagaccctgcccgtggccttcaaggtggtggccctgggcgaggtgcccgacggcaccgtggtgaccgtgatggccggcaacgacgagaactacagcgccgagctgagaaacgccagcgccgtgatgaagaaccaggtggccagattcaacgacctgagattcgtgggcagaagcggcagaggcaagagcttcaccctgaccatcaccgtgttcaccaaccccccccaggtggccacctaccacagagccatcaaggtgaccgtggacggccccagagagcccagaagacacagacagaagctggacgacagcaagcccagcctgttcagcgacagactgagcgacctgggcagaatcccccaccccagcatgagagtgggcgtgcccccccagaaccccagacccagcctgaacagcgcccccagccccttcaacccccagggccagagccagatcaccgaccccagacaggcccagagcagccccccctggagctacgaccagagctaccccagctacctgagccagatgaccagccccagcatccacagcaccacccccctgagcagcaccagaggcaccggcctgcccgccatcaccgacgtgcccagaagaatcagcgacgacgacaccgccaccagcgacttctgcctgtggcccagcaccctgagcaagaagagccaggccggcgccagcgagctgggccccttcagcgaccccagacagttccccagcatcagcagcctgaccgagagcagattcagcaaccccagaatgcactaccccgccaccttcacctacaccccccccgtgaccagcggcatgagcctgggcatgagcgccaccacccactaccacacctacctgccccccccctaccccggcagcagccagagccagagcggccccttccagaccagcagcaccccctacctgtactacggcaccagcagcggcagctaccagttccccatggtgcccggcggcgacagaagccccagcagaatgctgcccccctgcaccaccaccagcaacggcagcaccctgctgaaccccaacctgcccaaccagaacgacggcgtggacgccgacggcagccacagcagcagccccaccgtgctgaacagcagcggcagaatggacgagagcgtgtggagaccctactag

SEQ ID NO: 27889 - DNA, 1524 bp, Artificial Sequence
  derived and/or modified sequence
atgagaatccctgtggaccctagtacgagccgtcgattttcacccccttccagctccctccagcccggtaaaatgtccgatgttagccccgtggtagcagcccaacagcaacagcagcagcagcagcagcagcagcagcagcagcagcagcaacagcagcagcagcagcaagaggctgccgccgctgctgctgcagcagccgctgccgcagccgccgctgccgccgtccctcgcctccggccaccgcacgacaaccgcacaatggtagaaatcattgcggatcaccctgccgaactggttagaactgacagcccgaatttcctatgtagcgttctgccgagccactggaggtgcaataagacactaccagtggcctttaaggtggtggcactgggagaggtgcctgacgggacggttgtgacagttatggcaggtaacgacgagaattacagcgccgaactgagaaatgcatctgccgtcatgaagaaccaggtggccaggtttaacgacctccgattcgtcggaagatcagggaggggtaaaagctttacccttaccatcaccgtgtttaccaatcctccccaggtggccacataccacagagcaattaaggttaccgtggatggccctagagaaccgagaagacacagacaaaaattagacgattcaaagccaagcttattttccgaccggctctcggacctgggtcggatcccccacccaagcatgagagttggcgtcccaccccaaaacccaagaccctccttaaactccgctcctagcccgtttaacccgcaaggacagtctcagatcacagaccctcgacaggcccagtccagtccaccatggtcttacgatcagtcttacccttcctacctctctcagatgaccagcccctccatacactccaccacacctctgtcctccacaaggggcaccggattgccagcaatcacagatgtacctcggaggatttctgatgacgacactgccactagtgatttttgcctgtggccatctactctgtctaaaaaatctcaggccggcgctagcgaactcgggcctttcagcgaccctcgccagttcccgtccatttctagtttaaccgaaagccgctttagcaatccacggatgcactaccccgccaccttcacctacactcccccagtaacttctggtatgtcactgggtatgtccgccaccactcattatcatacatatctgccgcccccatatccagggagcagccagtctcagagcgggccattccaaacatctagcactccttacctgtactacgggacctctagcggatcctatcagttccccatggttccgggcggcgatcggtcaccatctcgtatgctcccaccatgtactactacctctaacggctcaacattactgaatcctaatctaccaaaccaaaacgacggggttgacgcggatggctcccattcctctagtccaactgtgctaaactccagtgggagaatggatgaatccgtgtggcgtccctactag

SEQ ID NO: 27890 - DNA, 1566 bp, Artificial Sequence
  derived and/or modified sequence
atggcaagcaattccctgtttagcacagtgactccttgtcagcagaacttcttctgggatccgtctacctccagaaggttctcaccaccctcaagttcactgcagccaggaaagatgtccgacgtcagcccagtagtggctgcccagcaacagcagcagcagcaacagcagcagcaacagcagcagcaacagcaacagcagcagcaacagcaggaggcggctgccgccgctgccgccgctgccgcggctgccgctgccgccgccgccgtccccagattgagacccccacatgacaaccgaacgatggtggaaatcatcgctgaccatccggctgaactcgtaagaacggactcccccaactttctttgcagcgtccttcccagccattggcgatgcaataagactctacctgttgcgttcaaagtggtggctttaggcgaggtacctgacggcacggtcgtgactgtgatggcaggcaacgatgaaaattactccgcagaattgagaaacgctagcgccgttatgaagaaccaggttgctagattcaatgatctgcgtttcgtgggtagaagtggccgaggcaaatcctttacattgactataactgtctttactaatcccccacaggtcgcgacataccaccgtgcaattaaggtgacagtcgacggaccacgggaaccccggagacaccgacagaagctcgacgactccaagccctccctgttttcagatcgcttgtctgatctggggaggatcccgcacccatccatgcgagtgggagttccacctcagaatcctagaccttccttaaacagcgccccctcccctttcaaccctcagggccagtcccagattacagaccctcggcaggcccagtctagcccaccttggtcatacgaccagagttacccttcatacctatcccaaatgacttctccctctatccattctaccaccccactgtcctccactcgaggcaccggcctgcctgcaatcacagacgtgccacgccggatatcagatgacgacacagccacctccgacttttgcctctggccgtccaccctcagcaagaagagccaagccggcgcttcggaactcgggccattttcagaccccagacagtttccatccatatcttcgctgaccgagagtcggttttcaaaccctaggatgcactatccagcaacatttacgtacactccaccagtgacctccggcatgtccttaggcatgtccgcaactacccactatcatacgtatctgccgcctccataccccgggtcctcacagagtcagtcagggcctttccaaacatcaagcacaccctacctgtactacggcacatcaagcggtagctatcagtttcccatggttcctggtggcgatcggtccccgtctagaatgctgcccccttgtaccacgacctccaatgggagtactttgttgaatccaaatctgcctaatcagaatgacggtgtggacgcagacggatctcactcatcgagtccgactgtgctaaattcttctggcagaatggacgaatcagtgtggaggccctactag

SEQ ID NO: 27891 - DNA, 1566 bp, Artificial Sequence
  derived and/or modified sequence
atggctagcaatagtctcttctcaactgtgactccatgtcaacagaattttttctgggatccatctacttcaaggcggttctcgcctccctcatcctcccttcagcccggtaagatgtcagacgtaagcccggtggttgccgcccagcaacagcaacaacagcagcagcagcaacagcagcaacagcaacaacagcagcagcagcagcagcaggaagcagccgccgcggcggcggctgccgccgccgccgcagccgcagccgcagcagttcctaggttgcggcctcctcacgacaatagaacgatggtcgagattattgccgatcatcccgccgaactcgtcagaactgattccccgaacttcttgtgctccgtcctcccttctcattggaggtgtaataaaacactcccagtcgccttcaaagttgtcgccctgggagaagtccccgacggtaccgttgtgacagtaatggccggaaatgatgagaactacagtgccgagttgcggaacgcttcagccgtgatgaaaaatcaggtcgctcgcttcaatgacctgagattcgtcggaaggagtggaagaggcaaatcctttactctcaccattacagtcttcactaacccaccacaagttgctacttatcaccgagccatcaaggtgaccgttgatggacccagggagccccgccgccaccgccagaagctggacgatagcaagccaagcctgtttagcgatcggctctcagacctcggaaggatcccacacccgtcaatgagagtaggagtcccgccacagaatccgagaccaagcctgaattccgcaccctcccccttcaacccccaggggcaatcacagattacagaccccaggcaggcccagtccagccctccctggagttacgaccaatcttatccgagctatctttctcagatgacctctccatccattcacagcactacccccctgtccagtacgcgcggtacaggactccctgccatcaccgatgtgccacggagaatttccgatgacgacaccgccacctccgatttctgcctttggccttccacactgtcgaagaagagccaagccggcgccagtgagctgggtccgttcagcgatccgcgacagttcccctctatttcatctctcaccgaaagtaggttttcaaacccaagaatgcattatccagccacctttacctatactccccccgttacttctggtatgtctcttggaatgagtgctactacacactaccacacctacctccctccgccttaccctgggagcagccagagccaatccgggccctttcagacaagttcaaccccctacctctattacggcacgtcatccgggagttaccagttccctatggtgcccggtggagacaggtcccccagccgaatgcttcctccatgtaccacgacatccaatgggtctactttactgaatccgaacctgcctaatcagaacgacggagtggacgcagacggctctcactcatcaagccccaccgttctgaacagctctgggagaatggatgaatccgtgtggcgaccgtattag

SEQ ID NO: 27892 - DNA, 1524 bp, Artificial Sequence
  derived and/or modified sequence
atgagaattcctgtggaccccagcaccagccgccgcttcagcccccccagcagcagcctgcagcccgggaagatgtctgatgtgtcccctgtggtggccgcccagcagcagcagcagcagcagcagcagcagcagcagcagcagcagcagcagcagcagcagcagcagcaggaggccgctgctgctgctgctgctgctgctgctgctgctgctgctgctgctgctgtgccccggctgcggccccctcatgacaacagaaccatggtggagatcatcgctgaccaccctgctgagctggtgaggacagacagccccaacttcctgtgcagcgtgctgcccagccactggcgctgcaacaagaccctgcctgtggccttcaaggtggtggccctgggggaggtgcctgatggcaccgtggtgacagtgatggctggaaatgatgagaactacagcgctgagctgagaaatgccagcgctgtgatgaagaaccaggtggcccgcttcaatgacctgcgctttgtgggccgcagcggccggggcaagagcttcaccctgaccatcaccgtcttcaccaaccccccccaggtggccacctaccaccgggccatcaaggtgacagtggatggcccccgggagccccggcggcaccggcagaagctggatgacagcaagcccagcctcttcagtgaccggctgagtgacctgggccgcatcccccaccccagcatgagggtgggcgtgcccccccagaacccccggcccagcctgaacagcgcccccagccccttcaacccccagggccagagccagatcacagacccccggcaggcccagagcagccccccctggagctatgaccagagctaccccagctacctgagccagatgaccagccccagcatccacagcaccacccccctgagcagcacccggggcaccggcctgcctgccatcacagatgtgccccggcgcatcagtgatgatgacacagccaccagtgacttctgcctgtggcccagcaccctgagcaagaagagccaggccggggccagcgagctgggccccttcagtgacccccggcagttccccagcatcagcagcctgacagagagccgcttcagcaaccccaggatgcactacccagccaccttcacctacaccccacctgtgaccagcggcatgagcctgggcatgtctgccaccacccactaccacacctacctgcccccaccctacccaggcagcagccagagccagagcggccccttccagaccagcagcaccccctacctgtactacggcaccagcagcggcagctaccagttccccatggtgcctggaggagacaggagccccagcaggatgctgcccccctgcaccaccaccagcaatggcagcaccctgctgaaccccaacctgcccaaccagaatgatggagtggatgctgatggcagccacagcagcagccccaccgtgctgaacagcagcggccgcatggatgagagcgtgtggaggccctactag

SEQ ID NO: 27893 - DNA, 1566 bp, Artificial Sequence
  derived and/or modified sequence
atggccagcaacagcctcttcagcacagtgaccccctgccagcagaacttcttctgggaccccagcaccagccgccgcttcagcccccccagcagcagcctgcagcccgggaagatgtctgatgtgtcccctgtggtggccgcccagcagcagcagcagcagcagcagcagcagcagcagcagcagcagcagcagcagcagcagcagcagcaggaggccgctgctgctgctgctgctgctgctgctgctgctgctgctgctgctgctgtgccccggctgcggccccctcatgacaacagaaccatggtggagatcatcgctgaccaccctgctgagctggtgaggacagacagccccaacttcctgtgcagcgtgctgcccagccactggcgctgcaacaagaccctgcctgtggccttcaaggtggtggccctgggggaggtgcctgatggcaccgtggtgacagtgatggctggaaatgatgagaactacagcgctgagctgagaaatgccagcgctgtgatgaagaaccaggtggcccgcttcaatgacctgcgctttgtgggccgcagcggccggggcaagagcttcaccctgaccatcaccgtcttcaccaaccccccccaggtggccacctaccaccgggccatcaaggtgacagtggatggcccccgggagccccggcggcaccggcagaagctggatgacagcaagcccagcctcttcagtgaccggctgagtgacctgggccgcatcccccaccccagcatgagggtgggcgtgcccccccagaacccccggcccagcctgaacagcgcccccagccccttcaacccccagggccagagccagatcacagacccccggcaggcccagagcagccccccctggagctatgaccagagctaccccagctacctgagccagatgaccagccccagcatccacagcaccacccccctgagcagcacccggggcaccggcctgcctgccatcacagatgtgccccggcgcatcagtgatgatgacacagccaccagtgacttctgcctgtggcccagcaccctgagcaagaagagccaggccggggccagcgagctgggccccttcagtgacccccggcagttccccagcatcagcagcctgacagagagccgcttcagcaaccccaggatgcactacccagccaccttcacctacaccccacctgtgaccagcggcatgagcctgggcatgtctgccaccacccactaccacacctacctgcccccaccctacccaggcagcagccagagccagagcggccccttccagaccagcagcaccccctacctgtactacggcaccagcagcggcagctaccagttccccatggtgcctggaggagacaggagccccagcaggatgctgcccccctgcaccaccaccagcaatggcagcaccctgctgaaccccaacctgcccaaccagaatgatggagtggatgctgatggcagccacagcagcagccccaccgtgctgaacagcagcggccgcatggatgagagcgtgtggaggccctactag

SEQ ID NO: 27894 - DNA, 1524 bp, Artificial Sequence
  derived and/or modified sequence
atgcggatccccgtggaccccagcaccagccggcggttcagccccccttcgtcttcattgcaacctggcaagatgtccgacgtcagccctgtggtcgctgctcagcagcagcaacaacaacagcagcagcagcaacaacagcagcaacagcagcaacagcagcagcagcaggaggctgcggcagcagcggctgccgcagctgcggccgcagccgccgccgcagccgtgcccaggctcagacctccacacgataacaggacaatggttgaaatcatagccgatcaccctgcagagttggttagaactgatagccccaacttcctctgctccgtgctcccttctcactggaggtgtaacaaaacgctgcccgtcgcgtttaaggtggtagccctgggcgaggtgcctgatggcacagtcgtgacggtgatggcaggaaacgatgagaactatagcgccgagctgaggaatgcatctgctgtcatgaaaaatcaagtggcgcgatttaacgacctgagattcgtcggtaggtctggcagaggtaaaagcttcactctgactattacggtcttcacaaaccctccccaagtcgctacataccacagagcgattaaggtaactgtggacggcccacgtgagccacgtcgacatcgccagaagctggatgacagcaagccttccctgttctcggacagattatctgacctcggcagaattccccacccatctatgagggtgggcgtcccaccacagaaccccaggcctagcctaaacagcgcgccttccccatttaatccacaaggacagtcccaaatcaccgatcccaggcaggcgcagtcttccccaccctggagttatgaccagagttacccctcctatttgtctcagatgactagcccttccattcactccaccaccccgttatccagcacccgagggaccgggctacctgctatcacagatgtaccacggaggatttctgacgacgacaccgcaaccagcgatttttgcctgtggccgtccaccctgagcaaaaagtctcaggctggcgcctcagagttggggcccttttctgatcccagacagtttcctagcatttcttcattgacggagagccgcttcagcaaccctagaatgcactatcccgcgacttttacttacacaccgccggtgactagcggcatgagcctgggcatgtcagcaactacgcactatcacacctacctgccacccccatacccggggagttcacagtctcagagcggccccttccaaacttcatctactccttatctttactatggcacttccagcgggtcgtaccaattccccatggtccccgggggggaccggagccccagtagaatgcttcctccatgcacaactacgtccaatggttccactcttttaaacccaaacctccccaatcagaatgatggggttgacgcagatggttctcactctagctcccctactgtgctcaatagcagtggacggatggacgaatccgtgtggcgcccatactag

SEQ ID NO: 27895 - DNA, 1566 bp, Artificial Sequence
  derived and/or modified sequence
atggccagcaacagcctgttcagcaccgtgaccccctgccagcagaatttcttctgggatcccagcacttccagacgattctcccctccctcatcgtcacttcagcctggtaagatgtccgacgtctcaccagtggtcgctgcacagcaacaacagcagcagcagcaacaacagcaacagcagcagcagcaacagcagcagcagcagcagcaggaagccgccgccgcagccgccgccgccgcggccgctgcagccgcagccgcagccgtccctagacttagaccccctcatgacaataggactatggtagagataatcgctgaccaccctgccgaactagtgcgcacagactcgccgaattttctgtgttctgtgctcccgtctcattggcggtgcaataaaacactccccgtagcatttaaagtggtggctctgggcgaagtccctgacggcactgtggtcaccgtcatggctggcaatgacgaaaattactcagccgagctgcggaacgctagcgctgttatgaagaaccaggtggcccgttttaatgatctcagattcgtaggccggtccggtagggggaaatctttcaccttaacaatcaccgtgttcactaaccctcctcaggtcgctacctaccaccgggccattaaggtgacggtggacggcccacgggaacctaggaggcacaggcaaaaactagatgacagtaagccctccctgttcagcgaccgcctgtctgacctcggaagaattccccaccctagtatgcgtgtgggcgtgccccctcagaacccccgcccctccctcaactctgctcctagcccatttaatccgcagggacagagccaaatcactgatcccaggcaggcccagagctcccccccttggagctatgatcagtcttaccctagctacttgagccagatgacctccccttccattcattctaccacgcctctgagcagtacacggggaaccggtctgccggccataaccgatgtgcctcgacggatcagcgatgatgataccgccacttccgatttctgcctgtggcccagcacactatcaaagaagtcccaagctggcgcatccgaactcgggcctttttctgatccaaggcagttcccttccatttcatcactgacagagtctagattttcgaatccccgcatgcattacccagccacctttacttatactccccctgttacttcggggatgagtctgggcatgagcgccaccacacattaccacacttatctgccaccgccttacccaggatccagtcagtcccaatcggggcctttccagactagcagcactccctacttatactacgggaccagttctggctcttatcagttcccaatggtacctggcggcgatagatcaccatcgagaatgctgccaccttgtactaccactagcaatgggagcaccttactcaaccccaatttgcctaaccagaacgatggagtggacgccgatggctcccattcgtcttcacctactgtgctgaatagctctggtcgcatggatgagagtgtctggaggccatactag

SEQ ID NO: 27896 - DNA, 1566 bp, Artificial Sequence
  derived and/or modified sequence
atggccagcaacagcctgttcagcaccgtgaccccctgccagcagaattttttctgggatcccagtaccagccgccgatttagtccccctagttcatctctgcagcccggtaagatgtctgacgtctcccccgtggtggccgcccagcagcagcagcagcagcagcagcagcagcaacagcagcagcagcagcagcaacagcaacagcagcaggaggctgccgcggcagccgcagctgccgcagcagccgccgccgcagctgctgcagtgcctcgtcttaggcctcctcacgataatcggacgatggtggagattatcgcggaccatccggccgagttggttcgcacagactctccaaacttcctctgcagtgtcctgccatcccattggcgctgcaataagacccttccagtggcattcaaggtcgtggctctcggggaggtgccagacggcaccgtcgtcaccgttatggccgggaacgatgaaaactatagcgcagagttgcgcaacgcaagcgctgtgatgaaaaaccaagtggccaggtttaatgatctcagatttgtgggacgatcggggcgcggaaaatcttttaccttgacgattacagtcttcacaaaccctcctcaagtcgcaacctaccacagggcaatcaaggtgaccgttgatggtccccgtgaacccagaaggcatcgccagaagctcgacgactctaagccgagcctgttttctgacaggctgagcgacttaggaagaatcccccacccgagtatgcgggttggagttccccctcagaatccacgtccaagcctcaatagcgcgccaagtcccttcaacccacaaggtcagtctcaaattacagacccacgacaggctcaatcttctcccccatggagctacgatcagtcgtatccatcctatctgagccaaatgactagtccatctatccactccacgacaccgctcagtagtacacgaggaaccggcctccccgctattacagacgtcccccgccgaatttccgatgatgacaccgccactagtgacttctgcctctggcccagcacattgtcaaaaaagagtcaggcaggcgctagcgagctagggcctttttcagatccacggcaattccccagtatctccagcttgacagagtctcgcttctcaaaccctaggatgcattatccagcaacgtttacatacactccaccagttacttctggcatgagtctcgggatgtctgctactacccattatcacacctatctgcctcctccctaccccggaagcagtcagtcgcaatccgggccctttcaaacatcatccactccttatctctactacgggacatcgtcaggttcataccagttccccatggttccgggcggtgaccggagcccgtctcgaatgctgcctccctgtactactacaagcaacgggtcgaccttactgaatccaaatctccctaatcaaaacgatggcgtggacgctgatggatcgcacagttcatccccaaccgtgctgaacagtagtggcaggatggacgagtcggtttggcggccctactag

SEQ ID NO: 27897 - DNA, 1524 bp, Artificial Sequence
  derived and/or modified sequence
atgaggataccagtggaccccagtacaagccgccgattttcccctccttcgtcttccctccagccgggaaagatgtcagatgtgtctccagtcgtggcggctcaacagcagcagcagcagcagcagcagcagcagcagcagcagcaacaacagcaacagcaacagcaacaggaggcagccgctgcagccgctgcagctgcggcagccgctgccgcagcggctgcggtgcccagactcagaccaccccacgacaaccgtacaatggtggagataattgctgaccatccagctgagcttgttcgcacagattctcctaactttctctgtagtgtgttgcctagccactggcgctgcaataagaccttgcccgtggcttttaaggtcgtggccctgggggaggtcccggatggcacagtggtgactgtgatggctggcaacgacgagaactatagtgcagaactgcgtaatgcatcagcggtgatgaagaatcaggtcgcccgatttaacgatctccggttcgtgggtcgttcaggacgcggtaaatcctttactcttaccatcactgtgttcacaaatcccccacaggtggcaacgtatcaccgcgcaatcaaggtaacagtggatggccctagagagcccaggagacacagacaaaaattggatgattcaaagccaagcctcttctcagaccgcctgagtgacctaggtcggattccacatccttctatgagagtcggggtcccacctcagaaccctcgcccaagtttaaacagcgccccaagtccgtttaaccctcaaggacaaagtcagatcactgatcctcgtcaggcccagtcctcccctccttggtcctacgaccagagctaccctagctatcttagtcagatgacatcaccatccatccattcaaccacccccctgtcatccacccgcggaaccggccttccagccatcactgatgttccaaggcggatctccgatgacgacacggctacctccgacttctgtctttggccctccacgctgtcaaagaagagtcaagcgggtgcaagtgagttaggcccttttagtgatccaagacaattcccaagtatttcaagcttgaccgagagtcgcttctccaatcctcgcatgcattacccggcaaccttcacctacacgccccctgtgacgagcggcatgtctctcgggatgtcagccacaacgcattatcatacatacctaccaccaccctatccgggaagcagtcagagccagtctgggccttttcagacaagctccacaccctatctgtattacgggactagttctggatcttatcaattcccaatggtccctggtggcgaccgatccccttcccggatgctgccgccttgtactaccacctctaatggctcaacgctgttgaatccaaaccttcctaaccagaacgacggagtggacgccgatgggtcccatagctcttcaccaacagtgctcaactcctcaggcagaatggacgaatctgtctggaggccctactag

SEQ ID NO: 27898 - DNA, 1566 bp, Artificial Sequence
  derived and/or modified sequence
atggcatccaacagcttattcagcacggtgactccctgccaacagaattttttctgggacccatctacttcacggaggttttctccaccatcaagctccctgcagccaggcaagatgagcgatgtgagccctgtagtagccgctcagcaacaacagcagcagcagcagcagcagcagcaacagcaacagcagcagcaacagcaacaacaacaggaagccgctgccgcagcggcagctgctgccgcagccgctgctgcagcggcagccgttccaagattaagaccgcctcatgataaccgcactatggtcgaaataatcgcagatcatcctgcagagctagtacgtactgactcgcccaacttcctctgcagcgttctgccctctcactggcgatgtaacaaaacattaccagttgcgtttaaggtcgtggccctcggagaggtacccgacggaactgtggtgactgtcatggccggtaatgatgagaactactctgcagaactgcggaatgcatcagcggtgatgaaaaatcaggtggcccgttttaacgatcttcgcttcgtcggacgaagtggaagagggaagagcttcaccctgaccatcactgtttttacaaacccaccccaggtggctacttaccaccgtgctatcaaggtgaccgttgatggcccacgagaaccacgccgacatagacagaagcttgatgattccaaaccgtcgctattcagtgaccggctgtcagaccttggaaggatccctcaccccagtatgagagtcggagtcccaccacagaatccaaggccttcattaaacagtgcaccctccccctttaacccacaaggccagagtcagatcacggatccaagacaagcccaatctagccctccctggtcctatgatcaatcgtacccctcctacctgtctcagatgacatcgccatcgattcacagtactactcctctgtccagcacaaggggaaccggccttccggcaatcacagacgtacccaggcgcatttctgatgatgacaccgcaacaagcgatttctgtctgtggccttccacactgtcaaaaaagtcccaggccggagcgtcagaattggggcctttttcagaccccagacagttcccctccatcagttcattgaccgaatcgcgtttcagcaatcccaggatgcactaccccgctacatttacttatacaccaccagtaacctcaggtatgtctctgggcatgtcagccactacccactaccatacctacctgcctcccccataccctggtagcagccagtctcaaagtggcccatttcagacaagtagtaccccctacctgtactatggaacttcaagtggatcttatcagtttcccatggttcctggcggtgatagatccccctccaggatgttgcccccttgcactacaactagcaatgggtcaaccctgttgaatccaaatctccctaatcagaacgatggagtcgatgcagatggatcacactccagctcccctactgtcttgaacagttctgggagaatggacgaaagcgtgtggagaccgtattag

SEQ ID NO: 27899 - DNA, 1566 bp, Artificial Sequence
  derived and/or modified sequence
atggcaagcaacagcctgtttagtacggtgacgccctgccaacaaaactttttctgggacccctccacttcccgacgtttcagtccacctagctccagtctgcaacctggcaagatgagtgatgtctctccggtagttgcagctcagcaacagcagcaacagcagcagcagcagcagcagcaacagcagcagcaacagcaacaacagcaacaggaagccgctgccgctgctgcggctgctgcggcagctgcagccgcagctgccgcagttccccgattgcgccctccacacgataatcgaacaatggtcgagattatcgccgatcatccggctgagctcgttcgcactgattccccaaatttcttgtgttccgtcctgccctctcattggagatgcaacaaaacgctgcccgtcgcatttaaggtggtggccctgggagaggtccccgatggtaccgtggttactgtcatggcgggtaacgacgagaattactcagccgaactgcgtaacgcttccgcagttatgaaaaaccaggtggcgaggtttaacgacctcaggtttgttggtaggtccgggaggggaaaaagttttactctcactatcactgtctttaccaatccaccacaggtggccacttatcatagggctatcaaagtgacagtggatgggcctagagagccccgacgccatcgccagaagctggacgatagtaagcccagtctcttcagtgaccggctgtccgatctggggagaatccctcatccttccatgcgtgtgggagtgccccctcagaacccaaggccctcactcaattcagccccttctccatttaatccacaggggcagagtcagatcacagatccacgacaggcacagtcctctcctccctggtcttatgatcagagctatccctcatacttgtcccagatgacaagcccaagtatacatagcaccacccctctcagcagcaccagggggaccggactgccagctatcacagatgttcccagaagaatcagcgatgacgacaccgccacatccgatttttgcctgtggcccagcactctttctaaaaaatcccaggcaggtgcgtcagagctcggtccatttagcgatcctcgtcaatttccatcaatctcttcacttaccgaatctcgcttctctaaccctcgcatgcattatcctgctactttcacttatactcctccagtgaccagtgggatgtctctaggaatgtctgcaactacgcattaccacacatacctgccgcctccctatcccggatcaagtcagagccagagcggaccttttcaaactagttctacgccatatttgtattatggtacctccagcgggagttatcagttccccatggtcccaggaggagatcgtagcccgagccggatgcttccaccttgcactacaacaagcaatgggagcactctgctgaatcccaatctacccaatcagaacgacggagttgacgccgatggctcgcatagttcatcaccgactgtgctgaacagtagcggaagaatggatgagtctgtttggagaccctactag

SEQ ID NO: 27900 - DNA, 5700 bp, Artificial Sequence
  derived and/or modified sequence
ggactccaactgggagggggcgccagcgcacccaggacgcggtgccccaagggaccccattccaagctgcaaactcaagtcccccgcctccccaggccaaacacacccccgcgcccgttcgcagctgccaccccgggtgttccaaagactccggcaaagatctgcgcctcccgggtctccctacccgccagcccgactgcgccgcatcgccagactctgttggcccatcagactccgcccggcagtcggcctcatcaaacttgatttctcacctcctcagccccatcacctccatcctctttccccccgtctcgccttcacccccccaatttcctccttgcccctcatttccaccctcctccccctcccccggccacttcgctaacttgtggctgttgtgatgcgtattcccgtagatccgagcaccagccggcgcttcagccccccctccagcagcctgcagcccggcaaaatgagcgacgtgagcccggtggtggctgcgcaacagcagcagcaacagcagcagcagcaacagcagcagcagcagcagcaacagcagcagcagcagcaggaggcggcggcggcggctgcggcggcggcggcggctgcggcggcggcagctgcagtgccccggttgcggccgccccacgacaaccgcaccatggtggagatcatcgccgaccacccggccgaactcgtccgcaccgacagccccaacttcctgtgctcggtgctgccctcgcactggcgctgcaacaagaccctgcccgtggccttcaaggtggtagccctcggagaggtaccagatgggactgtggttactgtcatggcgggtaacgatgaaaattattctgctgagctccggaatgcctctgctgttatgaaaaaccaagtagcaaggttcaacgatctgagatttgtgggccggagtggacgaggcaagagtttcaccttgaccataaccgtcttcacaaatcctccccaagtagctacctatcacagagcaattaaagttacagtagatggacctcgggaacccagaaggcacagacagaagcttgatgactctaaacctagtttgttctctgaccgcctcagtgatttagggcgcattcctcatcccagtatgagagtaggtgtcccgcctcagaacccacggccctccctgaactctgcaccaagtccttttaatccacaaggacagagtcagattacagaccccaggcaggcacagtcttccccgccgtggtcctatgaccagtcttacccctcctacctgagccagatgacgtccccgtccatccactctaccaccccgctgtcttccacacggggcactgggcttcctgccatcaccgatgtgcctaggcgcatttcagatgatgacactgccacctctgacttctgcctctggccttccactctcagtaagaagagccaggcaggtgcttcagaactgggccctttttcagaccccaggcagttcccaagcatttcatccctcactgagagccgcttctccaacccacgaatgcactatccagccacctttacttacaccccgccagtcacctcaggcatgtccctcggtatgtccgccaccactcactaccacacctacctgccaccaccctaccccggctcttcccaaagccagagtggacccttccagaccagcagcactccatatctctactatggcacttcgtcaggatcctatcagtttcccatggtgccggggggagaccggtctccttccagaatgcttccgccatgcaccaccacctcgaatggcagcacgctattaaatccaaatttgcctaaccagaatgatggtgttgacgctgatggaagccacagcagttccccaactgttttgaattctagtggcagaatggatgaatctgtttggcgaccatattgaaattcctcagcagtggcccagtggtatctgggggccacatcccacacgtatcaatatatacatatatagagagagtgcatatatatgtatatcgattagctatctacaaagtgcctattttttagaagatttttcattcactcactcagtcatgatcttgcagccataagagggtagatattgagaagcagaaggctcaagagagacaattgcaatcgagcttcagattgtttactatttaagatgtacttttacaaaggaacaaagaagggaaaaggtatttttgtttttgttgtttggtctgttatcatcaataacctgttcatatgccaattcagagaggtggactccaggttcaggagggagaagagcaaagccgcttcctctctgtgctttgaaacttcacaccctcacggtggcagctgtgtatggaccagtgccctccgcagacagctcacaaaaccagttgaggtgcactaaagggacatgaggtagaatggatgcttccatcacagtaccatcattcagaataactcttccaatttctgctttcagacatgctgcaggtcctcatctgaactgttgggttcgtttttttttttttttttcctgctccaagaaagtgacttcaaaaataactgatcaggatagattattttattttactttttaacactccttctccccttttcccactgaaccaaaaagaaatcccatccctaaaacctgccttctccttttatgcaaaactgaaaatggcaatacattattatagccataatggtatagatagtgattgcgtttggctatgtgttgttttctttttttttaaattatgaatatgtgtaaaatctgaggtaacttgctaacgtgaatggtcatataactttaaagatatatttataattatttaatgacatttggacccttgaaacatttcttagtgtattgatatgttgacttcggtctctaaaagtgctctttattaaataacaaatttcttcagtggtctagagccatatctgaaatattgctaagcaatttcagttcatccaggcacaatgtgattttaaaaaatacttccatctccaaatattttagatatagattgtttttgtgatgtatgaaggaaatgttatgtttagttctttcagatctttgaatgcctctaacacagctttgccttctaaagcggtaattagggatttaaaaaacaacctttagccctttatcagcatgaaatgctggagtgatgtggttttctaatttctttggggtaattatgactcttgtcatattaaaaagacaagcacaagtaaatcattgaactacagaaaaatgttctgtggtttcatagttaagcaaaactctaaatcgccaggcttcatagcaaagacatagtcagctaaaagccgcacatgtggatagagggttcaattatgagacacctagtacaggagagcaaaattgcaccagagattcttaaccaaccagccttaccaaacaacacaacaggggaaccccaatctgccttacccaaggccccactggcagctttccacagaatttgcatttagaggagcagaatgacatcactgtcctttgggagtaggtcctctgaaaaggcagcaggttccagcaggtagctgagctgagaggacatatggcccacggggacctacagacagcctttgacatttgtatttcttacaatggagggccaaggagggcaaggggctgtggagtttggtgtctactagtgtgtatgaatttgagctagagtccttctgtggcatgcactttgaccactcctggcagtcacatggcagatttccaagtgcaaatccttaatccaaacaaggatcatctaatgacaccaccaggccaatccctgctctcctccccgaaaagtcagggtcccttcattggaatcctccacccacccaagcagaatttagcagagatttgccttcaaaccctaacggcccccttgttctctggtccttctcaaacccacctttgtaggccacccagcattgcaggacagcgtgtggggcagctggacctgtgcttcctgcctgggagtctcccttggaattcatcctgactccttctaataaaaatggatgggaaagcaaaacactttgccttctaaaggccgtataccaagtatgcttagataaataagccacttttctattacttaagtaagaaggaagtagtaattgatactatttattgtttgtgtgtggtagcttgaagcacaccactgtccatttatttgtaagtgtaaaatatgtgtgtttgtttcagcagcacttaaaaaagccagtgtctggttacacatttcaattttaattaattgacataaaaatgctaccgccagtgccagctgcatcctatttaattaaaaaggtactatatttgtacattattttttaatgttaaaagggcttttttaagtttacagtacacataccgagtgactttagggatgcttttgtgttgaaatgttactatagtggctgcaggcagcaacccagaaacactttagaagctttttttccttgggaaaaattcaagcacttcttccctccaccctcactccaaccaccccaatgggggtaattcacatttcttagaacaaattctgcccttttttggtctagggattaaaattttgtttttctttctttctttttttttttttttcactgaacccttaatttgcactgggtcatgtgtttgatttgtgatttcaagaccaaagcaaagtcttactactactgtggaaccatgtactagttcctgggaattaaaatagcgtggttctctttgtagcacaaacattgctggaatttgcagtcttttcaatgcagccacatttttatccatttcagttgtctcacaaattttaacccatatcagagttccagaacaggtaccacagctttggttttagattagtggaataacattcagcccagaactgagaaactcaacagattaactatcgtttgctctttagacggtctcactgcctctcacttgccagagccctttcaaaatgagcagagaagtccacaccattagggaccatctgtgataaattcagaagggaggagatgtgtgtacagctttaaggattccctcaattccgaggaaagggactggcccagaatccaggttaatacatggaaacacgaagcattagcaaaagtaataattatacctatggtatttgaaagaacaataataaaagacacttcttccaaaccttgaatttgttgtttttagaaaacgaatgcatttaaaaatattttctatgtgagaattttttagatgtgtgtttacttcatgtttacaaataactgtttgctttttaatgcagtactttgaaatatatcagccaaaaccataacttacaataatttcttaggtattctgaataaaattccatttcttttggatatgctttaccattcttaggtttctgtggaacaaaaatatttgtagcattttgtgtaaatacaagctttcatttttattttttccaattgctattgcccaagaattgctttccatgcacatattgtaaaaattccgctttgtgccacaggtcatgattgtggatgagtttactcttaacttcaaagggactatttgtattgtatgttgcaactgtaaattgaattatttggcatttttctcatgattgtaatattaatttgaagtttgaatttaattttcaataaaatggcttttttggttttgtt

SEQ ID NO: 27901 - protein, 333 aa, Artificial Sequence
  derived and/or modified sequence
MESSGNPESTTFFYYDLQSQPCENQAWVFATLATTVLYCLVFLLSLVGNSLVLWVLVKYESLESLTNIFILNLCLSDLVFACLLPVWISPYHWGWVLGDFLCKLLNMIFSISLYSSIFFLTIMTIHRYLSVVSPLSTLRVPTLRCRVLVTMAVWVASILSSILDTIFHKVLSSGCDYSELTWYLTSVYQHNLFFLLSLGIILFCYVEILRTLFRSRSKRRHRTVKLIFAIVVAYFLSWGPYNFTLFLQTLFRTQIIRSCEAKQQLEYALLICRNLAFSHCCFNPVLYVFVGVKFRTHLKHVLRQFWFCRLQAPSPASIPHSPGAFAYEGASFY

SEQ ID NO: 27902 - protein, 36 aa, Artificial Sequence
  derived and/or modified sequence
MESSGNPESTTFFYYDLQSQPCENQAWVFATLATTV

SEQ ID NO: 27903 - DNA, 1002 bp, Artificial Sequence
  derived and/or modified sequence
atggagtcttcaggtaatcccgagtccactaccttcttctattatgatctccagtcacaaccctgtgaaaaccaggcttgggtgtttgcaacactggccaccaccgtattgtattgccttgtgttcctgctgagtctcgtaggcaactccctggttctgtgggtactggttaaatacgagtcccttgagtctcttaccaacatctttatcctgaacctatgcctctcagatctcgtcttcgcttgcttacttccagtgtggatctctccataccattggggatgggttctgggggatttcctgtgcaaactgctgaacatgattttttccattagtttatattctagcatattttttctgaccattatgactatacatagatacctgtcagtggtatcccccctgtctactctgagagtgcctaccctgcgctgccgggtgctcgtcaccatggccgtgtgggtagcctcaatcctctcaagcattttggacactatcttccacaaggtgctgtcctctgggtgtgattacagcgagttaacctggtatctcacaagcgtctaccaacacaacctttttttcctgctgtcactcggtattatcttgttctgttatgtcgaaatactccgcaccctgttccgcagcagaagtaaacgcagacacagaaccgtgaagctgatttttgctattgttgtggcctactttctcagctggggtccgtataatttcacattgtttttgcaaacgctcttccggactcagattatccggagctgtgaggctaagcagcagctagaatatgcactcctgatctgcagaaatctggccttttcccactgctgttttaatcccgtcctctacgtcttcgtgggcgtcaagttccgcacgcacttaaaacatgtgctcagacaattctggttttgtcgcctacaggccccgagccctgctagcattcctcactctcctggggcttttgcctatgaaggggcttcattctattag

SEQ ID NO: 27904 - DNA, 111 bp, Artificial Sequence
  derived and/or modified sequence
atggagagcagcggtaatcctgagagcaccacgttcttttattatgatctgcaatcacaaccgtgtgaaaatcaagcctgggtgtttgctacacttgccacaacagtgtag

SEQ ID NO: 27905 - DNA, 1002 bp, Artificial Sequence
  derived and/or modified sequence
atggaatcttccggtaatcctgagagcaccactttcttctactacgacctgcagtctcagccatgcgaaaatcaggcctgggtcttcgcaaccctggccaccacagtcctgtactgcctggtgttcctgctcagtctggtgggtaactccttagtgttgtgggtgctggtgaaatacgagtcgctcgaatcactcactaatatattcattctgaacctttgcttgagtgacttggtgttcgcctgtctccttcccgtttggataagtccctaccattgggggtgggtccttggtgattttctatgcaagttgttgaacatgattttttccatcagtctgtacagctccatcttctttctcactatcatgactatccaccgctacttgtccgtcgtttcacctctaagcacactgcgggtgccaactctgcgttgccgcgtgctggtaactatggcggtgtgggtcgccagcatcctgagcagcatcttggatacaattttccacaaggtgctgagcagcgggtgcgattactcagaattaacctggtatctcacttctgtataccagcataacctgttcttcctgttaagcctcggcattattctcttttgctacgtcgagatactaagaaccctgttccgatcccgctcaaaaagaagacaccggactgttaaactgatcttcgcgatcgtggtcgcgtacttcctctcctggggtccatacaactttaccctgtttctccagacactctttaggacccagattatcaggtcctgcgaggccaaacagcagctcgagtatgcccttttgatctgccgcaatctggcctttagccattgttgctttaatccggttttatatgtgttcgtgggcgtgaagtttagaacacatctgaagcatgttttgaggcaattctggttttgccgacttcaggcaccttctcccgccagtattccgcattcgccaggtgcctttgcctacgaaggggcctcattttattag

SEQ ID NO: 27906 - DNA, 1002 bp, Artificial Sequence
  derived and/or modified sequence
atggagagcagcggcaaccctgagagcaccaccttcttctactatgacctgcagagccagccctgtgagaaccaggcctgggtgtttgccaccctggccaccaccgtgctgtactgcctggtgttcctgctgagcctggtgggcaacagcctggtgctgtgggtgctggtgaagtatgagagcctggagagcctgaccaacatcttcatcctgaacctgtgcctgagtgacctggtgtttgcctgcctgctgcctgtgtggatcagcccctaccactggggctgggtgctgggggacttcctgtgcaagctgctgaacatgatcttcagcatcagcctgtacagcagcatcttcttcctgaccatcatgaccatccaccgctacctgtctgtggtgagccccctgagcaccctgcgggtgcccaccctgcgctgccgggtgctggtgaccatggctgtgtgggtggccagcatcctgagcagcatcctggacaccatcttccacaaggtgctgagcagcggctgtgactacagcgagctgacctggtacctgacctctgtgtaccagcacaacctcttcttcctgctgagcctgggcatcatcctcttctgctacgtggagatcctgcggaccctcttccgcagccgcagcaagagaagacacaggacagtgaagctgatctttgccatcgtggtggcctacttcctgtcctggggcccctacaacttcaccctcttcctgcagaccctcttccgcacccagatcatccgcagctgtgaggccaagcagcagctggagtatgccctgctgatctgcaggaacctggccttcagccactgctgcttcaaccctgtgctgtatgtgtttgtgggcgtgaagttccgcacccacctgaagcacgtgctgcggcagttctggttctgccgcctgcaggcccccagccctgccagcatcccccacagccctggggcctttgcctatgaaggagccagcttctactag

SEQ ID NO: 27907 - DNA, 111 bp, Artificial Sequence
  derived and/or modified sequence
atggagagcagcggcaaccctgagagcaccaccttcttctactatgacctgcagagccagccctgtgagaaccaggcctgggtgtttgccaccctggccaccaccgtgtag

SEQ ID NO: 27908 - DNA, 1002 bp, Artificial Sequence
  derived and/or modified sequence
atggagagcagcggcaaccccgagagcaccaccttcttctactacgacttacagagtcagccttgcgagaaccaggcctgggtgttcgctacactggctacgaccgtgctatactgtctcgtttttctactgtcattagtcggtaattctctagtcctgtgggttcttgtaaaatacgagtccctggagtctctcactaatatctttattctgaacctttgtctttcggaccttgtgttcgcctgcttactgccagtctggataagcccctatcattggggatgggtactgggggatttcctgtgcaagctgcttaatatgatctttagcattagcctttactccagcattttcttcctgacgattatgacaattcaccgatacctgagtgtggtcagcccgctgtctactctgagagtaccaacactcagatgccgagttcttgtgactatggcagtatgggtggcctctattttgtcttcaatcctggatacaatctttcacaaggtcttgagctccgggtgcgattactctgaactcacctggtacctcacttcagtatatcagcacaatctcttctttctgctgagtttaggaattattctgttctgctacgttgaaatcctgagaacccttttccggtcccgcagcaagcgaaggcataggacggtcaaacttatttttgccattgttgtcgcctatttcctgtcctggggaccgtacaattttacactgtttctgcagactctcttccggacacaaatcattcgaagttgtgaggcgaaacagcagctggaatatgccctactcatctgtcggaacctcgcattttctcactgttgttttaatccagtgctgtatgtgtttgttggggtgaaatttcgtacccacctgaagcatgtattgagacaattctggttctgcagactgcaggctccgtcccccgcgagtattcctcattctcccggtgcctttgcatacgaaggagccagcttctactag

SEQ ID NO: 27909 - DNA, 111 bp, Artificial Sequence
  derived and/or modified sequence
atggagagcagcggcaaccccgagagcaccaccttcttctactacgacctgcaatcgcagccctgcgaaaaccaagcctgggttttcgccacactcgccacgacagtgtag

SEQ ID NO: 27910 - DNA, 1002 bp, Artificial Sequence
  derived and/or modified sequence
atggagagcagcggcaaccccgagagcaccaccttcttctactacgatttacagagtcagccttgcgagaaccaagcttgggtgttcgccaccctggctaccaccgtgctttattgtctcgtgtttttgctgtcactcgttggtaatagcttagtcctatgggttctcgtaaaatacgaaagcctagagtctctgacaaacatttttatcttaaacctgtgtctgtctgacctggttttcgcctgcctgctgcctgtgtggataagtccgtaccattggggatgggtactcggcgactttctctgcaagttgctcaacatgatttttagcattagcttatactcaagcatcttttttctgacaataatgaccatacaccgatacctgtctgtcgtgagtccactcagcaccctaagagtgcctactttgcgctgcagggtgctggtcactatggcagtgtgggtggcgagcattctcagctccattctagataccatcttccataaagtgctgtccagcggctgtgactacagcgagctaacatggtatttgactagtgtctaccagcacaacctgttctttctgctgtccttaggtatcatcctcttttgctatgtggagattcttagaactctctttcggagcagatcaaagaggcggcaccgaactgtaaaacttatctttgccatcgtggtcgcctacttcttatcatggggaccctacaacttcacgttgttcttgcagactctcttcagaacacagataattagaagttgtgaagcaaagcaacagttggagtacgcactgctaatctgccggaatctagcattcagtcattgttgctttaatccagtgctctatgtgtttgtgggggtcaaattcagaacgcaccttaaacacgtcttgagacagttttggttttgcaggctgcaagctccttccccagctagtataccccattcaccaggagctttcgcctatgaaggggctagtttttactag

SEQ ID NO: 27911 - DNA, 1002 bp, Artificial Sequence
  derived and/or modified sequence
atggaatctagcgggaatccagaaagcactacctttttctactatgacttacagtcgcagccgtgcgaaaatcaggcctgggtgttcgctactctggccacgaccgtcttatactgcttagtctttctcctttccctagttgggaactcacttgtcctgtgggtattagtgaaatatgagagccttgagtcattgactaatatctttattctcaatctgtgcctgagtgacctggtcttcgcctgcctgcttcctgtgtggatttcgccttaccactggggatgggtgctgggagacttcctgtgcaaactgcttaatatgattttcagcattagtctctatagttccatattttttcttaccattatgaccatccaccgctaccttagcgtagtgtcccccttaagtaccttgagagttcctacactgcggtgccgtgttctggtgacgatggccgtttgggtcgcttcaatcctgtctagcatcttagataccattttccacaaagtcctgagctctggttgtgactactccgaattgacctggtacctcacaagcgtgtatcagcacaatctgttttttctgttgagtctggggataattctcttctgttatgtagaaatcctgaggacattgtttcggtcaaggtcaaaaagacgtcaccgcacagtgaaactcatcttcgcaatcgtggtcgcttatttcctttcctggggtccttataattttaccttgttcctacaaaccctgtttcgcacccaaatcatcaggtcatgtgaagctaagcagcagctggaatatgccttgctgatctgcaggaatctggctttctctcattgttgcttcaaccccgttctttatgtttttgtgggagtgaaatttagaacacatctaaaacacgtgctgcgacagttttggttttgccgtctccaagctccatcacccgcttcaatcccccactccccgggagctttcgcctacgagggcgcttctttttactag

SEQ ID NO: 27912 - DNA, 111 bp, Artificial Sequence
  derived and/or modified sequence
atggagagcagcggaaatcctgagtctacaacatttttttattatgatctgcagtcccagccatgcgagaaccaggcttgggtgtttgccacattggctacaaccgtgtag

SEQ ID NO: 27913 - DNA, 1002 bp, Artificial Sequence
  derived and/or modified sequence
atggagtcatctggaaacccagagtctacaacattcttctattacgatcttcaaagccagccctgtgagaatcaggcatgggtgtttgctactctggcaaccacagtgctgtactgtctggtgttcttgctgtccttggtggggaattccctggtcttgtgggtactggtcaaatatgagagcttagagagtctcactaacatcttcatacttaatctttgcctgagtgacctggtgttcgcatgcctcctgcctgtgtggatctcaccctaccattgggggtgggtcctcggcgactttctctgtaagctgctgaatatgattttcagtattagcctctactccagcatcttcttcctgactataatgaccatccaccgttacctgtctgtggtgtcaccgctgtctacattaagagtgcccacgctccggtgccgagttcttgtaacaatggccgtctgggtggcaagcatcctgtcaagcatcttagatactatcttccataaggtcttgagtagcggctgcgactacagcgagttgacctggtacttgacaagcgtgtaccaacacaacctcttctttcttctttctcttggcatcatattattctgctacgtcgagatcctccggaccctgtttcggtccagatctaagcgcaggcaccggacagtgaagctgatcttcgctatagtcgtggcttactttctgagttggggaccttataatttcaccctgtttctgcagactctgttccgtactcagatcatccggtcatgtgaggccaaacaacagctcgagtacgcactgctgatctgtcgtaacctggccttcagccattgctgtttcaaccccgtgctgtacgtgttcgtcggggtaaagttcaggactcatctgaagcacgtgttgaggcagttctggttctgtagactgcaggcgcctagtcccgcatcaattcctcacagccccggtgcctttgcctatgagggagcatctttctattag

SEQ ID NO: 27914 - DNA, 5281 bp, Artificial Sequence
  derived and/or modified sequence
gttcatctggattcatggagtaggcgtttctattcaaacatgcaggctcttttctttatccagggcttgcagcttgattttcaggctgttcttggtttgaaggagttccaccaaggatccaccctaactgcctgcctgactggcttcttccttcctcctctctcactagctgtccccctctggccccctggctctctctgagactcctcccatcctcctcctccagccttctgggcaggacaggtgtttcagtttctttaagtgaaatatgaaacagagaagcaccatttctgcctcaagacgcatgtaaagaggtgtagattcagatgctctaaacgtccctgccatctggtccagatggagtcctcaggcaacccagagagcaccacctttttttactatgaccttcagagccagccgtgtgagaaccaggcctgggtctttgctaccctcgccaccactgtcctatactgcctggtgtttctcctcagcctagtgggcaacagcctggtcctgtgggtcctggtgaagtatgagagcctggagtccctcaccaacatcttcatcctcaacctgtgcctctcagacctggtgttcgcctgcttgttgcctgtgtggatctccccataccactggggctgggtgctgggagacttcctctgcaaactcctcaatatgatcttctccatcagcctctacagcagcatcttcttcctgaccatcatgaccatccaccgctacctgtcggtagtgagccccctctccaccctgcgcgtccccaccctccgctgccgggtgctggtgaccatggctgtgtgggtagccagcatcctgtcctccatcctcgacaccatcttccacaaggtgctttcttcgggctgtgattattccgaactcacgtggtacctcacctccgtctaccagcacaacctcttcttcctgctgtccctggggattatcctgttctgctacgtggagatcctcaggaccctgttccgctcacgctccaagcggcgccaccgcacggtcaagctcatcttcgccatcgtggtggcctacttcctcagctggggtccctacaacttcaccctgtttctgcagacgctgtttcggacccagatcatccggagctgcgaggccaaacagcagctagaatacgccctgctcatctgccgcaacctcgccttctcccactgctgctttaacccggtgctctatgtcttcgtgggggtcaagttccgcacacacctgaaacatgttctccggcagttctggttctgccggctgcaggcacccagcccagcctcgatcccccactcccctggtgccttcgcctatgagggcgcctccttctactgaggggcctgtggcggtgcaggcgcaggtgcaggtggacagggactggaatgggggtcatggagaagcgggcctggaaggagcattgcagaacacagcagggtggagacgtctcctccgctgcaggcgtgcagtgaaggtcattcattacaccagtgggtcccgccagcctctcatctgcgggaaagtggcttcctacctgggaattttatactgccatccaaaaaaacatttcttgaactctgagttcatcttgcacgctccttcatttagacatgtgtttctaatcactgtttagttcagaaggttctaagacatgaaaggattctgggaaaggtgcttccttggagactttacagggcctaaagctcattgtgataactgcacgatgctgacaagacaatgcctcccttccctgactgtaaggttgtccctactggtttattcactttggaggcgcctggctccgtattcctcaggtactgctggatgaggctgtctggaagacaaaagtcgccataccctgagataagcagtcatgttgatatctggattctaaaaatccacaactagactggagaaatgttctgtatcctggattcaagtcctagcccacgaactggcccttaaaaatttagctcataaatatttgattgaaggaatgaatttaataagtgctaccttctgcactaagtatttattcagagaatacaaagatgaatgagatacagttgctaccctccaggggccaacagcccagctccaaaggctcacctaccttggtgaacacccaccttggtgaaggcatctagggtggactcctccgacatctcatccttcccaggtggatagtgagctgacttcacatttatcactttgtacctaaagtgtcctcctcctatttggttgatggtggtagctccccccacccacccacactccaaacctcaagtcctcttggaggcctgtgttttcttttcctcaactcccacagccaggtccaaatgactatgcctgtctagtggctttcagagttgactcattcttgccattgcatgcccatggtttcatccctgaaacagggcctcacttccttggcatctccccactgctcctctctttccccaccaggctgttctctgcccttacaccaggtgcttcaaaacccttagtggctcctcattacttacaaatgaagtccatacactttagcaaggctttcaaggcctccacaatccgatgccagccaacttttccattcttattccactctaagcctcctccccacagcagcttgggatccaaccccaaaacaccactggccttctttcagacacatatctccccagtaccctacctctaggcatttgtcatgctgtcacctgggcctggaacatgttctagctgacaggccagcttctccaggaagccctccctaatctgcaaattagaacattctctgggttgtcgtgggattctgcttgtcccctctaaaataaaacaaccttgtgttgtagttacacacatgcaatgtcttatctccctgccccatcaggctgcaagcttcttgagggcaggaacctggtcttgaaccccagtgttctatcactgtgtgctcagtgggagcaaagaatcaacagctgttattatccttcagatttatgcttcttggggagccatgccctggggcacactttaccttctttgtcccaggctgcttctctataaatattaacctttctttcctagtctacactctcagagagtagtagaaagagagtagggtgtagtagtagagagattgcttatctctctctgtggcgatggctatgcttcaccttgccttctagttcatggtacgcatccctgcctctcacactggcccattgcttcacacccaagggcataaataaaagccactctctaaactttgccatgccacaaagacctgggcccaatctgtgaacctgatttggctctggcgtggggatttggaaaagcttcccatgcgattctgacatgcaccttcattaggtacatttggctgcaacttttttaaaaaatgaggagtccagagtcttctacagtcccttgagcagggatttgcacacagaagacactcaatatcttgttattgaataaagtagataccaatgtagccctctggccaacctagagagagcttgtaaggcatttccccttcagttccagatgcaacttcaatgatctatttgccaatggggcagtagatctggaggagtttatcggtctagggaagagccagggcctagttttaataatgaggccagtagcacctgctggacagggctgggcggcataccagtgaagggaaggggctcccatggacctacctgccagcctacaggtggggccactactcaccaccgatgggagaaacagcataaggaagagataatgaggtagtttgtggtatcagagctaagcctatgggcttctagttggcctaatctttcaaacacagtttcacactgattcttaacattttgttcaacttttactcagagggcaggctgagccagggagcaaaaaggcaaaggactcctactcacatacccacttagcaaaaccaaagcaccttgggctttgaacccacccttcttagaaggcaggtttgggggttgaggccccttgagaagctcacttcaccctctccccatgccatcccattcctacccatcccaagatgcttctcttgtatttctttcagcacatccagccatctccctgggagcgtttcatatctgactctttatacttccagtgatgttttggcatccctaatagactggctcccaaggcagtctttaatcaggagtcttcccctaatctagctcctcaagaacccaagggaagaggcacaaagagaagtatgaataggaagatagaagggtaacccagtcagagagggagtggcagatgacactgctgaaaaggagtttccagagagttgcacaccatgagccacgctgtctgtccctgaccacaacctccactggccaccacctcctgggcttcccctccctccacccacagaaaccattgctcaatctcaactggactcttgcaggcctatctctccctccaaacagagatgtcctggacacagagctgcagacctctaaccactcctggaacataaaaaaacccacggtggttctacagcatttacacctccagtttccctcagacagaatccagaagagaagaacctcgctgatctctgagcggagcatgtctccaagctcaggccagccccagaactccaatggcctcaactggagtggaaatccctcaaaggcacaaacccagttcctaccatctccctcagtgcctggcaatgtttgtggttggttgagtgagttaacaggagaccatcttttggccttttttctacctctgttttctcttactatacttgcctacatctcatcttctggtcaacaccaggtactcaccccatgagcttcttgtgaacttgtctggggcccaccggcctaaacatcatcttttttgtttggaattaagctttgttgaacttttcacaggtttcatttatgcaaatgcctgtgatgggacaaaaaggtctgcaaacatggaaacctggtctaaagatgtccaaagtaaactgtctgtggagtcgaatgacatttgagccctggacctaaactccaaatccaagctctttcccactgtgaccttgggcctctcaaggctcagtttcctcacctataaactgtagagaagccaataacagactcatccacactatgaggctgtgcataaggtcatgtatgtaaaactacttgctttgttgatcattctgtcccagataagtatgaattattatgcatcatttcattaaacaagaaagcttcactgtgtt

SEQ ID NO: 27915 - DNA, 332 bp, Artificial Sequence
  derived and/or modified sequence
ctttaagtgaaatatgaaacagagaagcaccatttctgcctcaagacgcatgtaaagaggtgtagattcaggttggagtgcagtggcatgatcacagctctctgcagtctcgccctcctgggctcaagcaatctttccccaccccccggtttcctgagtagctgggactataggcatgcgccaccacacccggatgctctaaacgtccctgccatctggtccagatggagtcctcaggcaacccagagagcaccacctttttttactatgaccttcagagccagccgtgtgagaaccaggcctgggtctttgctaccctcgccaccactgtc

SEQ ID NO: 27916 - DNA, 1373 bp, Artificial Sequence
  derived and/or modified sequence
ctttaagtgaaatatgaaacagagaagcaccatttctgcctcaagacgcatgtaaagaggtgtagattcaggttggagtgcagtggcatgatcacagctctctgcagtctcgccctcctgggctcaagcaatctttccccaccccccggtttcctgagtagctgggactataggcatgcgccaccacacccggatgctctaaacgtccctgccatctggtccagatggagtcctcaggcaacccagagagcaccacctttttttactatgaccttcagagccagccgtgtgagaaccaggcctgggtctttgctaccctcgccaccactgtcctatactgcctggtgtttctcctcagcctagtgggcaacagcctggtcctgtgggtcctggtgaagtatgagagcctggagtccctcaccaacatcttcatcctcaacctgtgcctctcagacctggtgttcgcctgcttgttgcctgtgtggatctccccataccactggggctgggtgctgggagacttcctctgcaaactcctcaatatgatcttctccatcagcctctacagcagcatcttcttcctgaccatcatgaccatccaccgctacctgtcggtagtgagccccctctccaccctgcgcgtccccaccctccgctgccgggtgctggtgaccatggctgtgtgggtagccagcatcctgtcctccatcctcgacaccatcttccacaaggtgctttcttcgggctgtgattattccgaactcacgtggtacctcacctccgtctaccagcacaacctcttcttcctgctgtccctggggattatcctgttctgctacgtggagatcctcaggaccctgttccgctcacgctccaagcggcgccaccgcacggtcaagctcatcttcgccatcgtggtggcctacttcctcagctggggtccctacaacttcaccctgtttctgcagacgctgtttcggacccagatcatccggagctgcgaggccaaacagcagctagaatacgccctgctcatctgccgcaacctcgccttctcccactgctgctttaacccggtgctctatgtcttcgtgggggtcaagttccgcacacacctgaaacatgttctccggcagttctggttctgccggctgcaggcacccagcccagcctcgatcccccactcccctggtgccttcgcctatgagggcgcctccttctactgaggggcctgtggcggtgcaggcgcaggtgcaggtggacagggactggaatgggggtcatggagaagcgggcctggaaggagcattgcagaacacagcagggtggagacgtctcctccgctgcaggcgtgcagtgaaggtcattcatta

SEQ ID NO: 27917 - DNA, 1002 bp, Artificial Sequence
  derived and/or modified sequence
atggagagcagcggcaaccccgagagcaccaccttcttctactacgacctgcagagccagccctgcgagaaccaggcctgggtgttcgccaccctggccaccaccgtgctgtactgcctggtgttcctgctgagcctggtgggcaacagcctggtgctgtgggtgctggtgaagtacgagagcctggagagcctgaccaacatcttcatcctgaacctgtgcctgagcgacctggtgttcgcctgcctgctgcccgtgtggatcagcccctaccactggggctgggtgctgggcgacttcctgtgcaagctgctgaacatgatcttcagcatcagcctgtacagcagcatcttcttcctgaccatcatgaccatccacagatacctgagcgtggtgagccccctgagcaccctgagagtgcccaccctgagatgcagagtgctggtgaccatggccgtgtgggtggccagcatcctgagcagcatcctggacaccatcttccacaaggtgctgagcagcggctgcgactacagcgagctgacctggtacctgaccagcgtgtaccagcacaacctgttcttcctgctgagcctgggcatcatcctgttctgctacgtggagatcctgagaaccctgttcagaagcagaagcaagagaagacacagaaccgtgaagctgatcttcgccatcgtggtggcctacttcctgagctggggcccctacaacttcaccctgttcctgcagaccctgttcagaacccagatcatcagaagctgcgaggccaagcagcagctggagtacgccctgctgatctgcagaaacctggccttcagccactgctgcttcaaccccgtgctgtacgtgttcgtgggcgtgaagttcagaacccacctgaagcacgtgctgagacagttctggttctgcagactgcaggcccccagccccgccagcatcccccacagccccggcgccttcgcctacgagggcgccagcttctactag

SEQ ID NO: 27918 - DNA, 111 bp, Artificial Sequence
  derived and/or modified sequence
atggagagcagcggcaaccccgagagcaccaccttcttctactacgacctgcagagccagccctgcgagaaccaggcctgggtgttcgccaccctggccaccaccgtgtag

SEQ ID NO: 27919 - DNA, 765 bp, Artificial Sequence
  derived and/or modified sequence
atggtgagagaggccaacatcaagcaggccaccgccgagaagcagctgaaggaggcccagggcaagatcgacgtgctgcaggccgaggtggccgccctgaagaccctggtgctgagcagcagccccaccagccccacccaggagcccctgcccggcggcaagacccccttcaagaagggccacaccagaaacaagagcaccagcagcgccatgagcggcagccaccaggacctgagcgtgatccagcccatcgtgaaggactgcaaggaggccgacctgagcctgtacaacgagttcagactgtggaaggacgagcccaccatggacagaacctgccccttcctggacaagatctaccaggaggacatcttcccctgcctgaccttcagcaagagcgagctggccagcgccgtgctggaggccgtggagaacaacaccctgagcatcgagcccgtgggcctgcagcccatcagattcgtgaaggccagcgccgtggagtgcggcggccccaagaagtgcgccctgaccggccagagcaagagctgcaagcacagaatcaagctgggcgacagcagcaactactactacatcagccccttctgcagatacagaatcaccagcgtgtgcaacttcttcacctacatcagatacatccagcagggcctggtgaagcagcaggacgtggaccagatgttctgggaggtgatgcagctgagaaaggagatgagcctggccaagctgggctacttcaaggaggagctgtag

SEQ ID NO: 27920 - DNA, 765 bp, Artificial Sequence
  derived and/or modified sequence
atggttcgggaggccaatataaagcaggctaccgctgagaaacagctgaaggaagctcagggcaaaattgacgtgcttcaagccgaagttgctgcccttaagacactggtgctgtcatcttcccctacgtctcctactcaggagcctctgccagggggcaagacccctttcaaaaagggccataccagaaataagagcacttcctctgctatgtctggatctcaccaggatctctccgtgattcagccaattgttaaggactgtaaggaggcagacttgagcctctataatgagtttagactgtggaaagacgagccaactatggacaggacctgcccattcttagacaagatctaccaagaggacattttcccctgcttgaccttttccaagagcgagctggctagcgccgtactcgaagcggtggagaataataccctgtccatagaacctgtcgggcttcagcccatacgttttgttaaagcatctgctgtggaatgcggggggcccaaaaaatgtgctcttaccgggcagtccaaatcctgcaagcaccgcataaagctgggagactcctctaattactactatattagccccttttgtcgctaccgcattacaagtgtgtgcaatttcttcacctatattagatatatccaacaggggctggtgaagcagcaggacgtagaccagatgttttgggaagtgatgcaactgcgcaaagagatgtcactcgcaaagctgggttacttcaaggaagaactatag

SEQ ID NO: 27921 - DNA, 765 bp, Artificial Sequence
  derived and/or modified sequence
atggtacgagaggccaacattaagcaagccacagcagagaaacagttgaaggaggctcaaggcaaaattgacgtgctgcaggcagaggtcgccgctctgaaaacattagtccttagctcctcccccacgtcccccacacaggagcctttgccaggcggtaagactcctttcaagaaaggtcatactagaaataaaagcacgtcctccgccatgagtgggtcccatcaagatctgagcgtcatccagcctatagtgaaagattgcaaggaagctgatttgtcattgtacaacgagtttagactctggaaggacgaaccaacgatggatcggacctgtccttttctggacaagatttaccaggaggacatctttccgtgtctgacatttagcaaatctgagttggcttctgccgtgctggaggcggttgaaaacaatactctgagtatcgagcccgttggcctgcagcctatccgctttgtgaaggccagcgcagtagaatgtggaggtcctaagaagtgcgccctgaccgggcagtctaagagctgcaagcacagaattaaactcggtgatagctctaattactactatatttctccattttgtcgatatcggattacctccgtgtgtaacttcttcacttacatcaggtacatccagcaaggcctggttaaacagcaggatgtggaccagatgttttgggaggtgatgcaactacgtaaggagatgagcttggccaaactcggatacttcaaggaggagctgtag

SEQ ID NO: 27922 - DNA, 765 bp, Artificial Sequence
  derived and/or modified sequence
atggtacgggaggctaacatcaaacaagccaccgctgagaaacagctcaaggaggcacaggggaagatcgatgtcctgcaggctgaagtcgcggcacttaaaaccctggttctaagcagtagccctacctccccaacacaggagccactaccgggcggaaagaccccgtttaaaaagggccacacacgaaataagtctaccagctcagctatgagcggatcgcaccaggacttgtctgtcatacagccgatagtcaaggactgtaaggaggctgatctgagcctgtacaatgaattcagactttggaaagacgagcctaccatggataggacatgcccgttccttgacaaaatttaccaggaggacatcttcccttgcctgacatttagcaaaagcgaactcgccagcgctgtgttggaggccgtggagaacaatacactgagtatagaacctgtaggcctgcagcctatacgcttcgtcaaggccagtgccgtggaatgtggtggccccaagaagtgcgcgctgaccggtcagtctaaaagttgcaagcacagaataaaacttggagattctagcaattactattacatctctccgttctgccgatataggatcacaagtgtgtgcaactttttcacatatatccgttacattcagcagggcttagtcaagcagcaggatgtcgatcaaatgttctgggaagttatgcaacttagaaaagaaatgagcctggctaaactggggtattttaaagaagaactctag

SEQ ID NO: 27923 - DNA, 765 bp, Artificial Sequence
  derived and/or modified sequence
atggtgcgggaggccaacatcaagcaggccacagctgagaagcagctgaaggaggcccagggcaagattgatgtgctgcaggccgaggtggccgccctgaagaccctggtgctgagcagcagccccaccagccccacccaggagcccctgcccggcggcaagacccccttcaagaagggccacaccaggaacaagagcaccagcagcgccatgagcggcagccaccaggacctgagcgtcatccagcccatcgtgaaggactgcaaggaggccgacctgagcctgtacaatgagttccggctgtggaaggatgagcccaccatggacaggacctgccccttcctggacaagatctaccaggaggacatcttcccctgcctgaccttcagcaagtctgagctggccagcgctgtgctggaggccgtggagaacaacaccctgagcattgagcctgtgggcctgcagcccatccgctttgtgaaggccagcgctgtggagtgtggcggccccaagaagtgtgccctgaccggccagagcaagagctgcaagcaccgcatcaagctgggggacagcagcaactactactacatcagccccttctgccgctaccgcatcacctctgtgtgcaacttcttcacctacatccgctacatccagcagggcctggtgaagcagcaggatgtggaccagatgttctgggaggtgatgcagctgaggaaggagatgagcctggccaagctgggctacttcaaggaggagctgtag

SEQ ID NO: 27924 - DNA, 765 bp, Artificial Sequence
  derived and/or modified sequence
atggtgcgggaggccaacatcaagcaggccaccgccgagaagcagctaaaagaagcccagggaaaaattgacgtgctgcaggcggaggttgcagcacttaaaaccttggtattgtcttcttcccctacttcccctacacaggagccattaccaggggggaagacaccattcaagaaaggccacaccaggaataagtccacttctagcgccatgtctggatcacaccaagacctctccgtgatccaaccaattgttaaggactgtaaggaggcagacctttctttgtataatgaattcagactgtggaaggacgaacctacaatggacagaacttgcccattccttgacaagatttaccaggaggatattttcccctgtctgactttttcaaagagcgaactagcctccgctgtcctggaggcagtggagaacaatactctgagtatcgaacccgtgggactgcagccaatcagatttgtgaaggcatccgctgtcgaatgtggcggacctaaaaaatgtgctttaactggacagtctaagtcttgcaagcatcgtatcaaactgggtgactcctcaaactattactacattagtcctttttgtcgatacaggattacttctgtctgcaatttcttcacctacataaggtacattcagcaaggcttggtaaagcagcaggatgttgatcagatgttctgggaagtgatgcaattgagaaaagaaatgtcgttagcaaagctcgggtactttaaggaagaactttag

SEQ ID NO: 27925 - DNA, 765 bp, Artificial Sequence
  derived and/or modified sequence
atggtgcgggaggccaacatcaagcaggccaccgccgagaagcagttaaaggaggctcagggtaagattgatgtcctgcaggcggaggtggccgctttaaagacgcttgtgctgagctcatcaccaacctctcctacccaggaacctttaccagggggtaaaaccccttttaaaaagggtcatacacggaataaatcgacaagctcagccatgtcaggtagtcatcaggacctatcagtgattcaacccatcgtaaaggactgtaaggaagccgacctctctctgtacaatgagtttaggttgtggaaggacgagcccaccatggatagaacctgcccatttctcgataaaatctaccaagaggacattttcccctgtctgacctttagtaaatccgaattagccagtgccgtcttagaggctgtcgagaataacacattaagtatcgaacctgtaggcctccaacctatacggttcgtgaaagcctcggcggtggaatgcgggggcccgaagaagtgcgctttaactggacagagcaagtcatgcaaacacagaattaagctgggagatagcagtaattattactacatatctcccttttgcaggtataggattacgtctgtgtgtaatttcttcacatatatccgctacatccaacaggggctggtcaaacagcaggatgtcgatcagatgttctgggaggtgatgcagttacgaaaggagatgtcattagcgaaactgggctactttaaagaggagctgtag

SEQ ID NO: 27926 - DNA, 765 bp, Artificial Sequence
  derived and/or modified sequence
atggtgcgggaggccaacatcaagcaggccaccgccgagaagcagttgaaagaggctcagggcaaaatagacgtcctgcaagcagaggtagccgccctgaagacgctggtgctctctagctctccaacttcccctactcaggagccgctgcccggaggcaaaacacccttcaaaaagggacacacaagaaataagtccaccagcagtgcgatgtccggatctcaccaggatttatccgtgattcaacccatcgtcaaagattgcaaggaggctgacctgtcactttataatgaattccgcctttggaaggatgagcctacaatggaccgaacatgtccctttctagacaagatctaccaagaggacatcttcccatgcctgacattttctaaatccgaactcgccagcgctgtgctcgaggccgttgagaataacacattgtccatagagccagtcggtttgcagcccattagattcgtgaaggcttccgccgtggaatgtggcggtccaaagaagtgcgccctaaccgggcagtcaaaaagctgcaaacatcgcatcaaattgggtgattcgtccaactattattatatatcccctttttgcaggtaccgcatcacctcagtctgcaacttcttcacgtacatccgctatattcagcaaggcctggtgaagcagcaagatgtggaccagatgttttgggaagtcatgcagctgaggaaagagatgtccttggccaaacttggatactttaaggaagagttgtag

SEQ ID NO: 27927 - DNA, 765 bp, Artificial Sequence
  derived and/or modified sequence
atggtgagggaggctaatattaagcaggctacagccgaaaagcaactcaaggaggcccagggcaagatagacgttcttcaggctgaggtggctgcactcaaaacgctagtactcagctcctccccgacatcaccaacgcaggagcccctgccgggtggaaaaacgccctttaaaaagggacacacgcgcaataagtcgacatcctctgccatgtccggatcccatcaagatctgagcgtcatccagcctattgtgaaagactgcaaggaggccgatctgtccctctacaacgaattccgactgtggaaggacgagccgactatggacaggacttgcccatttctcgacaaaatctaccaggaggatattttcccttgcctgacgttttctaaatctgagctggctagtgccgtgctggaggccgtggaaaacaataccctgagtatagagcccgtggggctgcagcccatccggtttgtgaaggcgagcgcagtcgaatgcggcggtccaaagaaatgtgcgctcacaggccagtctaagagttgtaagcatagaatcaaacttggtgacagtagtaattattattacatcagccctttctgtaggtatcgcattacgagcgtttgcaatttttttacttatatcagatacatccagcaaggcctggtgaaacagcaggacgtggatcagatgttctgggaagtcatgcagctgcggaaagagatgagcctagccaagctaggctatttcaaggaggagctatag

SEQ ID NO: 27928 - DNA, 765 bp, Artificial Sequence
  derived and/or modified sequence
atggttcgggaagctaacatcaagcaggcaaccgccgaaaagcagctcaaagaggcccaagggaaaatcgacgttctccaggccgaagttgcagccctgaagaccttggttctaagttcctcccctacttcccccacgcaggagccattgccagggggtaaaactccatttaaaaagggccacaccagaaataaaagtacctctagcgcaatgtccggctcccaccaggatctctcagtcatccagcccatagtcaaggactgtaaggaggctgatctgagcctctataacgaatttcggctgtggaaagatgagcctacaatggataggacctgtcccttcctcgacaaaatctaccaggaagacatcttcccctgcctgaccttcagcaagtcagaattggcgtcagccgtgcttgaggctgtggagaataacacactttctatagagcccgtcggattgcagccaattcggttcgtgaaagcctcagctgttgagtgcggtggcccaaagaagtgtgccctgacagggcagtcaaagagttgcaaacatcgcatcaagctgggggacagctctaattattattatatctcccctttctgccgttaccgcatcacttccgtatgtaattttttcacgtacattcgctacatccagcaggggctggtgaaacagcaagacgttgatcagatgttctgggaagtaatgcagctccgcaaggagatgtccttggcaaagcttggatatttcaaggaagagctatag

SEQ ID NO: 27929 - DNA, 765 bp, Artificial Sequence
  derived and/or modified sequence
atggttcgagaggccaatatcaagcaggctacagccgagaaacaactgaaagaagcacagggcaagatcgatgtacttcaggcagaggtggctgccctcaagacgcttgtactctccagcagccccacgagtccgactcaggagccactgccaggcggtaagactccatttaagaagggccatacccgtaataagtctacctccagcgccatgtccgggtcccaccaggatttgtccgtgatccagccaatagtgaaggattgcaaggaagccgatctctctctctataatgagtttagactgtggaaggatgagcctactatggatcggacgtgtcctttcctcgacaagatctatcaggaagatatcttcccatgtctgactttctctaagtctgagctggcttcagcggtgctggaagcggtcgaaaataacacattgagtatagaacctgtaggcttgcagcctattaggtttgtcaaagcatctgcagttgagtgcggcggtcctaaaaagtgtgctctcacaggacagtctaagagctgtaaacatcgcatcaaactaggcgatagtagtaattattactacatatcacccttctgtcgatatcgtatcacctcagtctgcaatttttttacttacataagatatattcaacagggcctggtgaagcagcaagatgtggatcagatgttctgggaggttatgcaacttcggaaagagatgtctcttgccaaactgggttatttcaaggaagagctgtag

SEQ ID NO: 27930 - protein, 2986 aa, Artificial Sequence
  derived and/or modified sequence
MTDRFWDQWYLWYLRLLRLLDRGSFRNDGLKASDVLPILKEKVAFVSGGRDKRGGPILTFPARSNHDRIRQEDLRKLVTYLASVPSEDVCKRGFTVIIDMRGSKWDLIKPLLKTLQEAFPAEIHVALIIKPDNFWQKQKTNFGSSKFIFETSMVSVEGLTKLVDPSQLTEEFDGSLDYNHEEWIELRLSLEEFFNSAVHLLSRLEDLQEMLARKEFPVDVEGSRRLIDEHTQLKKKVLKAPVEELDREGQRLLQCIRCSDGFSGRNCIPGSADFQSLVPKITSLLDKLHSTRQHLHQMWHVRKLKLDQCFQLRLFEQDAEKMFDWISHNKELFLQSHTEIGVSYQYALDLQTQHNHFAMNSMNAYVNINRIMSVASRLSEAGHYASQQIKQISTQLDQEWKSFAAALDERSTILAMSAVFHQKAEQFLSGVDAWCKMCSEGGLPSEMQDLELAIHHHQTLYEQVTQAYTEVSQDGKALLDVLQRPLSPGNSESLTATANYSKAVHQVLDVVHEVLHHQRRLESIWQHRKVRLHQRLQLCVFQQDVQQVLDWIENHGEAFLSKHTGVGKSLHRARALQKRHDDFEEVAQNTYTNADKLLEAAEQLAQTGECDPEEIYKAARHLEVRIQDFVRRVEQRKLLLDMSVSFHTHTKELWTWMEDLQKEMLEDVCADSVDAVQELIKQFQQQQTATLDATLNVIKEGEDLIQQLRSAPPSLGEPSEARDSAVSNNKTPHSSSISHIESVLQQLDDAQVQMEELFHERKIKLDIFLQLRIFEQYTIEVTAELDAWNEDLLRQMNDFNTEDLTLAEQRLQRHTERKLAMNNMTFEVIQQGQDLHQYITEVQASGIELICEKDIDLAAQVQELLEFLHEKQHELELNAEQTHKRLEQCLQLRHLQAEVKQVLGWIRNGESMLNASLVNASSLSEAEQLQREHEQFQLAIESLFHATSLQKTHQSALQVQQKAEVLLQAGHYDADAIRECAEKVALHWQQLMLKMEDRLKLVNASVAFYKTSEQVCSVLESLEQEYRRDEDWCGGRDKLGPAAEIDHVIPLISKHLEQKEAFLKACTLARRNAEVFLKYIHRNNVSMPSVASHTRGPEQQVKAILSELLQRENRVLHFWTLKKRRLDQCQQYVVFERSAKQALDWIQETGEFYLSTHTSTGETTEETQELLKEYGEFRVPAKQTKEKVKLLIQLADSFVEKGHIHATEIRKWVTTVDKHYRDFSLRMGKYRYSLEKALGVNTEDNKDLELDIIPASLSDREVKLRDANHEVNEEKRKSARKKEFIMAELLQTEKAYVRDLHECLETYLWEMTSGVEEIPPGILNKEHIIFGNIQEIYDFHNNIFLKELEKYEQLPEDVGHCFVTWADKFQMYVTYCKNKPDSNQLILEHAGTFFDEIQQRHGLANSISSYLIKPVQRITKYQLLLKELLTCCEEGKGELKDGLEVMLSVPKKANDAMHVSMLEGFDENLDVQGELILQDAFQVWDPKSLIRKGRERHLFLFEISLVFSKEIKDSSGHTKYVYKNKLLTSELGVTEHVEGDPCKFALWSGRTPSSDNKTVLKASNIETKQEWIKNIREVIQERIIHLKGALKEPLQLPKTPAKQRNNSKRDGVEDIDSQGDGSSQPDTISIASRTSQNTVDSDKLSGGCELTVVLQDFSAGHSSELTIQVGQTVELLERPSERPGWCLVRTTERSPPLEGLVPSSALCISHSRSSVEMDCFFPLVKDAYSHSSSENGGKSESVANLQAQPSLNSIHSSPGPKRSTNTLKKWLTSPVRRLNSGKADGNIKKQKKVRDGRKSFDLGSPKPGDETTPQGDSADEKSKKGWGEDEPDEESHTPLPPPMKIFDNDPTQDEMSSSLLAARQASTEVPTAADLVNAIEKLVKNKLSLEGSSYRGSLKDPAGCLNEGMAPPTPPKNPEEEQKAKALRGRMFVLNELVQTEKDYVKDLGIVVEGFMKRIEEKGVPEDMRGKDKIVFGNIHQIYDWHKDFFLAELEKCIQEQDRLAQLFIKHERKLHIYVWYCQNKPRSEYIVAEYDAYFEEVKQEINQRLTLSDFLIKPIQRITKYQLLLKDFLRYSEKAGLECSDIEKAVELMCLVPKRCNDMMNLGRLQGFEGTLTAQGKLLQQDTFYVIELDAGMQSRTKERRVFLFEQIVIFSELLRKGSLTPGYMFKRSIKMNYLVLEENVDNDPCKFALMNRETSERVVLQAANADIQQAWVQDINQVLETQRDFLNALQSPIEYQRKERSTAVMRSQPARLPQASPRPYSSVPAGSEKPPKGSSYNPPLPPLKISTSNGSPGFEYHQPGDKFEASKQNDLGGCNGTSSMAVIKDYYALKENEICVSQGEVVQVLAVNQQNMCLVYQPASDHSPAAEGWVPGSILAPLTKATAAESSDGSIKKSCSWHTLRMRKRAEVENTGKNEATGPRKPKDILGNKVSVKETNSSEESECDDLDPNTSMEILNPNFIQEVAPEFLVPLVDVTCLLGDTVILQCKVCGRPKPTITWKGPDQNILDTDNSSATYTVSSCDSGEITLKICNLMPQDSGIYTCIATNDHGTTSTSATVKVQGVPAAPNRPIAQERSCTSVILRWLPPSSTGNCTISGYTVEYREEGSQIWQQSVASTLDTYLVIEDLSPGCPYQFRVSASNPWGISLPSEPSEFVRLPEYDAAADGATISWKENFDSAYTELNEIGRGRFSIVKKCIHKATRKDVAVKFVSKKMKKKEQAAHEAALLQHLQHPQYITLHDTYESPTSYILILELMDDGRLLDYLMNHDELMEEKVAFYIRDIMEALQYLHNCRVAHLDIKPENLLIDLRIPVPRVKLIDLEDAVQISGHFHIHHLLGNPEFAAPEVIQGIPVSLGTDIWSIGVLTYVMLSGVSPFLDESKEETCINVCRVDFSFPHEYFCGVSNAARDFINVILQEDFRRRPTAATCLQHPWLQPHNGSYSKIPLDTSRLACFIERRKHQNDVRPIPNVKSYIVNRVNQGT

SEQ ID NO: 27931 - DNA, 8961 bp, Artificial Sequence
  derived and/or modified sequence
atgaccgaccggttctgggaccagtggtacctgtggtatcttaggttgctccggctcctcgatcgcggcagtttccggaatgacgggcttaaggcctctgatgtcttacctatcttgaaagagaaagtggcattcgtatccggagggagggataagagaggcggccccatccttacctttcctgcgcgatctaaccatgaccggatccggcaagaagatctcaggaaactggtgacctacctagcctcagtgccgtccgaagacgtgtgcaagcggggcttcaccgtgatcattgacatgagggggtccaagtgggatctcatcaaaccactcttaaagacgctgcaggaggctttccctgcagagatccacgttgccctcattattaagcccgataacttctggcagaaacaaaaaaccaatttcgggagctccaagtttatattcgagacttctatggtgagtgtggagggccttactaaattagtggacccatcacaactgactgaggagttcgatgggtccttagattataaccatgaggagtggatcgaactgcgcctctctttagaggagttctttaatagcgctgtacatctgctgagtcggttggaagatctccaggaaatgttggcccgcaaggagtttcccgtggacgtcgaggggagtcggaggttgatcgatgaacatacacaactaaagaaaaaggtattgaaggcgccggtggaagagctggatcgagagggtcagcgcctgctccagtgtatcaggtgctccgacggtttctctggacgcaattgtatcccaggctctgccgacttccagagcctagtccccaagataacatcattgctggataagctgcactccacccggcagcatctccaccagatgtggcacgtacgcaagctgaaactggaccagtgcttccagctgcggctgtttgagcaggacgctgaaaagatgtttgactggataagccacaataaggagctcttcctgcaatcacataccgagatcggggtgtcctaccagtatgctcttgacctacagacacaacacaatcactttgcgatgaattccatgaacgcgtatgtgaacataaaccgaattatgtctgtagcctcccgccttagtgaagcgggccactatgcgagtcaacagataaagcaaatctccacccaactcgatcaggaatggaagagctttgccgctgccttagacgagaggagcacaatcttggcgatgagcgctgttttccaccagaaagcagaacaatttctctcaggtgtagatgcttggtgtaagatgtgttctgagggcggtctcccctccgaaatgcaggatctcgagttggctattcatcaccatcaaaccctctacgagcaagtcacccaggcctatacggaagtctcacaggacggcaaggccttgttagacgtcctccagcgccctttaagcccaggaaatagcgaatctctcacagctacagccaattactcaaaagcagtccaccaggtgctcgatgtggtgcacgaggtcctgcatcaccagaggcgcctcgaaagtatctggcagcaccggaaggtgagattacatcagagacttcaattgtgcgtcttccagcaggatgtgcaacaggtcttagactggatcgaaaatcacggcgaggcattcctttcaaaacacaccggcgttggcaagagtctgcaccgcgcgcgcgctctacagaaaagacacgacgattttgaagaggtggcccaaaacacctataccaacgcagacaaactgttggaagcagcagaacaactggcccagacaggggagtgcgatcctgaagaaatttacaaggccgcccgtcacctcgaagtgcggattcaggacttcgtgaggagggtggaacagcgcaaattgctcctcgacatgtccgtgagctttcatacacacaccaaagagctgtggacctggatggaagatctgcaaaaggagatgttggaggatgtctgcgccgatagcgtggacgcagtccaagagctcataaaacagttccaacagcaacagacggctactctcgacgcaacactgaacgtcatcaaagagggcgaggaccttatccagcaactccgctcggcaccacctagcctgggcgagcccagcgaagctagggattccgccgttagcaataacaaaactcctcattcctcttcaatcagccacatagagtccgtccttcagcagttggatgacgctcaggtccagatggaagagttgtttcatgagcgcaaaatcaaattggatatatttctgcaactgcgaatcttcgaacagtatacaatagaggtgaccgccgagttggatgcttggaacgaagatcttctgagacagatgaatgattttaataccgaggacctcacgttagccgaacaacggctccaaagacacactgaacggaaactggctatgaataacatgacttttgaagttatacagcaggggcaagacttacaccaatacatcacagaagtgcaggcatccgggattgaactgatttgcgaaaaagatatcgatctggctgcacaggttcaggagctgctggaattcctgcatgaaaagcagcacgagctggagctgaacgccgaacagacacacaagagattggaacagtgcttgcagctgcgccacttacaggccgaggtcaagcaggttctcggctggattcgtaacggggagtcgatgctcaatgcatcgctggtaaacgcctcctcattgtcagaagcagaacaattgcagcgtgaacacgagcagttccagttggccattgaaagcttgttccatgccacgtcgctccagaagacccaccagtcagctctgcaggtgcagcagaaagcggaagtcctgctccaagctggccattacgatgctgatgccattagagaatgtgctgagaaagtagcactccattggcagcagctaatgcttaaaatggaggacaggctcaagctggttaatgcatccgttgcattttataagacctccgagcaggtttgctctgtcctggagtccctggagcaagaatataggcgtgacgaggattggtgcggcggcagggataagcttggccctgcagccgagatcgatcatgtgattccactgattagcaagcacctcgaacagaaggaggcgttcctgaaagcttgcaccttggcgcggagaaatgctgaagttttcctgaaatatatccatcgcaataatgtgagtatgccctccgtcgccagtcacacccgtgggcccgaacagcaggtcaaagctatactgtcagagctgctgcagcgcgagaacagagtgctccacttttggactctgaaaaaaaggagactggaccagtgtcaacagtacgtagtgtttgagcgctccgccaagcaggccttggattggattcaggaaacaggagagttttatctgtcaacccatacttccacaggcgagaccacggaagaaacacaagagctgctgaaggagtatggcgaattcagggtgcctgccaaacagacaaaagagaaagtaaagcttctcatccaactcgccgatagcttcgtcgagaagggccacattcacgctactgagatcaggaaatgggtaacaacagtggacaaacactaccgggatttttctcttagaatgggcaagtatagatattccctggagaaagcactgggtgtaaatactgaagacaataaggatcttgagttggatataattcccgctagtctcagtgacagggaggtgaaactgagagacgccaaccacgaggtcaatgaggagaaacggaagagcgccagaaaaaaagagttcattatggccgagctgcttcaaactgagaaggcttacgtgagggacttacacgagtgcctggagacatatttgtgggagatgaccagtggagttgaggaaattcctcctggcatcctcaacaaagagcacatcatatttggaaacattcaggagatatacgattttcataacaacatcttcctgaaggagctggaaaagtacgagcagttaccggaagacgtcggccactgtttcgtcacttgggcggataagtttcagatgtatgtcacatactgtaaaaataagccagattcgaatcagctaattctcgaacatgcgggcactttcttcgatgagattcagcagcgccatggattggccaattcaatctccagttacctgataaaaccggtgcaacgaatcactaagtatcaacttcttctgaaggaactgttgacatgttgtgaagaaggtaagggggagctgaaagacgggctggaggtcatgctcagtgtacctaaaaaagcgaatgacgccatgcacgttagtatgctggaaggatttgatgagaatctcgatgtccagggggaactgattttgcaggacgcatttcaagtatgggatcccaaaagcctgatcagaaagggccgggagaggcacctttttctgttcgagatctctctggtgttcagtaaggaaattaaggactcctccggccacacaaagtacgtgtacaaaaataagctcctcacgagtgagctcggagtgacagagcatgttgaaggagacccatgtaagttcgcactttggagcggtagaacccctagctccgacaataaaactgtcctgaaggcctctaatatcgaaaccaaacaggagtggatcaaaaatatccgcgaggtcatccaggagaggataatccacctgaagggtgccctgaaggagccgctgcaactccctaaaactcctgccaagcaacggaataactctaaacgggacggggtcgaggacatagatagtcagggtgatggatccagtcagccagatacaattagcatagcttccaggacatctcaaaacacagtggacagtgataagctgtcagggggctgcgagttgaccgtcgtcctgcaggatttctccgctggacacagcagcgagctcaccatccaggtaggccaaaccgtggagctactggagagacccagcgagcgccccggctggtgcttagttagaacaactgagagaagtcctcctcttgaaggactcgttcccagttctgcattgtgcataagccactcccgaagttccgtggagatggattgcttttttcccctcgtaaaagacgcctactctcatagcagttctgaaaacggcggaaaatctgagtctgtcgccaacctccaggcacagccttcgctgaatagcattcactcatccccaggcccaaagagaagtacaaacacactcaaaaaatggctaacaagtcctgtgcggagacttaactccggtaaggctgacggtaacatcaagaagcagaagaaagttcgggacggccgcaagagctttgatctgggcagtccaaagcccggagacgagaccaccccccagggggatagcgcagacgagaagagtaaaaagggatggggggaagatgagcccgatgaggaaagtcatacccccctcccaccccctatgaagatttttgacaacgatcccacccaggatgaaatgagttccagtctgctagctgctagacaggccagtactgaggtccccacagccgctgatctcgtcaatgctatcgagaaactggtaaagaacaagctgagtctggagggctcaagctatagggggagcctgaaagaccccgcaggctgtcttaacgagggaatggccccgccaacaccgcctaagaatccagaggaggagcagaaagccaaggctttgcgagggagaatgttcgttctgaacgagctggtccagacggaaaaagattacgtgaaggatctcgggattgtagtggagggttttatgaaaagaattgaagagaaaggagttcctgaagatatgaggggaaaagacaaaatcgtgttcggtaatattcatcagatctacgactggcataaagatttcttcctcgctgaactggagaagtgcatacaggagcaggaccgcctagcacagctttttattaaacacgaacgcaaactgcacatctacgtttggtactgtcagaataaaccccgttccgagtacattgtcgcagagtacgatgcgtacttcgaagaagttaaacaggagatcaatcagaggctcacactgagtgacttcctcattaagcctatccagaggatcacgaagtaccagctgctgctgaaagactttctccgctactcagagaaggccggcctcgaatgtagcgacattgaaaaggccgtcgagttaatgtgcctggtgccaaagcgctgcaatgatatgatgaatctggggagattgcaaggtttcgagggcactctcacagctcagggcaagctgctgcagcaggatacattttacgtgatcgagcttgacgcaggtatgcaaagccggactaaagagcggcgcgtgtttttatttgagcagatcgtcatctttagcgagctgctccggaaggggtctctgactccaggctacatgttcaagagatctatcaagatgaattatctggtgctagaagaaaacgtggataacgacccatgtaagttcgctctgatgaatcgcgagacgagtgagcgtgttgtcctgcaggcagctaatgcggatatccaacaggcctgggtgcaggacataaaccaggtcttggaaacgcaacgtgacttcctgaacgcccttcagtccccaatcgagtatcagcgaaaggagcggtccaccgccgtaatgaggtcccagcctgcccgtctaccacaggcttcacctcgaccatattcctcagtgcccgccggttcggaaaaacctcccaagggcagctcgtacaacccacccctgccaccactgaagatctctactagcaatggaagccctgggtttgagtatcaccagccaggagacaaatttgaagcttccaagcagaatgatctgggtggttgtaacggcacaagttcgatggccgttatcaaagactattatgctttgaaggaaaatgagatttgcgttagtcaaggggaggtggtccaggtgctggcagttaaccagcagaatatgtgtctggtttaccaaccggcaagcgatcactcccccgccgcggagggctgggtcccaggatccatcttggcccccttgactaaggccacagcagctgagagttccgatggttcaatcaaaaaaagttgttcgtggcacacccttagaatgcgtaaaagggccgaggtggagaacacaggcaagaatgaagccacaggcccccgcaagcctaaagacattttggggaacaaagtaagtgtgaaggagactaactcatccgaggaatcagagtgcgatgatctagatcctaacactagcatggaaatccttaatcccaattttatacaagaagtagcccccgaatttctcgtgcccctagttgacgtgacctgtctgctgggagatactgtgattcttcaatgcaaagtgtgcgggcggcctaagcccacaatcacctggaaaggcccagatcagaatatcctggacactgacaatagttctgccacatatactgtgtcaagttgtgattccggagagattacactcaagatttgcaatctcatgccacaggactctgggatttacacttgtatcgctactaacgaccacggcactacctcgacatccgctactgtcaaggtccagggagttcccgccgcccccaatagacccatcgcccaggagaggtcttgtaccagcgtgatcctcagatggcttcctccgtctagcacaggtaattgcaccatcagcgggtatacggttgagtaccgggaagagggctcccagatctggcaacagtcggtggcttcaactttggacacctatttggtgatcgaagatctttcaccgggttgcccataccagttccgcgtttcagcctcaaacccctggggaatctcactcccatcagagcctagcgagttcgtgaggctgcccgagtatgatgctgcagcagacggagctactatctcatggaaagagaattttgacagtgcttacaccgagctgaacgaaattgggcgcgggcgcttcagtattgttaagaaatgcatacataaagctacgagaaaggatgtagcagtgaaattcgtgtccaaaaagatgaagaaaaaagagcaggccgcccacgaagcagcactgttgcagcatttgcagcatccccaatacatcaccctgcacgacacttacgaatccccgacctcatacattctcatactggaacttatggatgatgggagactccttgactatcttatgaaccacgatgagctgatggaagagaaggtggccttttatatacgcgacatcatggaggcgctgcaatatctccacaactgcagagtcgcccacctcgacattaagcctgagaatctgctgatagacctccgcatccctgtgccacgggtcaaacttatcgatctcgaggacgccgtgcaaatcagtggtcattttcacatacaccacttgcttgggaatcccgagtttgcagcccccgaagtgatccaggggattccagtgtccctgggcaccgatatatggtcaatcggcgtgttgacatacgtgatgctctcaggcgtgtcacccttcttggatgagagtaaagaagagacatgcataaacgtttgtagggtggactttagtttccctcacgaatatttttgcggtgtgtcaaacgctgcccgggactttatcaacgtgattctgcaggaggactttagaaggaggcctaccgctgctacctgcctgcaacacccttggctgcagccgcacaatggatcctacagcaagatccccctggatactagccgcctggcctgtttcatcgagcgacgaaaacaccagaacgacgttcgtccaatccccaatgtaaagagttatattgtgaaccgggtaaaccaagggacctag

SEQ ID NO: 27932 - DNA, 10806 bp, Artificial Sequence
  derived and/or modified sequence
gcaggcatttgcttagagcaggctgtgtgcgagcccagcgtcaagtgattccggcctcctcgagtcagcggtggtgggatgaggctctgccgaggggactggctgtgaaggatgagttcagggtgggatgacggaccgcttctgggaccagtggtatctctggtatctccgcttgctccggctgctggatcgagggtcttttcggaatgatggtttgaaagcttctgatgtccttcctatcctaaaggaaaaggtggccttcgtgtctgggggtcgtgataagcgaggcggacccatcctgaccttccctgctcgcagcaatcatgacagaataagacaggaagacctgcggaaactcgtgacgtatttggccagcgtgccaagtgaggacgtgtgcaaacgtggcttcactgtcatcatcgacatgcggggctccaagtgggacctcatcaagcccctcctcaaaacgctgcaggaagcctttccagctgagatccatgtggccctcatcattaaacccgacaacttctggcagaaacagaagaccaactttggcagctccaaattcatctttgagacgagcatggtatctgtggagggcctcacaaagctggtggacccctcccagctgacggaggagtttgatggctccctggactacaaccatgaggagtggatcgaactgcggctctccctggaggagttcttcaacagcgccgtgcacctgctctcgcgcctcgaggacctccaggagatgctagcccggaaggagtttcctgtggatgtggagggctctcggcggctcattgacgaacacacacagctcaagaaaaaggtgctgaaggcccctgtggaggagctggaccgggaggggcagcggctgctgcagtgcatccgctgcagcgacggcttctcaggacgcaactgcatcccgggcagtgctgacttccagagcctggtgcccaagatcaccagtctcctggacaagctgcactccacccggcagcacctgcaccagatgtggcatgtgcgcaagctcaagctggaccagtgctttcagctgcggctcttcgagcaggatgctgagaagatgtttgactggataagccacaacaaggagttattcctccagagccacacggagatcggagtcagctaccagtacgcccttgacctccagacgcagcacaatcactttgccatgaactccatgaatgcctatgtcaacatcaaccgcatcatgtccgtggcttcccgcctctctgaggccggtcattatgcctcacaacaaatcaagcagatctccacccagctggaccaggagtggaagagcttcgctgctgccctggatgaacgcagcaccatcctcgccatgtctgctgtgttccaccagaaggctgagcagttcctgtcgggagtggatgcctggtgcaagatgtgcagtgaaggtggtctgccatccgagatgcaagacctagagctggcaatccaccaccaccagaccttgtatgagcaggtgacccaagcctacacagaggtcagccaggatggcaaagcactacttgatgtgctgcagcggcccctgagccctgggaactccgaatccctcacggccacagccaactactccaaggcagtgcaccaggtgctggacgtggtgcatgaggtgttacatcaccagcgacggctggagagcatctggcagcaccgcaaggtgcggctccaccagcggctgcagctctgcgtcttccagcaggatgtacagcaggtgttggactggattgaaaaccatggtgaggcctttctcagcaaacacactggagttgggaagtccctacatcgagcccgggccctgcagaagaggcatgatgactttgaagaggtggctcagaatacgtacaccaatgcggacaagctcctagaagcagcagagcagttggctcagacgggggaatgtgaccccgaggagatctacaaggcagctcgacacctggaggtgcgcatccaagacttcgtgcgcagggtggagcagcggaagcttctcctggacatgtctgtttccttccacacacacaccaaagagttgtggacatggatggaagaccttcagaaggagatgttggaggatgtctgtgcagattctgtggatgcagtccaggaactgatcaagcagttccagcagcagcagaccgccactctagatgccacactcaatgtcatcaaggaaggcgaagaccttatccagcagctcaggtcagcgcctccctccctcggggagcccagcgaggccagggactcggctgtgtccaacaacaaaacaccccacagcagctccatcagccacatcgagtcggtcctgcagcagcttgatgatgcccaggtgcagatggaggagctgttccacgagcggaagatcaagctggacatcttcctgcaactgcgcatctttgagcagtacaccatcgaggtgacagcagagctagacgcctggaatgaagacttgcttcggcagatgaatgacttcaacacagaggacctaaccctggcagaacagcggctgcagcgccacacagaacggaagctagccatgaacaacatgacctttgaggttatccagcagggacaggatctgcaccagtacatcacggaggtccaggcatcaggaattgagttgatctgtgaaaaagacattgatctggcagcccaggtgcaagagttattggaatttctccatgagaagcagcatgaattggagctcaatgcagagcagactcataagcggctagagcagtgcctccaattacgtcacctccaggctgaagtcaaacaggttctgggatggatccgcaatggagagtcaatgctcaacgccagcctggtcaatgccagctctttgtcggaagcagagcagctgcagcgggagcacgagcagttccaactggccatcgagtccctctttcatgccacttccttgcagaagacgcaccagagtgccctgcaggtacagcagaaagccgaggtgctgctccaggccggccactacgatgccgatgccatccgggaatgtgctgagaaggtggccctccactggcagcagctcatgctgaagatggaagaccggctaaaattggtcaatgcctctgtggccttttacaaaacttctgaacaggtgtgtagtgtcctggagagcttagagcaagaataccggagagatgaggactggtgtggtggacgagataagctggggccagcagcagagatcgaccatgtcattcccctcatcagcaaacatttggaacaaaaggaggcctttcttaaggcctgcaccctggctcggcggaatgctgaggtgtttctcaagtacatccacaggaacaacgtcagcatgcccagtgtcgccagccacactcggggacccgagcaacaagtgaaagccatcctgagtgagctcctgcagagggagaatcgcgtgctgcatttctggaccttgaagaagcggcggttagaccaatgccagcaatatgtggtgttcgagcgcagcgctaagcaggcgcttgactggatccaagaaacaggtgaattttacctctcaacacatacctccactggagagaccacagaggagactcaggaactgctgaaagaatatggggaattcagggtgcctgccaagcaaacaaaggagaaggtgaagcttctgattcagctggccgatagctttgtggaaaaaggccacattcatgccacggagataaggaaatgggtgaccacggtggacaagcactacagagatttctccctgaggatgggaaagtaccgatactcactggagaaagccctaggagtcaacacagaggataataaggacctggagctggatattatcccagcaagcctttcggatcgggaggtcaagctgcgggacgccaaccacgaagtcaatgaagagaagcggaagtcagcccggaagaaagaatttattatggctgaactactccagacagagaaggcttatgtaagggatttgcatgagtgcttagagacctacctgtgggaaatgaccagtggtgtggaggagatcccccctgggatcctcaataaagagcatatcatctttggcaacatccaagagatctacgatttccataacaacatcttcctcaaagagctggagaagtacgagcaactgcctgaggatgtgggacactgctttgttacctgggcagacaaatttcagatgtatgtcacctactgtaaaaacaagcctgattccaaccagcttatcctggagcatgcgggcaccttctttgatgagatacaacagcggcatggtctggccaactccatctcttcctacctaattaagcctgtccaaaggatcaccaaatatcaactgctcctgaaggaacttttaacttgctgtgaagaagggaaaggggagctcaaggatggcctggaggtgatgctcagtgtcccaaagaaagccaatgatgccatgcatgtcagcatgctggaagggttcgacgagaacctggatgtgcagggggagttgattctccaggatgcctttcaagtgtgggacccgaagtcgctgatccggaaggggcgggagcggcacttgttcctctttgagatctccttggtttttagcaaggagatcaaagattcttcaggacacacgaaatatgtttacaagaacaagctactgacctcagagctgggtgtgaccgagcacgtggagggcgatccctgcaaattcgccttgtggtctgggcgcaccccatcctcagacaataaaacagtgctgaaagcctccaacattgaaaccaagcaggagtggatcaagaacattcgagaagtgattcaagaaaggatcattcacctgaaaggagctttaaaggagccacttcagctccccaaaacaccagccaaacagaggaacaatagtaagagggatggagtggaggatattgacagccagggggatgggagcagccaaccagacaccatctccattgcttctaggacctctcagaacacagtggacagtgacaagctctctggtggatgtgagctgacagtggtcctccaggacttcagtgcgggccacagcagtgagctgaccatccaggtggggcagacggtagagctgctggagcggcccagcgagcggcctggttggtgtctggtccgtaccaccgaacggagcccgcccttggagggtctggtccccagcagcgccctgtgcatctcacactcccgaagcagcgtggagatggactgcttcttccccttggtgaaagatgcatactctcattcctcaagcgagaatggaggcaagtccgagtccgtggccaacctgcaggcccagccctccctgaactccatccacagttccccgggtcccaagcgctccaccaacactcttaagaagtggctgacgagtcctgtgcgtcggcttaacagcgggaaggcagatggaaacatcaaaaagcagaagaaagttcgcgatggtcggaagagctttgacctgggatctcccaagcctggggatgaaacaacccctcagggagacagcgctgatgagaagagcaagaaaggttggggtgaagatgagccggatgaagagtcacacacacccctcccaccacctatgaagatttttgacaacgaccctacacaggatgaaatgtcctcctctttgctagcagcccggcaggcttccactgaagtacctactgctgcagaccttgtcaatgcaatagaaaagttggtcaaaaacaagctgagtctagaaggaagctcataccgggggagcttgaaagaccctgcaggctgcctgaatgaggggatggccccacccacacctcctaaaaacccagaagaagaacagaaagccaaggccctgagaggcaggatgtttgtcctgaatgagctggtacagacagagaaagactatgtcaaggatctgggcattgtggtggagggcttcatgaagagaatagaagaaaagggtgtccctgaggatatgcgaggaaaggacaaaatcgtgtttggaaatattcatcagatttatgactggcataaggattttttcctggcggaactggaaaagtgtatccaggagcaagacagattggcacagctctttattaagcacgagcggaagctgcacatctacgtgtggtattgtcagaataagccgcgctcagagtacatcgttgctgagtatgacgcctactttgaggaggtaaaacaggagataaatcagaggctgacactgagtgacttcctcatcaagcccattcagagaataacaaaataccagttgctcctcaaggacttcctgagatacagtgagaaggctggtttggagtgttcagatattgagaaagcagtggagttaatgtgccttgttcccaaacgctgcaatgacatgatgaatctaggacgtctgcagggctttgagggcactctgactgctcaggggaagctgctgcagcaggacacattctatgtgatcgagctggatgcaggcatgcagtcccggaccaaagagaggcgcgtgttcctcttcgagcagattgtcatcttcagtgaactgctcaggaagggatccctcacccctggctacatgttcaaaaggagcatcaagatgaattacttggtcctggaggagaatgtggacaatgatccctgcaagtttgcactcatgaacagagagacttctgagagggttgttctgcaagccgccaacgctgacatccagcaggcctgggtgcaggacatcaatcaagtcttagaaacacagcgagactttttgaatgcactgcaatcgcccattgagtatcaacggaaagaaaggagcacagctgtgatgaggtctcaacctgccaggcttccccaagccagccccaggccctactcctctgttcctgcgggctcagagaagcccccaaagggctccagctataacccacctctgcctcccctgaagatatctacctccaatggcagtccagggtttgaataccaccagcctggggacaagttcgaagccagcaagcagaacgacctgggaggctgcaatgggacctcgtccatggccgtgatcaaagattactatgcactgaaggagaatgaaatctgtgtgagccaaggtgaggtggtccaggtcctcgccgtcaaccagcagaacatgtgtctggtgtaccagcctgccagcgaccattcccccgccgccgagggctgggtcccaggcagcatcctggcgcccctcaccaaagccacagcagcagaaagtagtgacgggagcatcaagaagtcatgttcatggcatactctacgcatgagaaagcgggcggaagtggagaacacgggtaaaaatgaagccacagggcctcgtaaacccaaggatattctgggcaacaaagtctctgttaaagagacgaacagttccgaggaatcagagtgtgatgatcttgaccctaatactagcatggagatcttaaatccaaatttcatccaagaagtggccccagaattccttgtgcccttggtggatgtgacctgcttgcttggggacacagtgatactgcagtgcaaagtctgtgggcggccaaagcccaccatcacttggaagggtccagaccagaacatccttgacactgataacagctcagccacatacacggtctcctcttgtgattctggagaaatcaccctgaagatctgtaatctgatgccccaagacagtgggatttatacctgcatagcaacaaatgaccacgggaccacatcaacgtctgcaacagtcaaagtgcaaggtgttccagcagcccctaaccgccccattgcccaggagagaagctgcacctccgtgattctccgctggctgcccccctccagcacaggaaactgcactatttctggttacactgtggagtacagagaggaaggttctcagatctggcagcagtcagtggcttcgaccttggacacttacctcgtcatcgaagaccttagtcccgggtgtccttatcagttcagagtcagtgccagtaacccctggggaatcagccttcccagcgagccctcggagtttgtgcgacttccagaatatgatgctgctgctgatggtgccaccatttcttggaaggaaaattttgactcagcttacactgagctgaatgaaattggaagaggccgtttctctatagtaaagaaatgcattcacaaagctacccgcaaagatgtggctgtgaaatttgttagcaaaaaaatgaagaagaaagaacaggctgcccacgaggctgccctgcttcagcacctacagcacccccagtacatcactctccatgacacctatgagtcccccacatcctacatcctgatcttggaactgatggatgatggccggctcttagactaccttatgaatcatgatgaactgatggaggaaaaagtagctttctatatccgagacatcatggaggctctgcagtaccttcacaactgcagggttgcacatttggacataaagcctgaaaacctgctcattgacctacggattccagtgcctcgagtgaagctcattgacttggaggatgctgtccagatctcgggtcacttccacattcaccacctgctggggaaccctgagtttgctgccccagaagtcattcaaggcatccccgtctccctggggacagacatctggagcatcggggttctgacatatgtcatgctgagtggggtctcccccttcttggatgagagcaaagaggagacatgtatcaacgtatgcagggtggatttcagcttcccccatgaatacttctgtggtgtgagcaatgctgccagagatttcatcaatgtgatcttacaggaagattttcggaggcggcccacagcagccacatgcttgcagcatccatggctgcagccccataatggcagctactctaagatccccctggacacctcccgcctagcatgcttcatagaacgtcgcaagcaccagaatgatgtgcggcctattcccaatgtcaagagctacattgtcaaccgggtgaaccaagggacgtagccatctcccagcccctatggtttcacatagacgtgcagtgtgaaccaaagcaagactgaatgtgactgtaaataattctgttcatcatttcactccgtgcagttctctgaattgagagatgtacctcttaaacctcgtcagtggttattcagggtctgagcagcagtaaaagtcaccctaaatcaaggggcttttcagaaggtcattctgaagaaataaagaggcaaagggtcacagaagtgttcagaagaagggcaaagataagaacaatattagctgttacgaaattttaactgtatcttccaaaatgagtggttaactgggcaaaccttaagctcacaagagtataaaagatctctggctttgctgaaattttaagcaagaagttctatttaatggagatgtcatgtatatcaactattctggtttagataacttagatatagtttcttaataggatagatacccacatacagtataatatatcccattcaggtttcagagttttctaatatagagatatatatattaaatcaatcacaagtaattttgagtgctccagttaagacagtaatttatttaccgaatcattacattgttttgactaagcacaattagatgacaagtttttttagagcattttatagatcttgtatagaaatcttttaccagaacctgtgcattaagagaaagcaatgttgcccttttgaatgagaaaattttttctgtcaatcgcaggttatttgattaagataggttctttctgtatatgaaacgctccccgcaaattcactggcagctcagaattattctggaaagaaagcctgccaggaaataaattcaaatacagtatgagctgcggggatatttttgtgtctacaccaggtttgaaataagtaaacaaatacaagaggttcatataaaagggcaaatgaaaacctttcctacagttcctatgaacaacgtaccaacactttctgatttcttctacagctgtagaataccatctttcagaaagttggctggctttatttctaactccttattgaagctaaggggtgcttactaaaaggaggcagccatataggccttttaaaggcctggttctaagtcctttttaaagccatggaacaaaacctgatacatcaccctaacagagcattaagttgtaactgagattgcaatacctgtcaccatgcagccgctgatagttctctgaactaaaaggactaattgtactttgaggccaatgctgctttctggtgtatattctccatacaagattattattaactgctctttttccctctggtggaaaaaaaattaaacctgggcatttcatgggttttctttctttatttttgttcatttgttttggagggagggagcttgttttttgtgtttgtacatgatccacccttagttttctagaatgtgtgttgaaaattgcgattatacaagtaagattttaaaaatgtaactcaagtgtttgttcaaatcaggtttaatggtgttgcttctctcctataatgggatagagaaaattaaaatcacgtagtacagaagtgcaagaagagaatttatgaaggatgaatagaactacaaacctatctaaatgaaaaagaaatggtggaaactaagcctgaactttaacatataaaaaacacttattcccacagagaaaatgtaaaattaaaaatcatcatctttttttttcc

SEQ ID NO: 27933 - DNA, 8961 bp, Artificial Sequence
  derived and/or modified sequence
atgacagaccgcttctgggaccagtggtacctgtggtacctgcggctgctgcggctgctggaccggggcagcttcagaaatgatggcctgaaggccagtgatgtgctgcccatcctgaaggagaaggtggcctttgtgtctgggggccgggacaagaggggcggccccatcctgaccttccctgcccggagcaaccacgaccgcatccggcaggaggacctgaggaagctggtgacctacctggcctctgtgcccagtgaagatgtgtgcaagaggggcttcaccgtcatcatcgacatgaggggcagcaagtgggacctgatcaagcccctgctgaagaccctgcaggaggccttccctgctgagatccacgtggccctgatcatcaagccagacaacttctggcagaagcagaagaccaactttggcagcagcaagttcatctttgagacctccatggtgtctgtggagggcctgaccaagctggtggaccccagccagctgacagaggagtttgatggcagcctggactacaaccacgaggagtggattgagctgcggctgagcctggaggagttcttcaacagcgctgtgcacctgctgagccggctggaggacctgcaggagatgctggccaggaaggagttccctgtggatgtggagggcagccggcggctgattgatgagcacacccagctgaagaagaaggtgctgaaggcccctgtggaggagctggaccgggagggccagaggctgctgcagtgcatccgctgcagtgatggcttctctggaagaaactgcatccctggcagcgctgacttccagagcctggtgcccaagatcaccagcctgctggacaagctgcacagcacccggcagcacctgcaccagatgtggcacgtgaggaagctgaagctggaccagtgcttccagctgcggctgtttgagcaggatgctgagaagatgtttgactggatcagccacaacaaggagctgttcctgcagagccacacagaaattggagtgtcctaccagtatgccctggacctgcagacccagcacaaccactttgccatgaacagcatgaatgcctacgtgaacatcaaccgcatcatgtctgtggccagccggctgtctgaggccggccactacgccagccagcagatcaagcagatcagcacccagctggaccaggagtggaagagctttgctgctgccctggatgagaggagcaccatcctggccatgtctgctgtgttccaccagaaggccgagcagttcctgtctggagtggatgcctggtgcaagatgtgcagcgagggcggcctgcccagcgagatgcaggacctggagctggccatccaccaccaccagaccctgtatgagcaggtgacccaggcctacacagaggtgtcccaggacggcaaggccctgctggatgtgctgcagaggcccctgagccctggcaacagcgagagcctgacagccacagccaactacagcaaggctgtgcaccaggtgctggatgtggtgcatgaggtgctgcaccaccagaggcggctggagagcatctggcagcacaggaaggtgcggctgcaccagaggctgcagctgtgtgtgttccagcaggatgtgcagcaggtgctggactggattgaaaatcatggagaggccttcctgagcaagcacactggagtgggcaagagcctgcaccgggcccgggccctgcagaagagacatgatgactttgaggaggtggcccagaacacctacaccaatgctgacaagctgctggaggccgctgagcagctggcccagacaggagaatgtgaccctgaggagatctacaaggccgcccggcacctggaggtgcgcatccaggactttgtgagaagagtggagcagaggaagctgctgctggacatgtctgtgtccttccacacccacaccaaggagctgtggacctggatggaggacctgcagaaggagatgctggaggatgtgtgtgccgacagcgtggatgctgtgcaggagctgatcaagcagttccagcagcagcagacagccaccctggatgccaccctgaatgtcatcaaggagggggaggacctgatccagcagctgcggagcgccccacccagcctgggggagcccagcgaggcccgggacagcgctgtgagcaacaacaagaccccccacagcagcagcatcagccacatcgagagcgtgctgcagcagctggatgatgcccaggtgcagatggaggagctgttccacgagaggaagatcaagctggacatcttcctgcagctgcgcatctttgagcagtacaccatcgaggtgacagctgagctggatgcctggaatgaagacctgctgcggcagatgaatgacttcaacacagaggacctgaccctggccgagcagaggctgcagaggcacacagagaggaagctggccatgaacaacatgacctttgaggtgatccagcagggccaggacctgcaccagtacatcacagaggtgcaggccagcggcatcgagctgatctgtgagaaggacatcgacctggccgcccaggtgcaggagctgctggagttcctgcacgagaagcagcacgagctggagctgaatgctgagcagacccacaagaggctggagcagtgcctgcagctgcggcacctgcaggccgaggtgaagcaggtgctgggctggatcagaaatggagagagcatgctgaatgccagcctggtgaatgccagcagcctgtctgaggccgagcagctgcagcgggagcacgagcagttccagctggccatcgagagcctcttccacgccaccagcctgcagaagacccaccagagcgccctgcaggtgcagcagaaggccgaggtgctgctgcaggccggccactatgatgctgatgccatcagagaatgtgccgagaaggtggccctgcactggcagcagctgatgctgaagatggaggaccggctgaagctggtgaatgcctctgtggccttctacaagaccagcgagcaggtgtgcagcgtgctggagagcctggagcaggagtacagaagagatgaggactggtgtggcggccgggacaagctgggccctgctgctgagattgaccacgtgatccccctcatcagcaagcacctggagcagaaggaggccttcctgaaggcctgcaccctggccaggagaaatgctgaggtgttcctgaagtacatccacaggaacaacgtgtccatgcccagcgtggccagccacacccggggccctgagcagcaggtgaaggccatcctgtctgagctgctgcagcgggagaacagagtgctgcacttctggaccctgaagaagaggcggctggaccagtgccagcagtatgtggtgtttgagaggtctgccaagcaggccctggactggatccaggagactggagagttctacctgagcacccacaccagcactggagagaccacagaggagacccaggagctgctgaaggagtatggagagttccgggtgcctgccaagcagaccaaggagaaggtgaagctgctgatccagctggccgacagctttgtggagaagggccacatccacgccacagagatcaggaagtgggtgaccaccgtggacaagcactacagagacttcagcctgaggatgggcaagtaccgctacagcctggagaaggccctgggcgtgaacacagaggacaacaaggacctggagctggacatcatcccagccagcctgagtgaccgggaggtgaagctgagagatgccaaccacgaggtgaatgaggagaagaggaagagcgccaggaagaaggagttcatcatggccgagctgctgcagacagagaaggcctacgtgcgggacctgcacgagtgcctggagacctacctgtgggagatgaccagcggcgtggaggagatccccccaggcatcctgaacaaggagcacatcatcttcggcaacatccaggagatctatgacttccacaacaacatcttcctgaaggagctggagaagtatgagcagctgcctgaagatgtgggccactgctttgtgacctgggccgacaagttccagatgtatgtgacctactgcaagaacaagccagacagcaaccagctgatcctggagcacgccggcaccttctttgatgagatccagcagagacatggcctggccaacagcatcagcagctacctgatcaagcctgtgcagaggatcaccaagtaccagctgctgctgaaggagctgctgacctgctgtgaggagggcaagggggagctgaaggatggcctggaggtgatgctgtctgtgcccaagaaggccaatgatgccatgcacgtgtccatgctggagggctttgatgagaacctggatgtgcagggcgagctgatcctgcaggatgccttccaggtgtgggaccccaagagcctcatcaggaagggccgggagcggcacctgttcctgtttgagatcagcctggtgttcagcaaggagatcaaggacagcagcggccacaccaagtatgtgtacaagaacaagctgctgaccagcgagctgggcgtgacagagcacgtggagggggacccctgcaagtttgccctgtggagcggccgcacccccagcagtgacaacaagacagtgctgaaggccagcaacatcgagaccaagcaggagtggatcaagaacatccgggaggtgatccaggagcgcatcatccacctgaagggggccctgaaggagcccctgcagctgcccaagaccccagccaagcagaggaacaacagcaagagagatggagtggaggacatcgacagccagggagatggcagcagccagcctgacaccatcagcatcgccagcaggaccagccagaacacagtggacagcgacaagctgagcggcggctgtgagctgactgtggtgctgcaggacttctctgctggccacagcagcgagctgaccatccaggtgggccagacagtggagctgctggagcggcccagcgagaggcctggctggtgcctggtgaggaccacagagaggagcccccccctggagggcctggtgcccagcagcgccctgtgcatcagccacagccgcagctctgtggagatggactgcttcttccccctggtgaaggatgcctacagccacagcagcagtgaaaatggaggcaagtctgagagcgtggccaacctgcaggcccagcccagcctgaacagcatccacagcagccctggccccaagaggagcaccaacaccctgaagaagtggctgaccagccctgtgcggcggctgaacagcggcaaggcagatggcaacatcaagaagcagaagaaggtgagagatggcaggaagagctttgacctgggcagccccaagccaggagatgagaccaccccccagggcgacagcgcagatgagaagagcaagaagggctggggagaagatgagccagatgaggagagccacacccccctgcccccacccatgaagatctttgacaatgaccccacccaggatgagatgagcagcagcctgctggccgcccggcaggccagcacagaggtgcccacagctgctgacctggtgaatgccatcgagaagctggtgaagaacaagctgagcctggagggcagcagctaccggggcagcctgaaggaccctgctggctgcctgaatgaaggcatggccccacccaccccacccaagaaccctgaggaggagcagaaggccaaggccctgcggggccgcatgtttgtgctgaatgagctggtgcagacagagaaggactatgtgaaggacctgggcatcgtggtggagggcttcatgaagagaattgaggagaagggcgtgcctgaggacatgaggggcaaggacaagatcgtgtttggaaacatccaccagatctatgactggcacaaggacttcttcctggccgagctggagaagtgcatccaggagcaggaccggctggcccagctgttcatcaagcatgagaggaagctgcacatctacgtgtggtactgccagaacaagcccaggtctgagtacatcgtggccgagtatgatgcctactttgaggaggtgaagcaggagatcaaccagaggctgaccctgagtgacttcctgatcaagcccatccagaggatcaccaagtaccagctgctgctgaaggacttcctgcgctacagcgagaaggccggcctggagtgcagcgacatcgagaaggctgtggagctgatgtgcctggtgcccaagcgctgcaatgacatgatgaacctgggccgcctgcagggctttgagggcaccctgacagcccagggcaagctgctgcagcaggacaccttctacgtgattgagctggatgctggcatgcagagcaggaccaaggagaggagggtcttcctgtttgagcagatcgtcatcttcagcgagctgctgaggaagggcagcctgaccccaggctacatgttcaagaggagcatcaagatgaactacctggtgctggaggagaatgtggacaatgacccctgcaagtttgccctgatgaaccgggagaccagcgagcgggtggtgctgcaggccgccaatgctgacatccagcaggcctgggtgcaggacatcaaccaggtgctggagacccagagggacttcctgaatgccctgcagagccccatcgagtaccagaggaaggagaggagcacagctgtgatgaggagccagcctgcccggctgccccaggccagcccccggccctacagctctgtgcctgctggcagcgagaagccacccaagggcagcagctacaacccccccctgccccccctgaagatcagcaccagcaatggcagccctggctttgagtaccaccagcccggggacaagtttgaggccagcaagcagaatgacctgggcggctgcaatggcaccagctccatggctgtgatcaaggactactatgccctgaaggaaaatgagatctgtgtgtcccagggcgaggtggtgcaggtgctggccgtgaaccagcagaacatgtgcctggtgtaccagcctgccagtgaccacagccctgctgctgagggctgggtgcccggcagcatcctggcccccctgaccaaggccacagctgctgagagcagtgatggcagcatcaagaagagctgctcctggcacaccctgaggatgaggaagagagctgaggtggagaacacaggcaagaatgaggccaccggccccaggaagcccaaggacatcctgggcaacaaggtgtctgtgaaggagaccaacagcagcgaggagagtgaatgtgatgacctggaccccaacacctccatggagatcctgaaccccaacttcatccaggaggtggcccctgagttcctggtgcccctggtggatgtgacctgcctgctgggggacaccgtcatcctgcagtgcaaggtgtgtggccggcccaagcccaccatcacctggaagggccctgaccagaacatcctggacacagacaacagcagcgccacctacacagtgagcagctgtgacagcggggagatcaccctgaagatctgcaacctgatgccccaggacagcggcatctacacctgcatcgccaccaatgaccacggcaccaccagcaccagcgccaccgtgaaggtgcagggcgtgcctgctgcccccaaccggcccatcgcccaggagaggagctgcaccagcgtcatcctgcgctggctgccccccagcagcactggaaactgcaccatcagcggctacacagtggagtaccgggaggagggcagccagatctggcagcagagcgtggccagcaccctggacacctacctggtgattgaggacctgagccctggctgcccctaccagttccgggtgtctgccagcaacccctggggcatcagcctgcccagcgagcccagcgagtttgtgcggctgcctgaatatgatgctgctgctgatggagccaccatctcctggaaggagaactttgacagcgcctacacagagctgaatgagatcggccggggccgcttcagcatcgtgaagaagtgcatccacaaggccaccaggaaggatgtggccgtgaagtttgtgtccaagaagatgaagaagaaggagcaggccgcccatgaagctgccctgctgcagcacctgcagcacccccagtacatcaccctgcatgacacctatgagagccccaccagctacatcctgatcctggagctgatggatgatggccgcctgctggactacctgatgaaccatgatgagctgatggaggagaaggtggccttctacatccgggacatcatggaggccctgcagtacctgcacaactgccgggtggcccacctggacatcaagccagagaacctgctgattgacctgcgcatccctgtgccccgggtgaagctgattgacctggaggatgctgtgcagatcagcggccacttccacatccaccacctgctgggcaaccctgagtttgctgcccctgaggtgatccagggcatccctgtgtccctgggcacagacatctggagcattggagtgctgacctacgtgatgctgtctggagtgagccccttcctggatgagagcaaggaggagacctgcatcaacgtgtgccgggtggacttctccttcccccatgagtacttctgtggggtgtccaatgctgcccgggacttcatcaacgtcatcctgcaggaggacttcagaagaagacccacagctgccacctgcctgcagcacccctggctgcagccccacaacggcagctacagcaagatccccctggacaccagccggctggcctgcttcattgaaagaaggaagcaccagaatgatgtgcggcccatccccaacgtgaagagctacatcgtgaacagagtgaaccagggcacctag

SEQ ID NO: 27934 - DNA, 8961 bp, Artificial Sequence
  derived and/or modified sequence
atgaccgaccggttctgggaccagtggtacctgtggtacctgcggctccttcgcttattagataggggttcgtttcgcaacgacggactcaaagcttcagatgtgttacctattctgaaagagaaggtggctttcgtgagcggcgggagggataagagaggtgggccaatcctcacttttccagctcgtagcaatcatgatagaattcgacaggaggacctccgaaaactcgtgacctatctagcttctgtgccatcagaagacgtttgcaagcgaggctttaccgttatcattgatatgcggggaagcaagtgggacttgatcaagccgttattgaaaaccttgcaagaggccttcccggcagagatccacgtggcgctcatcatcaagcccgataatttctggcaaaaacaaaagacaaacttcgggtcatccaagttcatcttcgaaacgtctatggtgagcgtggagggactcaccaagctggtagacccctctcagctgactgaggaattcgacgggagtctggactacaatcacgaggaatggatcgagttgaggcttagccttgaagagttcttcaactctgctgtccacctcctttctaggctagaggatctgcaggagatgctggcccgcaaagagtttcccgtagatgttgaagggtcccgtagacttattgacgagcacactcagctgaaaaagaaagtgttaaaagccccagtggaagagctggacagagaggggcagcggctgctccagtgtatccggtgctcagacgggtttagcgggcgcaactgcattccaggctcggccgatttccagagcctggtgcctaagattacgtccctgctggacaaactgcatagtacgcggcaacatctccaccagatgtggcacgtgcgtaaacttaagctcgaccagtgctttcagctcaggctctttgaacaggatgccgaaaaaatgttcgattggatctctcataataaagaactctttctccagagccataccgaaatcggagtaagctaccaatatgcattggacctccagacacagcacaaccacttcgccatgaattccatgaatgcctacgtgaacattaaccggatcatgtcagtggcatcaaggctctcggaagccggccattatgccagccagcaaattaagcagatatcaactcagctagatcaagagtggaagtctttcgctgccgccctggatgaacgcagtaccatcttggccatgagtgctgtgttccaccaaaaggcagagcagtttctgagtggtgtagatgcttggtgtaagatgtgtagtgagggcgggctgccgtcggagatgcaggacttggagcttgccatacaccatcaccaaaccctgtatgagcaggttacacaggcttacaccgaggtaagtcaagatggcaaagccctgttagacgttctgcagcggccattgtccccaggaaatagcgaatcactgaccgccacagccaattattctaaagccgtccatcaagtactggatgtggtccacgaagttttgcatcaccagcggagacttgagagcatctggcaacacagaaaagttagattgcaccagaggctccaactgtgcgtgtttcagcaggacgtgcagcaagtgttggactggattgagaatcatggcgaagcgttcctgagcaaacacactggcgtggggaaatctttgcacagggcaagggccctccagaaacggcatgatgactttgaagaggtagcgcagaatacctacaccaatgcagataaactgctcgaggccgccgagcagctggctcagacgggtgagtgcgacccagaggagatttacaaggcagctcgtcacctggaggtgcgcatccaggatttcgtgaggcgggtggagcagagaaaattgttactagatatgtccgtgtcctttcacacacatacaaaagaactatggacttggatggaggaccttcagaaggagatgctagaggacgtgtgcgcagatagcgtggacgccgtacaagagcttataaagcaattccaacaacagcagacagctactcttgacgccaccttgaacgtgattaaggagggcgaagacctgatccaacagctgcgctcagccccaccctctttgggggaaccctccgaggcaagggatagtgccgtcagcaataacaaaacacctcattcttccagtattagccacattgagagcgttcttcagcagttggatgacgcacaggtccagatggaggagctgttccatgagcgaaaaattaaactggacatttttctgcaactgaggatcttcgaacagtataccatcgaggttaccgctgagctggacgcctggaatgaagacctgctacgtcagatgaacgatttcaacactgaggacttgactctggccgagcaaaggctgcagcgccatacagagcgcaagctagcgatgaacaacatgacatttgaggtaattcaacagggacaggacctgcatcagtacattactgaggtgcaggctagcggtattgagcttatttgcgagaaagacattgacctggcggctcaggtccaggaactactggaatttctgcatgagaaacaacacgagctggaactgaatgctgagcagacccacaagcggctcgagcagtgcctgcaattaagacacttgcaggccgaggtaaaacaggtccttggatggattcgcaacggcgaatccatgcttaatgcatctctcgtgaatgcatcctctctctcagaagcagagcagctgcagcgcgagcacgagcagttccagctggccattgagagtctgtttcacgctacctccctccagaagactcaccagagcgccctgcaggtccagcagaaagccgaggttctgcttcaggcaggccactatgacgcagatgcgatacgcgagtgcgcagagaaggtagctttacactggcaacaacttatgctgaagatggaggatagactgaagctcgtcaatgcgagcgtggccttctataaaacatcagagcaagtctgtagcgttttggagagtttggagcaggaatatagacgggatgaagactggtgcggagggcgcgataagcttggcccagcggccgaaatagatcacgttataccattaatatctaagcacttggagcagaaggaggcttttctgaaggcctgcactcttgcacgtcgaaatgcagaggtttttctcaaatacatccatcgaaataacgtgtctatgccttcggtcgcgagccacaccagggggcctgaacagcaggtgaaggctatcttaagcgagttgttgcaacgagagaatcgcgtactccatttctggacattaaaaaaaagaagattggaccagtgccagcagtacgtggtcttcgaaagaagtgccaaacaagcgttggattggatccaggagacaggggagttttatctgagcacccacacaagcaccggcgagacaacagaggagacccaggaacttttaaaggagtacggcgagtttcgagtgcccgctaagcagacaaaagagaaggttaagctcctaatccagctcgctgattcctttgtggagaagggccacattcacgctacagagatccgcaaatgggtcacaacagtggacaaacattatcgggatttctctctgcgcatgggcaaataccgttattcactcgaaaaagctctgggcgtgaatactgaagataacaaggacttagagctagatatcatcccagcatcactcagtgatcgagaggtgaagctgagagacgccaaccacgaagtgaacgaggagaagcgcaaaagtgcccggaagaaggaatttatcatggcagaactcctgcaaactgagaaggcctacgtgcgggatctacacgagtgcctggaaacttacctgtgggaaatgaccagcggagtggaagagatccctccgggtatccttaataaggagcacatcatcttcgggaacatacaagagatctacgatttccacaacaatattttcctgaaagagctggagaaatatgagcagttgccagaagacgtggggcattgcttcgttacctgggcagataaatttcagatgtatgtcacatattgcaagaacaagccagattctaaccagttaatactcgagcatgcaggcacctttttcgatgaaatacagcagagacatggactggccaattctatctccagttacttgatcaaacctgttcagcggatcaccaagtatcagcttctccttaaggaactgcttacctgctgcgaggagggcaagggggaactgaaggatggactagaggtgatgctcagtgtgcccaaaaaggccaatgacgctatgcatgtgagcatgctggaaggattcgatgagaacctagatgtccaaggtgaacttatactacaggacgcctttcaagtgtgggaccctaagagcctgatccgcaagggtcgggaacgtcatttgttcctgttcgagatcagccttgtgttctcaaaggagatcaaggatagctcaggacacaccaagtatgtgtacaagaacaaattacttaccagcgagctgggggtcacagagcacgttgagggcgatccttgtaaatttgcgctgtggtcaggccggaccccctccagtgacaacaagactgtcctcaaggcgagtaacatagaaacgaaacaggaatggatcaaaaatataagagaagttatccaggaacgcattattcatcttaagggcgcgctaaaagagcctctgcagcttccaaagacaccagctaaacagaggaacaactctaagcgtgatggcgtcgaagatatagacagccagggagacggaagctcccagccagataccatctccattgcatcccggacttctcagaacacagtggacagcgacaagctgtctggaggatgtgaacttaccgtagtccttcaggacttttccgcgggtcacagcagtgagttaactattcaggttggacaaacagtggagttattagagcgtccatctgagcgaccaggctggtgcctggtgagaactactgaaaggagtccccctctggaaggcctcgttcccagctcagccctgtgtattagccactcccgttcaagtgtggagatggattgtttcttcccactcgtgaaggacgcatacagtcatagtagttccgaaaacggcggcaagagtgagtccgtagccaacctgcaggcccaaccatcacttaactctatccacagctcaccaggcccaaagcgctcgacaaacactctcaaaaaatggttgacatctcccgtgcggcggctgaactcagggaaagccgatggcaatataaaaaagcagaagaaagtaagagatggtcggaagagttttgacttaggatcacccaaacccggcgacgagacgactccgcagggagacagcgctgatgaaaaaagtaaaaagggatggggggaggatgagcccgacgaggagtcacacactccgctgccaccaccgatgaagattttcgacaacgatcccacacaggacgagatgtcttcctcactgctggccgcaaggcaggcttccacggaggtgccgacagccgccgacctcgtcaatgcaatagagaagctcgttaagaataagttaagcctggaaggatcgtcctatagaggcagcttgaaggatcccgctggatgtctgaacgagggaatggccccgcccacaccacctaagaaccccgaggaggagcaaaaggccaaagctctgcgaggtcgcatgttcgtcctcaacgaactggtgcagaccgagaaagactacgttaaagacctcggtatcgtagtggaaggcttcatgaaaagaatcgaggaaaagggagtacctgaggacatgcggggcaaagacaaaatcgtgttcggtaatatccaccagatatacgactggcacaaggacttcttcctggcggagctggaaaaatgcatacaggagcaagaccgtctcgcccagctgtttatcaaacacgagagaaagctccatatttacgtgtggtactgccagaacaagccccgatccgagtatatcgtggcggaatacgacgcttactttgaggaggtgaaacaggagatcaatcagagactcactctgtccgactttctgatcaaacctatacaacggatcactaagtatcaattactactcaaggatttcctccggtacagcgaaaaagccgggttggaatgcagcgatatagaaaaagccgtggagctcatgtgtctagttcccaaaagatgtaacgacatgatgaacctcggaaggttacaaggcttcgagggtacactgactgcacagggaaaactactccagcaagatacattttacgtcatagagctggacgctgggatgcagagtaggacaaaggagaggagggttttcctgttcgagcagatcgtcattttttctgaattgttgagaaaaggctcgctcacaccaggatacatgtttaaacgaagcataaagatgaactatctggtcttggaagaaaatgtggacaacgacccatgcaaattcgcgttgatgaaccgcgagacttccgagcgggtcgtcctacaggccgcaaatgctgatattcagcaggcatgggtacaggacattaaccaagtgctggagacgcaaagggacttcctgaatgccttgcagagccccattgaataccaaaggaaagagagatctaccgccgtgatgaggtcccagcctgctagattgcctcaggcatctccgcgtccgtatagctccgtgccggctgggagcgagaaaccccccaagggctcctcctacaatccccccttgccccctcttaaaattagcacctctaacggaagtcctgggttcgagtaccaccaaccaggcgataaatttgaagcttcaaaacagaacgatcttggcggttgcaatggaacatcctccatggctgtgatcaaggattactatgccttgaaggagaacgaaatttgcgtatcccaaggtgaggtggtgcaggtcctggcagtaaaccaacagaatatgtgtctggtgtaccagccagcctctgaccactccccagcagcagagggttgggttcccggatctattctggcccccttgaccaaggccacagctgcagagtctagcgacgggagcatcaagaagagctgcagttggcacactctccgtatgaggaaaagggccgaggtggagaacacagggaagaatgaagcaaccggacctaggaaacccaaggacattttgggcaataaagtatccgtgaaagagaccaattcatctgaagaatcggagtgcgacgacttggaccctaatacatcaatggagatcctcaacccaaacttcattcaagaagtcgcgcccgagtttctggtgcctctcgtagatgttacgtgcctccttggtgataccgtcattttgcagtgcaaagtctgtggtcgccccaagccaaccatcacttggaagggacctgatcagaacatcctggataccgataacagtagtgcaacgtacacagtgtctagctgcgactctggtgaaataaccctgaaaatttgcaatctgatgccccaggacagtgggatttatacatgcatcgccacaaatgaccatggtacaactagcacttccgccactgtgaaagtgcagggcgtgccagccgcgcccaacaggcctatcgcacaggagcggagctgcacttcagtgatactgcggtggctgccaccaagctcaacagggaactgtactatcagcggatacaccgtggagtaccgggaagaaggctcccagatctggcagcaatccgtcgcaagcacactggatacttatcttgttatcgaggacctgagccctgggtgcccctaccagttccgtgtgtcggccagtaacccctgggggatctctctgccgtccgagccatcagaatttgtacggctgccagaatacgacgccgcagccgatggagcaaccatcagctggaaggagaattttgacagcgcttacacagagctgaacgaaattggcagaggccgcttctctatagttaaaaagtgcatccataaagcaacccgaaaggatgttgcggtgaagtttgtgagtaagaagatgaagaaaaaagaacaggccgctcacgaggccgccctcttacagcatctccagcatccccagtatattactctgcacgatacttatgagtcacccacttcttacatcttgattctggagctaatggatgacggaaggctcctggattatctaatgaatcatgatgagctgatggaagaaaaagtggccttctacatccgggatattatggaagccctccaatacctgcacaattgccgggtggcgcaccttgacatcaagcccgaaaatcttttgatcgaccttcggatccccgtaccccgtgtgaaactcatcgaccttgaagatgctgtacagatctccgggcacttccacattcatcatttgctcggtaatcccgagttcgccgccccggaggttatccagggtattccggtgtctttgggcacagacatttggtctatcggagtgctcacctacgtgatgctgtccggcgtgtcccccttcctggatgaatctaaagaagagacttgtataaacgtgtgccgggtggattttagtttccctcatgaatatttttgcggagtttctaacgcagcacgagactttataaacgtaatcctgcaggaagatttccgcaggaggccaacggccgcaacatgtctccagcacccctggctgcagccccacaacgggagttacagcaagatccctctggataccagccgcctggcctgtttcatcgaacgccggaaacatcaaaacgatgtgcgaccaatcccaaacgtgaagtcttacatcgtgaatagagtaaaccagggcacatag

SEQ ID NO: 27935 - DNA, 8960 bp, Artificial Sequence
  derived and/or modified sequence
atgactgaccgattttgggatcagtggtatctttggtatttgaggctgctaaggctgctggatagaggcagctttcgtaacgatggcttgaaggcatcagatgtcctgccaatcctgaaggaaaaggtcgccttcgtgtccggcggtcgggacaagcgagggggtcctatactcacattccccgctcggtccaatcacgatcgtattcgacaggaagacctcaggaaactggtgacttacctggcttcagtgccatcggaggacgtgtgcaaacggggattcaccgtgattattgatatgaggggctccaaatgggacctgattaagcccctgctcaaaaccctccaggaggcattcccagcagagattcatgtggcgctgataatcaagcccgataatttttggcagaaacaaaagactaactttggctctagtaagttcattttcgagacatctatggtgagtgtggagggcttgacaaagctggtagacccgtctcaactgaccgaggaattcgacggctctttagattacaatcacgaggaatggattgagcttcgtttgtcattggaagagttcttcaattcagcagtgcatctgttgtctcgcctcgaagatctccaggaaatgttagcccgaaaggaattccctgtggatgtagaaggctctcgacgactgatcgacgagcacacacagctgaaaaagaaggtccttaaagcacctgtggaagaattggaccgggagggccaaagactgctgcagtgtatccggtgcagcgatgggttttccgggagaaactgcatccccggaagcgccgactttcagtccctggtgcctaaaataaccagcctgctcgacaagctgcacagcactcgacagcaccttcatcagatgtggcatgtaaggaagctgaagctggatcagtgttttcagctgaggctgtttgagcaagatgccgagaaaatgtttgattggatcagtcacaataaagagctttttctacagtctcatactgagataggtgtgtcttatcagtacgcgctcgatttgcagacgcagcacaaccactttgccatgaatagtatgaacgcctacgtcaacatcaatagaattatgtccgtggcttctcggctctctgaggcagggcattatgctagccagcagatcaagcagatttctactcaactggaccaggaatggaagagttttgccgctgctctggacgaaagatcaaccatcctcgctatgagtgccgttttccaccaaaaggccgagcagtttctgtccggagtagatgcctggtgcaagatgtgtagtgaaggtggacttcccagcgagatgcaggatctcgagctggctatccatcatcatcagacactgtacgagcaggtgacacaggcctacacagaagtatctcaggacgggaaggcattgctagacgtgctccaacgcccactgagtcccggtaacagtgagagcttgaccgccacggctaattactccaaggccgttcaccaggttctggatgttgtgcatgaagtgctccaccaccaacgtaggttggagtcgatctggcagcatcggaaagtgcgtctgcaccagcggctgcagctgtgtgtcttccagcaggacgtgcaacaagtgctggattggatagagaatcacggcgaagcgtttttatccaaacatactggagtggggaaatccctccaccgagcacgagccctacagaaaaggcacgatgacttcgaagaagtggctcagaacacctacaccaacgcggacaagctgttagaggcagccgaacaactggcacagaccggcgagtgcgacccagaggaaatctacaaagctgcacggcatctggaagttaggatacaggatttcgttcgtagggtggagcagcggaagctcctgctggacatgtctgtgtcctttcacacccacacaaaggaactgtggacttggatggaggatcttcagaaggagatgttagaggacgtctgcgcagacagtgtcgatgctgtgcaggagttgattaagcagtttcaacagcagcagactgccacactggacgccactctcaacgtgatcaaggagggcgaggatctcattcagcagctgaggtcagctccaccatcactgggggaaccctcagaggctagggattcggccgtgtctaacaacaagacgcctcactcctcttccatctcacacattgagtcagtcctgcaacaactagatgacgctcaagtacagatggaggaactttttcacgaacggaagataaagctggacatttttctacagctacgcatctttgagcagtacactatagaagtgaccgccgaactcgatgcctggaatgaagatctgctacgtcaaatgaatgattttaataccgaagatttaaccctggctgagcaaagactccaacggcacactgagcgcaagctagctatgaacaatatgactttcgaggttatacagcaaggacaggacctgcatcaatacattacagaagtccaagcctctggcatcgagctgatttgtgagaaggacattgacctcgctgcccaagtgcaagaattgctggagttcttgcatgagaaacagcacgagctggagttgaacgcagagcagactcataagcgcctggaacaatgtctgcagttgcggcatctccaggccgaagtgaaacaggtgctggggtggattagaaacggtgagtccatgctgaatgcctccctggtcaatgcttcgtcattgtctgaggcagaacaacttcaacgggaacacgagcaattccaactggccatcgagagcctattccacgccacttccctacaaaaaacccaccaatcagctcttcaagttcagcagaaggccgaagtgctgttacaggccggtcactacgacgcagatgctatccgcgaatgcgcagagaaagttgcgcttcattggcagcaactgatgcttaagatggaagataggcttaagctcgtgaacgccagcgttgccttctacaagactagcgagcaagtatgttcagttttggagtcgctcgaacaggaatatcgcagagacgaggattggtgtggcggacgggataagctgggtccagcagctgagatagatcatgtcattcctcttatttccaagcatttggaacaaaaagaggccttccttaaagcatgcacattagctcgacgaaacgccgaagtgttcctgaaatacatacatcgcaacaacgttagtatgccctcagttgccagccataccagaggaccagagcagcaggtgaaggcaattctgtctgagctgctgcagagagaaaacagagttctacacttttggacgttgaagaaacgcagactggatcagtgtcagcaatacgtggtcttcgagcgcagtgccaaacaagccctggattggattcaggaaactggcgagttctacctctctactcatacatctacgggcgagacaacagaggagacacaggagctgctgaaggaatacggagagtttcgcgtccccgctaagcagaccaaggagaaggtgaagctgttgatacagctggccgactcctttgtcgaaaagggccatatccatgccaccgaaatacggaagtgggtcacaaccgttgacaaacattaccgagacttttctctgaggatgggcaagtaccgctactccctagagaaagcgttaggggtgaatacggaagacaacaaggatctggagctggacattattcctgcctcattgtcggatcgtgaagtcaagctgcgggatgcaaatcacgaggtcaacgaagagaaaagaaagagcgccagaaaaaaggagtttattatggccgagctactgcagactgagaaagcctatgtccgcgacctgcacgagtgcctggaaacctatctttgggaaatgacatccggggtggaggaaatccctcctggcatacttaacaaggaacacatcatcttcgggaatattcaggagatttatgattttcacaacaacatctttctgaaagagctagagaagtacgaacagttacccgaagatgtggggcactgctttgttacttgggccgacaaattccagatgtacgtgacctattgcaagaataagccggattccaatcaactgatccttgaacatgcaggcacctttttcgatgaaattcaacagcggcacggactggcgaatagcatttctagctacctcatcaaacccgttcaaagaattacaaaatatcagctgctgctgaaggagctgctgacatgttgtgaagaaggaaaaggggaattaaaggatggcttagaagtcatgctgagcgttcctaagaaagccaacgatgccatgcacgtcagcatgctggaagggtttgatgaaaacctggacgtgcaaggcgaactgatcctgcaggatgcattccaagtttgggacccaaagtctcttataaggaaaggaagggaaaggcatttgttcctctttgagattagtctggtcttcagtaaagagatcaaagactcttcaggacatactaagtacgtgtacaaaaataagctgcttacaagcgaactgggggtgactgaacacgtagagggtgacccatgtaaatttgccctttggtctggacgtacccccagctctgacaacaagaccgtcctgaaagcctctaacatagaaacgaagcaggagtggatcaagaatattagagaggttatccaggagcgtatcatccatctgaaaggtgcattgaaagagccactacaattaccgaaaactccggctaaacagcgtaataacagcaagcgtgatggagtcgaagacatagactctcagggtgacggtagctcacaacctgatactattagcatcgcgtcaagaacaagccagaataccgtagattccgataagctgagtggcggatgcgagcttactgttgttctgcaagattttagcgctggacactctagtgagcttacgatccaggtgggtcagactgtagagctgctcgaacgtccctctgaacgacctgggtggtgcctagttcggactactgagcggtcccccccacttgaggggctggtgcctagctcagccctgtgcatctctcactcacgatctagcgtggagatggactgtttctttccccttgtcaaggatgcctacagccacagctcatcagagaacggaggaaaatctgaatctgttgctaatcttcaggcccagcccagtcttaattccatacactcctctcctgggccaaaaagaagcaccaatacactcaagaagtggctgacaagtcctgttcgacggttaaacagcggcaaggcagacggcaacataaagaagcagaagaaagtaagggacgggcgaaagagctttgatttgggctctcccaaaccaggtgatgaaaccacaccgcagggtgattcagccgatgagaaatccaaaaagggatggggtgaggacgaaccagacgaggaaagtcacacccccttgcctcctcccatgaagatctttgacaatgatcccacacaggacgaaatgagctccagcttgctggcggctagacaggccagcacagaagtgcccacagcggcagacctcgttaatgcaatcgaaaaacttgttaaaaacaagctgtccttggaaggaagtagttatcgcggaagccttaaggaccctgctggctgcctgaatgagggtatggctcccccaaccccaccaaaaaatcctgaagaggagcagaaagctaaggccctgcgtgggcgaatgttcgtcctgaacgaactggtgcagacggaaaaagattacgtgaaagacttgggaatagttgttgagggctttatgaagcggatcgaggagaagggtgtgcccgaggacatgcggggaaaagacaagatagtgttcggaaacatccatcaaatctacgattggcacaaggattttttcctcgccgaactcgaaaagtgcattcaagagcaagacaggttggctcagctctttattaaacacgagaggaaacttcacatatacgtatggtactgtcagaataagccccgatcagagtatatagtcgccgagtacgatgcatatttcgaggaagttaaacaggaaattaatcagcggctcactctctccgacttccttatcaagccgatccaacgcataacaaaatatcagctgctgctaaaggatttcctgcgctattctgagaaagcaggactggagtgttcggacatcgagaaggcagtcgaactgatgtgtcttgtaccaaagcggtgtaacgacatgatgaatcttggcagactccagggctttgagggcaccctgacagcccagggaaaactgctgcagcaggatacattttacgtaatagaactcgacgccggaatgcagagcaggaccaaagagcgcagggtttttctgtttgagcagatagtcatcttctctgagctcctacgcaagggttcactgactcctggctacatgttcaagcgatctattaaaatgaattatctcgtccttgaggaaaatgtcgataatgatccctgcaagttcgctctcatgaatagagagaccagcgaaagggtggttctgcaagccgctaacgctgatatccaacaggcctgggtccaagatatcaatcaggtgcttgagacccagcgtgactttctaaatgccttgcaaagtcccattgaatatcagcgcaaggagagatctacggctgtgatgagatcccagcccgcaaggctgccacaagcctctcccagaccttacagctccgtgcctgcgggaagtgaaaaacctccaaaggggtcctcatacaatccgcctcttcccccattaaagatcagcacctctaacggcagcccgggattcgaatatcaccagcctggtgataagttcgaagcatcaaagcaaaatgatttaggcggatgcaatggaacctccagcatggccgtgattaaggattattacgctctgaaagagaatgaaatttgcgtgtcccagggggaggtggttcaggttttagcagttaaccaacagaacatgtgtctcgtttatcaacccgcttcagaccattctcctgcagccgagggttgggtacctggatctatcttagctcccctcacaaaggccacagctgccgagtctagcgatggatcgataaaaaagtcttgcagctggcacaccctcaggatgcggaaaagagccgaagtggagaacactggaaaaaatgaagctactggccctcgcaagcccaaggacatcctgggcaacaaagtcagtgtaaaagaaacaaacagctccgaggaaagcgagtgtgatgacctcgacccaaacacatcaatggaaatcctcaaccctaacttcattcaagaagtggctcccgagttcctggtccccttggtcgacgtgacttgcctgttgggagataccgtgattttacagtgtaaagtttgcggcaggcctaaaccaacgatcacttggaaaggcccagatcagaacatcctagacacggacaacagctccgcaacctacaccgtgtcttcttgtgattccggcgagattacactgaagatatgtaatcttatgccccaggactcaggtatctacacctgcatcgccacaaacgaccatggaaccaccagtacttctgccacagtcaaagtacagggagtccctgcagcaccgaacaggccaattgcacaggagcggagctgcacttcagtcatcctcagatggttaccgccatcgagtactggtaactgcactattagcggctacactgtggaataccgggaagagggctcacagatctggcagcagagcgttgcatccacacttgatacgtacctcgtgattgaagatctgtccccaggctgtccgtatcaatttcgtgtttctgcctccaacccatggggcatctcccttccctcagagccatcagagttcgttcggttgcctgaatatgacgccgctgcggacggggctacgatttcttggaaggagaactttgattccgcctacaccgaactcaatgagatcggaaggggcagattttccatagtcaagaaatgtatacataaagccaccaggaaagacgtggccgtaaaatttgtgtcaaaaaagatgaagaagaaagagcaggccgcacatgaggccgctctgctgcagcatctgcagcacccccagtatataaccctgcacgacacatacgaatctcccacgtcatacatccttatcctggaactcatggacgacgggcgactcctagactatttgatgaatcacgacgaactgatggaagaaaaggttgcattttacattagagacatcatggaagccctgcagtacctccacaactgccgcgtcgcccacctggatataaaacccgaaaatctgcttatagatttgcgcatcccagttccacgcgtgaagctgattgatctggaagatgctgtacagattagcggtcactttcacatccatcatctgctggggaaccccgagtttgcggctccggaagtcatccagggcatacccgtcagcctcggcacagatatttggtccatcggcgtcctaacgtacgtcatgctgagcggcgtctcaccattcctagacgaatctaaggaggagacgtgtatcaatgtttgtcgggtcgatttcagcttcccccacgaatatttttgcggggtatcgaatgccgctcgggacttcattaatgtgatccttcaagaagacttcagacgtcggcctacagcggctacatgccttcagcatccttggttgcagccgcataacggctcttattccaagattccacttgatacgagtagattggcttgttttattgagcggcgtaaacaccagaatgacgttcgcccaatccctaatgttaagagctacatagtgaaccgtgtcaaccagggtactta

SEQ ID NO: 27936 - DNA, 8961 bp, Artificial Sequence
  derived and/or modified sequence
atgaccgacagattctgggaccagtggtacctgtggtacctgagactgctgagactgctggacagaggcagcttcagaaacgacggcctgaaggccagcgacgtgctgcccatcctgaaggagaaggtggccttcgtgagcggcggcagagacaagagaggcggccccatcctgaccttccccgccagaagcaaccacgacagaatcagacaggaggacctgagaaagctggtgacctacctggccagcgtgcccagcgaggacgtgtgcaagagaggcttcaccgtgatcatcgacatgagaggcagcaagtgggacctgatcaagcccctgctgaagaccctgcaggaggccttccccgccgagatccacgtggccctgatcatcaagcccgacaacttctggcagaagcagaagaccaacttcggcagcagcaagttcatcttcgagaccagcatggtgagcgtggagggcctgaccaagctggtggaccccagccagctgaccgaggagttcgacggcagcctggactacaaccacgaggagtggatcgagctgagactgagcctggaggagttcttcaacagcgccgtgcacctgctgagcagactggaggacctgcaggagatgctggccagaaaggagttccccgtggacgtggagggcagcagaagactgatcgacgagcacacccagctgaagaagaaggtgctgaaggcccccgtggaggagctggacagagagggccagagactgctgcagtgcatcagatgcagcgacggcttcagcggcagaaactgcatccccggcagcgccgacttccagagcctggtgcccaagatcaccagcctgctggacaagctgcacagcaccagacagcacctgcaccagatgtggcacgtgagaaagctgaagctggaccagtgcttccagctgagactgttcgagcaggacgccgagaagatgttcgactggatcagccacaacaaggagctgttcctgcagagccacaccgagatcggcgtgagctaccagtacgccctggacctgcagacccagcacaaccacttcgccatgaacagcatgaacgcctacgtgaacatcaacagaatcatgagcgtggccagcagactgagcgaggccggccactacgccagccagcagatcaagcagatcagcacccagctggaccaggagtggaagagcttcgccgccgccctggacgagagaagcaccatcctggccatgagcgccgtgttccaccagaaggccgagcagttcctgagcggcgtggacgcctggtgcaagatgtgcagcgagggcggcctgcccagcgagatgcaggacctggagctggccatccaccaccaccagaccctgtacgagcaggtgacccaggcctacaccgaggtgagccaggacggcaaggccctgctggacgtgctgcagagacccctgagccccggcaacagcgagagcctgaccgccaccgccaactacagcaaggccgtgcaccaggtgctggacgtggtgcacgaggtgctgcaccaccagagaagactggagagcatctggcagcacagaaaggtgagactgcaccagagactgcagctgtgcgtgttccagcaggacgtgcagcaggtgctggactggatcgagaaccacggcgaggccttcctgagcaagcacaccggcgtgggcaagagcctgcacagagccagagccctgcagaagagacacgacgacttcgaggaggtggcccagaacacctacaccaacgccgacaagctgctggaggccgccgagcagctggcccagaccggcgagtgcgaccccgaggagatctacaaggccgccagacacctggaggtgagaatccaggacttcgtgagaagagtggagcagagaaagctgctgctggacatgagcgtgagcttccacacccacaccaaggagctgtggacctggatggaggacctgcagaaggagatgctggaggacgtgtgcgccgacagcgtggacgccgtgcaggagctgatcaagcagttccagcagcagcagaccgccaccctggacgccaccctgaacgtgatcaaggagggcgaggacctgatccagcagctgagaagcgccccccccagcctgggcgagcccagcgaggccagagacagcgccgtgagcaacaacaagaccccccacagcagcagcatcagccacatcgagagcgtgctgcagcagctggacgacgcccaggtgcagatggaggagctgttccacgagagaaagatcaagctggacatcttcctgcagctgagaatcttcgagcagtacaccatcgaggtgaccgccgagctggacgcctggaacgaggacctgctgagacagatgaacgacttcaacaccgaggacctgaccctggccgagcagagactgcagagacacaccgagagaaagctggccatgaacaacatgaccttcgaggtgatccagcagggccaggacctgcaccagtacatcaccgaggtgcaggccagcggcatcgagctgatctgcgagaaggacatcgacctggccgcccaggtgcaggagctgctggagttcctgcacgagaagcagcacgagctggagctgaacgccgagcagacccacaagagactggagcagtgcctgcagctgagacacctgcaggccgaggtgaagcaggtgctgggctggatcagaaacggcgagagcatgctgaacgccagcctggtgaacgccagcagcctgagcgaggccgagcagctgcagagagagcacgagcagttccagctggccatcgagagcctgttccacgccaccagcctgcagaagacccaccagagcgccctgcaggtgcagcagaaggccgaggtgctgctgcaggccggccactacgacgccgacgccatcagagagtgcgccgagaaggtggccctgcactggcagcagctgatgctgaagatggaggacagactgaagctggtgaacgccagcgtggccttctacaagaccagcgagcaggtgtgcagcgtgctggagagcctggagcaggagtacagaagagacgaggactggtgcggcggcagagacaagctgggccccgccgccgagatcgaccacgtgatccccctgatcagcaagcacctggagcagaaggaggccttcctgaaggcctgcaccctggccagaagaaacgccgaggtgttcctgaagtacatccacagaaacaacgtgagcatgcccagcgtggccagccacaccagaggccccgagcagcaggtgaaggccatcctgagcgagctgctgcagagagagaacagagtgctgcacttctggaccctgaagaagagaagactggaccagtgccagcagtacgtggtgttcgagagaagcgccaagcaggccctggactggatccaggagaccggcgagttctacctgagcacccacaccagcaccggcgagaccaccgaggagacccaggagctgctgaaggagtacggcgagttcagagtgcccgccaagcagaccaaggagaaggtgaagctgctgatccagctggccgacagcttcgtggagaagggccacatccacgccaccgagatcagaaagtgggtgaccaccgtggacaagcactacagagacttcagcctgagaatgggcaagtacagatacagcctggagaaggccctgggcgtgaacaccgaggacaacaaggacctggagctggacatcatccccgccagcctgagcgacagagaggtgaagctgagagacgccaaccacgaggtgaacgaggagaagagaaagagcgccagaaagaaggagttcatcatggccgagctgctgcagaccgagaaggcctacgtgagagacctgcacgagtgcctggagacctacctgtgggagatgaccagcggcgtggaggagatcccccccggcatcctgaacaaggagcacatcatcttcggcaacatccaggagatctacgacttccacaacaacatcttcctgaaggagctggagaagtacgagcagctgcccgaggacgtgggccactgcttcgtgacctgggccgacaagttccagatgtacgtgacctactgcaagaacaagcccgacagcaaccagctgatcctggagcacgccggcaccttcttcgacgagatccagcagagacacggcctggccaacagcatcagcagctacctgatcaagcccgtgcagagaatcaccaagtaccagctgctgctgaaggagctgctgacctgctgcgaggagggcaagggcgagctgaaggacggcctggaggtgatgctgagcgtgcccaagaaggccaacgacgccatgcacgtgagcatgctggagggcttcgacgagaacctggacgtgcagggcgagctgatcctgcaggacgccttccaggtgtgggaccccaagagcctgatcagaaagggcagagagagacacctgttcctgttcgagatcagcctggtgttcagcaaggagatcaaggacagcagcggccacaccaagtacgtgtacaagaacaagctgctgaccagcgagctgggcgtgaccgagcacgtggagggcgacccctgcaagttcgccctgtggagcggcagaacccccagcagcgacaacaagaccgtgctgaaggccagcaacatcgagaccaagcaggagtggatcaagaacatcagagaggtgatccaggagagaatcatccacctgaagggcgccctgaaggagcccctgcagctgcccaagacccccgccaagcagagaaacaacagcaagagagacggcgtggaggacatcgacagccagggcgacggcagcagccagcccgacaccatcagcatcgccagcagaaccagccagaacaccgtggacagcgacaagctgagcggcggctgcgagctgaccgtggtgctgcaggacttcagcgccggccacagcagcgagctgaccatccaggtgggccagaccgtggagctgctggagagacccagcgagagacccggctggtgcctggtgagaaccaccgagagaagcccccccctggagggcctggtgcccagcagcgccctgtgcatcagccacagcagaagcagcgtggagatggactgcttcttccccctggtgaaggacgcctacagccacagcagcagcgagaacggcggcaagagcgagagcgtggccaacctgcaggcccagcccagcctgaacagcatccacagcagccccggccccaagagaagcaccaacaccctgaagaagtggctgaccagccccgtgagaagactgaacagcggcaaggccgacggcaacatcaagaagcagaagaaggtgagagacggcagaaagagcttcgacctgggcagccccaagcccggcgacgagaccaccccccagggcgacagcgccgacgagaagagcaagaagggctggggcgaggacgagcccgacgaggagagccacacccccctgcccccccccatgaagatcttcgacaacgaccccacccaggacgagatgagcagcagcctgctggccgccagacaggccagcaccgaggtgcccaccgccgccgacctggtgaacgccatcgagaagctggtgaagaacaagctgagcctggagggcagcagctacagaggcagcctgaaggaccccgccggctgcctgaacgagggcatggccccccccaccccccccaagaaccccgaggaggagcagaaggccaaggccctgagaggcagaatgttcgtgctgaacgagctggtgcagaccgagaaggactacgtgaaggacctgggcatcgtggtggagggcttcatgaagagaatcgaggagaagggcgtgcccgaggacatgagaggcaaggacaagatcgtgttcggcaacatccaccagatctacgactggcacaaggacttcttcctggccgagctggagaagtgcatccaggagcaggacagactggcccagctgttcatcaagcacgagagaaagctgcacatctacgtgtggtactgccagaacaagcccagaagcgagtacatcgtggccgagtacgacgcctacttcgaggaggtgaagcaggagatcaaccagagactgaccctgagcgacttcctgatcaagcccatccagagaatcaccaagtaccagctgctgctgaaggacttcctgagatacagcgagaaggccggcctggagtgcagcgacatcgagaaggccgtggagctgatgtgcctggtgcccaagagatgcaacgacatgatgaacctgggcagactgcagggcttcgagggcaccctgaccgcccagggcaagctgctgcagcaggacaccttctacgtgatcgagctggacgccggcatgcagagcagaaccaaggagagaagagtgttcctgttcgagcagatcgtgatcttcagcgagctgctgagaaagggcagcctgacccccggctacatgttcaagagaagcatcaagatgaactacctggtgctggaggagaacgtggacaacgacccctgcaagttcgccctgatgaacagagagaccagcgagagagtggtgctgcaggccgccaacgccgacatccagcaggcctgggtgcaggacatcaaccaggtgctggagacccagagagacttcctgaacgccctgcagagccccatcgagtaccagagaaaggagagaagcaccgccgtgatgagaagccagcccgccagactgccccaggccagccccagaccctacagcagcgtgcccgccggcagcgagaagccccccaagggcagcagctacaacccccccctgccccccctgaagatcagcaccagcaacggcagccccggcttcgagtaccaccagcccggcgacaagttcgaggccagcaagcagaacgacctgggcggctgcaacggcaccagcagcatggccgtgatcaaggactactacgccctgaaggagaacgagatctgcgtgagccagggcgaggtggtgcaggtgctggccgtgaaccagcagaacatgtgcctggtgtaccagcccgccagcgaccacagccccgccgccgagggctgggtgcccggcagcatcctggcccccctgaccaaggccaccgccgccgagagcagcgacggcagcatcaagaagagctgcagctggcacaccctgagaatgagaaagagagccgaggtggagaacaccggcaagaacgaggccaccggccccagaaagcccaaggacatcctgggcaacaaggtgagcgtgaaggagaccaacagcagcgaggagagcgagtgcgacgacctggaccccaacaccagcatggagatcctgaaccccaacttcatccaggaggtggcccccgagttcctggtgcccctggtggacgtgacctgcctgctgggcgacaccgtgatcctgcagtgcaaggtgtgcggcagacccaagcccaccatcacctggaagggccccgaccagaacatcctggacaccgacaacagcagcgccacctacaccgtgagcagctgcgacagcggcgagatcaccctgaagatctgcaacctgatgccccaggacagcggcatctacacctgcatcgccaccaacgaccacggcaccaccagcaccagcgccaccgtgaaggtgcagggcgtgcccgccgcccccaacagacccatcgcccaggagagaagctgcaccagcgtgatcctgagatggctgccccccagcagcaccggcaactgcaccatcagcggctacaccgtggagtacagagaggagggcagccagatctggcagcagagcgtggccagcaccctggacacctacctggtgatcgaggacctgagccccggctgcccctaccagttcagagtgagcgccagcaacccctggggcatcagcctgcccagcgagcccagcgagttcgtgagactgcccgagtacgacgccgccgccgacggcgccaccatcagctggaaggagaacttcgacagcgcctacaccgagctgaacgagatcggcagaggcagattcagcatcgtgaagaagtgcatccacaaggccaccagaaaggacgtggccgtgaagttcgtgagcaagaagatgaagaagaaggagcaggccgcccacgaggccgccctgctgcagcacctgcagcacccccagtacatcaccctgcacgacacctacgagagccccaccagctacatcctgatcctggagctgatggacgacggcagactgctggactacctgatgaaccacgacgagctgatggaggagaaggtggccttctacatcagagacatcatggaggccctgcagtacctgcacaactgcagagtggcccacctggacatcaagcccgagaacctgctgatcgacctgagaatccccgtgcccagagtgaagctgatcgacctggaggacgccgtgcagatcagcggccacttccacatccaccacctgctgggcaaccccgagttcgccgcccccgaggtgatccagggcatccccgtgagcctgggcaccgacatctggagcatcggcgtgctgacctacgtgatgctgagcggcgtgagccccttcctggacgagagcaaggaggagacctgcatcaacgtgtgcagagtggacttcagcttcccccacgagtacttctgcggcgtgagcaacgccgccagagacttcatcaacgtgatcctgcaggaggacttcagaagaagacccaccgccgccacctgcctgcagcacccctggctgcagccccacaacggcagctacagcaagatccccctggacaccagcagactggcctgcttcatcgagagaagaaagcaccagaacgacgtgagacccatccccaacgtgaagagctacatcgtgaacagagtgaaccagggcacctag

SEQ ID NO: 27937 - protein, 628 aa, Artificial Sequence
  derived and/or modified sequence
MEVSAAKAPSAADLSEIEIKKEMKKDPLTNKAPEKPLHEVPSGNSLLSSETILRTNKRGERRRRRCQVAFSYLPQNDDELELKVGDIIEVVGEVEEGWWEGVLNGKTGMFPSNFIKELSGESDELGISQDEQLSKSSLRETTGSESDGGDSSSTKSEGANGTVATAAIQPKKVKGVGFGDIFKDKPIKLRPRSIEVENDFLPVEKTIGKKLPATTATPDSSKTEMDSRTKSKDYCKVIFPYEAQNDDELTIKEGDIVTLINKDCIDVGWWEGELNGRRGVFPDNFVKLLPPDFEKEGNRPKKPPPPSAPVIKQGAGTTERKHEIKKIPPERPEMLPNRTEEKERPEREPKLDLQKPSVPAIPPKKPRPPKTNSLSRPGALPPRRPERPVGPLTHTRGDSPKIDLAGSSLSGILDKDLSDRSNDIDLEGFDSVVSSTEKLSHPTTSRPKATGRRPPSQSLTSSSLSSPDIFDSPSPEEDKEEHISLAHRGVDASKKTSKTVTISQVSDNKASLPPKPGTMAAGGGGPAPLSSAAPSPLSSSLGTAGHRANSPSLFGTEGKPKMEPAASSQAAVEELRTQVRELRSIIETMKDQQKREIKQLLSELDEEKKIRLRLQMEVNDIKKALQSK

SEQ ID NO: 27938 - protein, 149 aa, Artificial Sequence
  derived and/or modified sequence
FETSERRRRRCQVAFSYLPQNDDELELKVGDIIEVVGEVEEGWWEGVLNGKTGMFPSNFIKELSGESDELGISQDEQLSKSSLRETTGSESDGGDSSSTKSEGANGTVATAAIQPKKVKGVGFGDIFKDKPIKLRPRSIEVENDFLPVE

SEQ ID NO: 27939 - protein, 149 aa, Artificial Sequence
  derived and/or modified sequence
MERSERRRRRCQVAFSYLPQNDDELELKVGDIIEVVGEVEEGWWEGVLNGKTGMFPSNFIKELSGESDELGISQDEQLSKSSLRETTGSESDGGDSSSTKSEGANGTVATAAIQPKKVKGVGFGDIFKDKPIKLRPRSIEVENDFLPVE

SEQ ID NO: 27940 - protein, 208 aa, Artificial Sequence
  derived and/or modified sequence
MEIKKEMKKDPLTNKAPEKPLHEVPSGNSLLSSETILRTNKRGERRRRRCQVAFSYLPQNDDELELKVGDIIEVVGEVEEGWWEGVLNGKTGMFPSNFIKELSGESDELGISQDEQLSKSSLRETTGSESDGGDSSSTKSEGANGTVATAAIQPKKVKGVGFGDIFKDKPIKLRPRSIEVENDFLPVEKTIGKKLPATTATPDSSKTE

SEQ ID NO: 27941 - DNA, 1887 bp, Artificial Sequence
  derived and/or modified sequence
atggaagtaagtgcggcgaaagctccaagtgctgctgacctgtcggagattgaaattaaaaaagaaatgaagaaggatcccctgacgaacaaagctccagaaaaaccactgcacgaggtgccctctggtaattcactcctgtcctccgaaaccattctccgcaccaataagcgaggggaacgacgtagacggcggtgccaggttgccttctcttacctgccccagaacgacgacgaactggaacttaaggttggtgatatcatagaagtggtgggggaggtggaagaaggctggtgggagggagttctgaacggcaagactggtatgtttccaagtaatttcatcaaggagctgagcggcgagtccgatgaactgggaatctcccaagacgaacagctttccaagagctcactacgggaaactactggttctgagtcagatggcggcgacagcagcagcaccaaaagtgaaggagccaacggtacggtggccaccgccgctatccagccgaagaaagtcaaaggtgtggggttcggagacatctttaaagataaaccaattaagttgcggccaagaagcattgaggttgagaacgacttcctcccagttgaaaagacaatagggaaaaagcttccagcaacaacggctactcctgactcctccaagactgaaatggactcacggacaaaaagtaaggattattgcaaggtgatatttccttacgaggcccagaacgatgatgagctcacaataaaggagggcgacatcgtaacacttattaacaaggattgtatcgatgtgggttggtgggagggggaactcaatggacgcaggggggtgttccccgataatttcgtaaaactgctgcccccagacttcgagaaggaaggtaataggcctaaaaaaccaccacctccaagtgcgccggttataaaacagggggccggcaccactgaacgaaagcatgaaatcaagaagatccctcctgaaaggcctgaaatgttgccaaatcgaaccgaagagaaggagaggccagaacgagagcccaaattggacctgcagaagccttctgtccccgctattcccccaaaaaagcccagaccccctaaaacaaactctctaagccggcctggtgctctgcctccaaggaggccggagagacccgtaggcccgctcacccatacacgtggggattctccaaaaatcgacctcgctgggtccagtctgtctggaatcctcgacaaggacctgtctgatcgaagtaacgacattgacctggaggggttcgacagtgtggtctcgtctacagagaaactgtcccaccccactacatcaagacctaaggctaccggacggcgaccacctagccagtcactgacctcaagctctctgagctcccctgatatctttgacagtccaagccccgaagaagacaaggaggagcatatctccctcgcacataggggcgtcgacgcctcaaagaagacgagcaaaacagtcactatctcacaggtctccgataacaaagcatctttgcctcctaaacctggaactatggccgccggaggcggaggaccagcaccactgtcttcggccgcaccatctccactgtccagttccctgggtacagccggccaccgcgcaaattcacctagcctttttggtaccgagggaaagccgaaaatggagccagcagcctcttctcaagctgcagtggaagagctgcgcacacaggtcagagaactgaggagtatcatcgaaacgatgaaggatcaacaaaagagagagatcaagcagctgctctcagaactggacgaggaaaaaaaaatcaggcttagactacagatggaggtgaacgacattaaaaaggctctgcagtcaaagtag

SEQ ID NO: 27942 - DNA, 450 bp, Artificial Sequence
  derived and/or modified sequence
ttcgagacatccgaacgtcgtagacgcagatgccaagtggccttttcttatttaccacagaacgatgatgagctcgaactgaaagtgggagatataatcgaggtggtcggggaggtagaagagggttggtgggagggtgtcctgaatggcaagaccggcatgtttccgagcaacttcatcaaggagctgagcggcgaatcggatgagctcggaataagtcaggacgaacagctgtcaaagtcatcccttagggagaccacaggaagtgagtctgatggcggagactcctcatctactaagtctgagggcgctaacggcaccgtagccactgccgcaattcagcccaaaaaagtcaaaggcgttggattcggggacatcttcaaggacaaaccaattaaactccgccctcgctctattgaggtggagaatgattttttacccgttgaatag

SEQ ID NO: 27943 - DNA, 450 bp, Artificial Sequence
  derived and/or modified sequence
atggagcggtcagagaggagaaggagaaggtgccaagtagcctttagctatcttcctcagaacgacgatgagctggagctaaaagtgggggatatcatagaggtagtgggcgaggtcgaggaggggtggtgggaaggagttctgaacggtaagacaggcatgtttccatccaatttcataaaggaactgtccggggagtcggatgagcttggaatatcccaggacgagcagctctctaagtcgtctctaagggagactaccggcagcgaaagcgatggcggggactcttcatccaccaaatctgaaggggctaacgggacggtggccaccgccgccatccaacctaagaaggttaaaggagttggttttggggatattttcaaggacaaaccaattaagctgcggcctaggagcatagaagtcgaaaacgactttcttccagtggaatag

SEQ ID NO: 27944 - DNA, 627 bp, Artificial Sequence
  derived and/or modified sequence
atggagataaaaaaggaaatgaaaaaagatcctttgactaataaggctcctgagaagcccttacacgaagtgccgtcaggcaatagccttctgagctccgaaacaattctgagaacgaacaagagaggtgagaggaggcggcggagatgtcaggtggccttttcgtacctaccccagaatgacgatgagctcgagctgaaagtgggggacatcatcgaggtggtgggcgaggtcgaggagggttggtgggaaggtgtgctcaatgggaagacagggatgtttcctagtaacttcataaaagagttgtccggcgagtccgacgagctgggcattagtcaagatgagcaactttccaagtccagtcttagggagactactggttccgagagcgacggcggtgacagctcatcaactaaatcagagggcgctaatgggactgtagctactgctgccattcagccgaaaaaagttaagggcgtgggtttcggggatatcttcaaggacaaaccgattaaactacgcccgcggtccattgaggttgagaacgacttcctccccgtggagaagaccatcggcaagaagttgccggctaccaccgcgaccccagactcatctaaaaccgaatag

SEQ ID NO: 27945 - DNA, 1887 bp, Artificial Sequence
  derived and/or modified sequence
atggaggtgtctgctgccaaggcccccagcgctgctgacctgtctgaaattgagatcaagaaggagatgaagaaggaccccctgaccaacaaggcccctgagaagcccctgcacgaggtgcccagcggcaacagcctgctgagcagcgagaccatcctgcggaccaacaagagaggagagaggagaagaagacgctgccaggtggccttctcctacctgccccagaatgatgatgagctggagctgaaggtgggggacatcatcgaggtggtgggggaggtggaggagggctggtgggagggcgtgctgaatggcaagacaggcatgttccccagcaacttcatcaaggagctgtctggagagagtgatgagctgggcatcagccaggatgagcagctgagcaagagcagcctgcgggagaccaccggcagcgagagtgatggaggagacagcagcagcaccaagtctgagggcgccaacggcaccgtggccacagctgccatccagcccaagaaggtgaagggcgtgggctttggagacatcttcaaggacaagcccatcaagctgcggcccaggagcattgaggtggagaatgacttcctgcctgtggagaagaccatcggcaagaagctgcctgccaccacagccaccccagacagcagcaagacagagatggacagcaggaccaagagcaaggactactgcaaggtgatcttcccctatgaggcccagaatgatgatgagctgaccatcaaggagggggacatcgtgaccctcatcaacaaggactgcattgatgtgggctggtgggagggggagctgaatggaagaagaggagtcttcccagacaactttgtgaagctgctgcccccagactttgagaaggagggcaaccggcccaagaagcccccacctccttctgcccctgtgatcaagcagggcgccggcaccacagagaggaagcatgagatcaagaagatccccccagagaggcctgagatgctgcccaacagaacagaggagaaggagaggcctgagcgggagcccaagctggacctgcagaagcccagcgtgcctgccatcccccccaagaagccccggccccccaagaccaacagcctgagcaggcctggggccctgcccccaagaagacctgagaggcctgtgggccccctgacccacaccaggggggacagccccaagattgacctggccggcagcagcctgagcggcatcctggacaaggacctgagtgacaggagcaatgacatcgacctggagggctttgattctgtggtgagcagcacagagaagctgagccaccccaccaccagccggcccaaggccaccggccggcggccccccagccagagcctgaccagcagcagcctgagcagcccagacatctttgacagccccagccctgaggaggacaaggaggagcacatcagcctggcccacagaggagtggatgccagcaagaagaccagcaagacagtgaccatcagccaggtgtctgacaacaaggccagcctgccccccaagccaggcaccatggctgctgggggcggcggccctgcccccctgagcagcgctgcccccagccccctgagcagcagcctgggcacagctggccaccgggccaacagccccagcctgtttggaacagagggcaagcccaagatggagcctgctgccagcagccaggccgctgtggaggagctgcggacccaggtgcgggagctgcggagcatcatcgagaccatgaaggaccagcagaagcgggagatcaagcagctgctgtctgagctggatgaggagaagaagatccggctgcggctgcagatggaggtgaatgacatcaagaaggccctgcagagcaagtag

SEQ ID NO: 27946 - DNA, 450 bp, Artificial Sequence
  derived and/or modified sequence
tttgagaccagcgagaggagaagaagacgctgccaggtggccttctcctacctgccccagaatgatgatgagctggagctgaaggtgggggacatcatcgaggtggtgggggaggtggaggagggctggtgggagggcgtgctgaatggcaagacaggcatgttccccagcaacttcatcaaggagctgagcggggagagtgatgagctgggcatcagccaggatgagcagctgagcaagagcagcctgcgggagaccactggaagtgaaagtgatggaggagacagcagcagcaccaagtctgagggcgccaatggaacagtggccacagctgccatccagcccaagaaggtgaagggcgtgggctttggagacatcttcaaggacaagcccatcaagctgcggcccaggagcattgaggtggagaatgacttcctgcctgtggagtag

SEQ ID NO: 27947 - DNA, 450 bp, Artificial Sequence
  derived and/or modified sequence
atggagaggtctgagaggagaagaagacgctgccaggtggccttctcctacctgccccagaatgatgatgagctggagctgaaggtgggggacatcatcgaggtggtgggggaggtggaggagggctggtgggagggcgtgctgaatggcaagacaggcatgttccccagcaacttcatcaaggagctgagcggggagagtgatgagctgggcatcagccaggatgagcagctgagcaagagcagcctgcgggagaccactggaagtgaaagtgatggaggagacagcagcagcaccaagtctgagggcgccaatggaacagtggccacagctgccatccagcccaagaaggtgaagggcgtgggctttggagacatcttcaaggacaagcccatcaagctgcggcccaggagcattgaggtggagaatgacttcctgcctgtggagtag

SEQ ID NO: 27948 - DNA, 627 bp, Artificial Sequence
  derived and/or modified sequence
atggagatcaagaaggagatgaagaaggaccccctgaccaacaaggcccctgagaagcccctgcacgaggtgcccagcggcaacagcctgctgagcagcgagaccatcctgcggaccaacaagagaggagagaggagaagaagacgctgccaggtggccttctcctacctgccccagaatgatgatgagctggagctgaaggtgggggacatcatcgaggtggtgggggaggtggaggagggctggtgggagggcgtgctgaatggcaagacaggcatgttccccagcaacttcatcaaggagctgtctggagagagtgatgagctgggcatcagccaggatgagcagctgagcaagagcagcctgcgggagaccaccggcagcgagagtgatggaggagacagcagcagcaccaagtctgagggcgccaacggcaccgtggccacagctgccatccagcccaagaaggtgaagggcgtgggctttggagacatcttcaaggacaagcccatcaagctgcggcccaggagcattgaggtggagaatgacttcctgcctgtggagaagaccatcggcaagaagctgcctgccaccacagccaccccagacagcagcaagacagaatag

SEQ ID NO: 27949 - DNA, 1887 bp, Artificial Sequence
  derived and/or modified sequence
atggaggtgagcgccgccaaggcccccagcgccgccgacctgagcgaaatagagataaagaaagaaatgaagaaggatccccttactaacaaggcaccagagaagccactacacgaggtgccaagtggcaactctctgctcagttccgagacaatcctccgcactaacaagcggggagaaaggaggcgaaggaggtgccaggtcgccttctcctacttgccacaaaacgacgacgagttggaactcaaagtgggtgacattatcgaggtagtgggcgaagtggaggaaggatggtgggaaggagtgctgaatggcaaaaccgggatgttcccctccaattttatcaaggagctcagtggcgaatccgacgaacttggaatctcccaggatgaacagctgagcaagtcatcactgcgggaaaccactgggtccgaatccgacgggggggactcttcatcgacgaaaagcgagggcgcaaatggaaccgtggcaacagcagcgattcaaccaaagaaagtgaaaggtgttggtttcggcgacatcttcaaggataagccaattaaactgcggcccagaagcattgaggttgagaacgattttctaccagtagagaagacaatcggcaaaaaattgcctgcaacaacggccacacctgattcctctaagactgaaatggactcgcgaaccaagtcaaaagactattgtaaagttattttcccatacgaagcgcagaatgacgacgagcttactatcaaggagggtgatatcgtgactcttatcaataaagactgcatagacgtgggctggtgggagggagagcttaacggacgccgtggagtcttcccagacaatttcgttaaattgctccctccagactttgaaaaggagggtaatcggccaaagaagccaccccccccaagcgccccggtaatcaagcaaggcgccggcactactgagaggaaacacgaaatcaagaaaatcccacctgaaaggccggagatgctgccaaaccgcaccgaggaaaaggagcgacctgagagagaaccgaaactggacctccagaagccctctgtccccgccatcccccccaagaagccacgaccacccaaaaccaactctctgagccggccaggtgccctgccgccacgtaggcctgaacggcctgttgggcctctgacccacaccagaggggattcccctaagatagatcttgccggctcctccctctccgggattctcgataaggacttgagtgataggagcaacgacattgatcttgagggctttgatagtgttgtatcttctactgaaaagctaagtcatcctacaacttcccggccaaaggccactggcagaagaccgcctagccagtcactgacatcctcttccttgtcatcaccagacattttcgacagcccatctcctgaagaagataaggaagaacatataagcctcgcgcaccgtggtgtggatgcctccaaaaagacttcaaaaactgtgacaatttcccaggttagtgataacaaggcaagtctaccaccaaagccagggacaatggctgccgggggtggggggcctgctcccctctcgtcagctgccccaagtcctctctcgagcagcctgggcaccgccggccacagagcaaacagtccaagcctgtttgggactgaaggcaaacccaaaatggagccagccgcgtcgtcacaagccgccgtggaggaactcaggacccaggtgcgagagttgcggagtataatcgaaactatgaaggaccagcagaagagagaaataaagcagttgctctccgaacttgacgaggagaaaaaaattcgcctgagactccaaatggaggttaacgacatcaaaaaggccttacaatccaagtag

SEQ ID NO: 27950 - DNA, 450 bp, Artificial Sequence
  derived and/or modified sequence
ttcgagaccagcgagcggcggcggcggcggtgccaggtggccttctcctacttaccccagaatgatgacgagctcgaactcaaggttggagacattatcgaagtggtaggcgaggttgaggaaggctggtgggaaggagtattaaatggaaaaacgggtatgtttccatcaaatttcatcaaagagctgtccggtgagagtgatgagctgggaatatcacaggacgagcagctgagcaaatcaagcctgcgcgagaccacgggaagcgaaagtgatgggggcgatagctcctcaaccaagagcgaaggggccaacggaacagtcgcaactgcagcgatccagccaaagaaagtcaaaggggttgggtttggtgacatcttcaaagataaacccattaaactccgcccgagatccatcgaagtggagaatgattttctcccagttgagtag

SEQ ID NO: 27951 - DNA, 450 bp, Artificial Sequence
  derived and/or modified sequence
atggagcggagcgagcggcggcggcggcggtgccaggtggccttctcctatttgccacagaacgatgatgagttggagctgaaggttggtgacattatagaagtggtaggtgaggtcgaggaaggctggtgggagggagttctgaacggtaagacaggcatgttcccaagcaatttcattaaggagttatctggtgaatctgatgaactggggattagtcaggatgagcagcttagcaaaagttctcttcgggagaccaccggcagcgagtccgacggaggggatagttcgagcactaaaagtgagggcgccaacggcacggtagccacggccgccatccagcccaagaaggtgaagggcgtgggatttggtgatatcttcaaagacaaacctatcaagctgaggcccaggagtatcgaggtggagaacgatttcctgccagtagaatag

SEQ ID NO: 27952 - DNA, 627 bp, Artificial Sequence
  derived and/or modified sequence
atggagatcaagaaggagatgaagaaggaccccctgaccaacaaggcacccgaaaaaccattgcatgaagtaccctccggcaactctctcctctcatcagagactatcctccgaacaaacaagagaggagagcgtaggcggcgaagatgccaggtggctttctcttatctgccccagaatgacgatgaactggagctcaaggtgggtgatattatcgaagtggtgggcgaggtggaggagggatggtgggaaggtgttctgaacggcaaaactgggatgtttccatcaaacttcattaaggagctgtccggagaaagcgacgagctaggtattagccaggatgagcaattatcgaaaagttccttgagagaaaccaccggaagcgaaagtgacgggggagactccagctccactaaatccgagggagccaatggaacagtagctactgctgccatccagccaaaaaaggttaagggtgttgggtttggggacatttttaaagataaaccaattaagctcaggccccgatccattgaggtagagaatgacttccttccagtcgagaagacaatcgggaagaagctgcctgctaccacagcaactcccgattcctccaagaccgagtag

SEQ ID NO: 27953 - DNA, 1887 bp, Artificial Sequence
  derived and/or modified sequence
atggaagtgagtgcagccaaggcaccttccgcagccgatctttctgagatcgagatcaaaaaagaaatgaagaaggacccattgaccaacaaggcacccgaaaagccccttcacgaggtgcccagcggcaactcattactttcttccgagacaattttgagaacaaataagaggggggagcgcaggaggcgccgatgccaggtcgccttctcgtatctccctcagaacgacgatgaactggaactgaaggtaggtgatatcattgaagtcgtcggagaagttgaggaaggctggtgggagggggtcttaaatgggaaaactgggatgtttccgagcaacttcatcaaggagctttctggggagtctgacgagctgggtatcagtcaggatgaacagctaagtaagagctctctgagagaaacgaccggatctgagtccgacggaggggattccagtagcacgaaatctgagggcgctaatggcactgtggctacagcggctattcagccgaagaaggtgaaaggggtcgggttcggcgacatcttcaaggacaagcccattaaactacggcctcgcagcattgaagtcgagaatgacttcctccctgtggagaaaaccataggtaaaaagctgcctgccaccacagcgacacctgattccagtaagaccgaaatggacagccggacaaaatcaaaggactactgtaaggtgattttcccatatgaagcacagaacgacgatgaattgacgatcaaagaaggagacatagtaactctcatcaacaaggactgcatcgacgtggggtggtgggaaggggagcttaacggaagaaggggcgtcttcccggataactttgtaaagctcctgcctccagactttgaaaaggaggggaatagacccaaaaaacctcctccgccaagcgcccctgtaatcaagcagggcgctggcacgacagaaagaaagcacgagattaagaaaatcccacccgaaaggccggagatgctgcccaatcgcacagaagagaaggagagacccgaacgggaacccaagctggaccttcagaagccgtcagtgcctgctatacccccaaagaagcccaggccaccaaagactaactccctgtctaggcccggtgcgctgccacctcggaggcctgagagacccgtcggcccactcacacatacccgcggtgactccccaaagatcgacctggccggatcctccttgtccggtatccttgataaggatctttcggaccgctccaatgatatcgatctagaggggtttgatagcgtcgtctcatcaacggagaaactgagtcatcccactacctctcgacctaaagcaacgggtcgaaggccaccatcccagagtttgacatcttctagtctgagtagccccgacattttcgactcccccagccccgaggaggacaaggaggagcatatcagtctggcccaccggggagtcgatgcatcaaagaaaacatccaagaccgtgaccatttcgcaagtgtcggacaacaaagcctcattgcctccgaagcccggtacaatggccgctggaggagggggaccagccccactctctagcgccgctcctagcccgctatcttcaagtttaggcacagccggacatagggccaattctccatcattgttcggcacagaggggaagcccaagatggaaccagctgcctcttctcaagcggctgttgaggagctacggacacaagttcgagagctccgtagtatcatcgaaacgatgaaggatcagcaaaagagagagatcaaacaactgctctcagagttagacgaagagaagaagatacggctgcggctacagatggaggtgaatgacattaaaaaggctctccagagcaaatag

SEQ ID NO: 27954 - DNA, 450 bp, Artificial Sequence
  derived and/or modified sequence
tttgagacatcagagagacgtaggagacggtgtcaggtggcttttagctacctgcctcagaatgacgatgaactggagctcaaggtaggcgacataatcgaggttgtcggagaagtcgaagaggggtggtgggagggcgtgctgaatgggaaaaccggaatgttccccagtaacttcattaaagaactgagcggggagtccgacgagctgggtatttcacaggatgaacagttaagtaaaagctccttgagagaaaccacaggatcagagagcgatgggggtgattcctcctccactaagtccgaaggtgcgaacggcaccgtcgccacagcagcaattcaacctaagaaggtcaaaggcgtcgggttcggcgatattttcaaggataagcctataaagctgcgtccaagaagtatagaagttgagaatgatttcctcccggtagagtag

SEQ ID NO: 27955 - DNA, 450 bp, Artificial Sequence
  derived and/or modified sequence
atggagcggagcgaaaggaggcggagacggtgccaggtggcattcagctatctgccccagaacgatgatgagctcgaattgaaagtcggggatattatcgaagtcgtcggggaagtcgaggaaggatggtgggagggcgtgcttaacggaaagactggaatgtttccttctaacttcattaaagagctgtcaggtgagtccgatgagctggggatatcacaggacgagcagctaagtaaatcttccctcagggagactactgggtccgaatccgacggaggagactcatcatccacaaaatccgagggggcaaacggcaccgtggccacagctgccattcagcccaagaaggtcaagggcgtgggatttggtgatattttcaaagataaacctataaagctcaggcctaggtccatcgaggtggagaacgacttcctgcctgttgagtag

SEQ ID NO: 27956 - DNA, 627 bp, Artificial Sequence
  derived and/or modified sequence
atggagattaaaaaagaaatgaaaaaggatcccctgacaaataaagctccagagaaacctcttcatgaggtgcctagcggcaattccctgttgtcctctgagactatcctgcgcacaaataaaaggggtgaacgtcggaggcgcaggtgtcaagtcgccttttcgtacttaccgcaaaacgacgacgagttggaattgaaggtgggtgatataattgaagtggtaggcgaagtggaggaaggctggtgggaaggggtgctgaatggaaagaccggcatgttcccttccaacttcatcaaagaattgtccggggagtctgatgagctggggatcagccaggatgagcagttgtctaagtcttcgttgcgggagacaaccggaagcgaaagtgatggcggtgactcctcttcaaccaaaagtgagggcgctaacgggaccgtcgccacggccgctatacagcctaagaaagtgaagggcgtgggtttcggcgatatattcaaggataaaccaatcaagctacgtccgagatccattgaggtggagaatgactttctccctgtggaaaaaacgatcggtaagaagctccctgcaaccaccgctacaccagactcctcaaaaactgaatag

SEQ ID NO: 27957 - DNA, 2678 bp, Artificial Sequence
  derived and/or modified sequence
gagcacggaacttattcctgcccagagttcagacacagccagaaattaccatttcatacttcacagaatggaggtttcagcagccaaagccccaagtgccgcagacttgtctgagattgaaataaagaaagagatgaagaaagaccctctcaccaacaaagctccagaaaagcccctgcacgaagtgcccagtggaaactctttgctgtcttctgaaacgattttaagaaccaataagagaggcgagcgacggaggcgccggtgccaggtggcattcagctacctgccccagaatgacgatgaacttgagctgaaagttggcgacatcatagaggtggtaggagaggtagaggaaggatggtgggaaggtgttctcaacgggaagactggaatgtttccttccaacttcatcaaggagctgtcaggggagtcggatgagcttggcatttcccaggatgagcagctatccaagtcaagtttaagggaaaccacaggctccgagagtgatgggggtgactcaagcagcaccaagtctgaaggtgccaacgggacagtggcaactgcagcaatccagcccaagaaagttaagggagtgggctttggagacattttcaaagacaagccaatcaaactaagaccaaggtcaattgaagtagaaaatgactttctgccggtagaaaagactattgggaagaagttacctgcaactacagcaactccagactcatcaaaaacagaaatggacagcaggacaaagagcaaggattactgcaaagtaatatttccatatgaggcacagaatgatgatgaattgacaatcaaagaaggagatatagtcactctcatcaataaggactgcatcgacgtaggctggtgggaaggagagctgaacggcagacgaggcgtgttccccgataacttcgtgaagttacttccaccggactttgaaaaggaagggaatagacccaagaagccaccgcctccatccgctcctgtcatcaaacaaggggcaggcaccactgagagaaaacatgaaattaaaaagatacctcctgaaagaccagaaatgcttccaaacagaacagaagaaaaagaaagaccagagagagagccaaaactggatttacagaagccctccgttcctgccataccgccaaaaaagcctcggccacctaagaccaattctctcagcagacctggcgcactgcccccgagaaggccggagagaccggtgggtccgctgacacacaccaggggtgacagtccaaagattgacttggccggcagttcgctatctggcatcctggacaaagatctctcggaccgcagcaatgacattgacttagaaggttttgactccgtggtatcatctactgagaaactcagtcatccgaccacaagcagaccaaaagctacagggaggcggcctccgtcccagtccctcacatcttcatccctttcaagccctgatatcttcgactccccaagtcccgaagaggataaggaggaacacatttcacttgcgcacagaggagtggacgcgtcaaagaaaacttccaagactgttaccatatcccaagtgtctgacaacaaagcatccctgccgcccaagccggggaccatggcagcaggtggcggtgggccagcccctctgtcctcagcggcgccctcccccctgtcatcctctttgggaacagctggacacagagccaactccccgtctctgttcggcacggaaggaaaaccaaagatggagcctgcggccagcagccaggcggccgtggaggagctaaggacacaggtccgcgagctgaggagcatcatcgagaccatgaaggaccagcagaaacgagagattaaacagttattgtctgagttggatgaagagaagaaaatccggcttcggttgcagatggaagtgaacgacataaagaaagctctacaatcaaaatgaatacttgatcaatgaaatgtcacattattcatcctgagtccgagactcaaattttctgccccagccaaaataatcttgtgccaaaagattaaaggtttgcctcaaaatgtccctgtttgaaagattagcacaaaagtcttgatagcacaacacaaattccatccaagaggagaatcttccccagggtttagtcctggggctggcactcgttgtgacttacacagagcaaaattgtgctaaaggcttttctactctgagatctcaatgcgaaatgaaaactcaggcagtttagtccatagtggtactattttgatgatattttccattaataaaatgtaatttcagattattcgtttacaagctttataattttatgattttttaatcgtgttttgtcacagacttccctagtgtttgtactacacgtagtcagaagcgagtgtccttttcttttgcttcaggctaagagctgcctcgctctttgtccccccattaggattctattacatatgcaattgtaggttcaacctgtccctttccctgccagcaaaccccaccaccctaagagaaattttagcttatatatgacggtatatttacaaaaagagaaagagaaaatctggtatttgcaatgatctgtgccttctttttaccaccctcttgattggagcttttgtgatgcagctaccatgattcaaaaaaattaaaaattaaaaaaaaaaaa

SEQ ID NO: 27958 - DNA, 2737 bp, Artificial Sequence
  derived and/or modified sequence
tttgagacaagcgagcgacggaggcgccggtgccaggtggcattcagctacctgccccagaatgacgatgaacttgagctgaaagttggcgacatcatagaggtggtaggagaggtagaggaaggatggtgggaaggtgttctcaacgggaagactggaatgtttccttccaacttcatcaaggagctgtcaggggagtcggatgagcttggcatttcccaggatgagcagctatccaagtcaagtttaagggaaaccacaggctccgagagtgatgggggtgactcaagcagcaccaagtctgaaggtgccaacgggacagtggcaactgcagcaatccagcccaagaaagttaagggagtgggctttggagacattttcaaagacaagccaatcaaactaagaccaaggtcaattgaagtagaaaatgactttctgccggtagaaaagactattgggaagaagttacctgcaactacagcaactccagactcatcaaaaacagaaatggacagcaggacaaagagcaaggattactgcaaagtaatatttccatatgaggcacagaatgatgatgaattgacaatcaaagaaggagatatagtcactctcatcaataaggactgcatcgacgtaggctggtgggaaggagagctgaacggcagacgaggcgtgttccccgataacttcgtgaagttacttccaccggactttgaaaaggaagggaatagacccaagaagccaccgcctccatccgctcctgtcatcaaacaaggggcaggcaccactgagagaaaacatgaaattaaaaagatacctcctgaaagaccagaaatgcttccaaacagaacagaagaaaaagaaagaccagagagagagccaaaactggatttacagaagccctccgttcctgccataccgccaaaaaagcctcggccacctaagaccaattctctcagcagacctggcgcactgcccccgagaaggccggagagaccggtgggtccgctgacacacaccaggggtgacagtccaaagattgacttggccggcagttcgctatctggcatcctggacaaagatctctcggaccgcagcaatgacattgacttagaaggttttgactccgtggtatcatctactgagaaactcagtcatccgaccacaagcagaccaaaagctacagggaggcggcctccgtcccagtccctcacatcttcatccctttcaagccctgatatcttcgactccccaagtcccgaagaggataaggaggaacacatttcacttgcgcacagaggagtggacgcgtcaaagaaaacttccaagactgttaccatatcccaagtgtctgacaacaaagcatccctgccgcccaagccggggaccatggcagcaggtggcggtgggccagcccctctgtcctcagcggcgccctcccccctgtcatcctctttgggaacagctggacacagagccaactccccgtctctgttcggcacggaaggaaaaccaaagatggagcctgcggccagcagccaggcggccgtggaggagctaaggacacaggtccgcgagctgaggagcatcatcgagaccatgaaggaccagcagaaacgagagattaaacagttattgtctgagttggatgaagagaagaaaatccggcttcggttgcagatggaagtgaacgacataaagaaagctctacaatcaaaatgaatacttgatcaatgaaatgtcacattattcatcctgagtccgagactcaaattttctgccccagccaaaataatcttgtgccaaaagattaaaggtttgcctcaaaatgtccctgtttgaaagattagcacaaaagtcttgatagcacaacacaaattccatccaagaggagaatcttccccagggtttagtcctggggctggcactcgttgtgacttacacagagcaaaattgtgctaaaggcttttctactctgagatctcaatgcgaaatgaaaactcaggcagtttagtccatagtggtactattttgatgatattttccattaataaaatgtaatttcagattattcgtttacaagctttataattttatgattttttaatcgtgttttgtcacagacttccctagtgtttgtactacacgtagtcagaagcgagtgtccttttcttttgcttcaggctaagagctgcctcgctctttgtccccccattaggattctattacatatgcaattgtaggttcaacctgtccctttccctgccagcaaaccccaccaccctaagagaaattttagcttatatatgacggtatatttacaaaaagagaaagagaaaatctggtatttgcaatgatctgtgccttctttttaccaccctcttgattggagcttttgtgatgcagctaccatgattcaaaaaaattaaaaattaaaaaaaaaaaatctgccacttatccaagtccactagaggccactgtcttcaaagcttctctcaccctagccaaaggtcctaagaggagacagctgtgaagttgggcgtgctctgtggtaccagctgtgacttttctatttctcctagttttaggttgttcatgaaactagaaatgtcatcctgcttgatttttcatcagccaagttaaacccctgctttctgtcctttgcaccttttgcgtgaacagaatatgcattattaaagcaaaaataaataaaagtaaaatgcaaatgaaaacaagg

SEQ ID NO: 27959 - DNA, 518 bp, Artificial Sequence
  derived and/or modified sequence
cgccaaggcggtggcgtggatcttgataggccgtgagctctttggcagaaatgaaactgttaacaaaggatggaaagaagcgagcgacggaggcgccggtgccaggtggcattcagctacctgccccagaatgacgatgaacttgagctgaaagttggcgacatcatagaggtggtaggagaggtagaggaaggatggtgggaaggtgttctcaacgggaagactggaatgtttccttccaacttcatcaaggagctgtcaggggagtcggatgagcttggcatttcccaggatgagcagctatccaagtcaagtttaagggaaaccacaggctccgagagtgatgggggtgactcaagcagcaccaagtctgaaggtgccaacgggacagtggcaactgcagcaatccagcccaagaaagttaagggagtgggctttggagacattttcaaagacaagccaatcaaactaagaccaaggtcaattgaagtagaaaatgactttctgccggtagaaaa

SEQ ID NO: 27960 - DNA, 663 bp, Artificial Sequence
  derived and/or modified sequence
gctgctgtgaacagaggcagcaactggggaattggatatggaaataaagaaagagatgaagaaagaccctctcaccaacaaagctccagaaaagcccctgcacgaagtgcccagtggaaactctttgctgtcttctgaaacgattttaagaaccaataagagaggcgagcgacggaggcgccggtgccaggtggcattcagctacctgccccagaatgacgatgaacttgagctgaaagttggcgacatcatagaggtggtaggagaggtagaggaaggatggtgggaaggtgttctcaacgggaagactggaatgtttccttccaacttcatcaaggagctgtcaggggagtcggatgagcttggcatttcccaggatgagcagctatccaagtcaagtttaagggaaaccacaggctccgagagtgatgggggtgactcaagcagcaccaagtctgaaggtgccaacgggacagtggcaactgcagcaatccagcccaagaaagttaagggagtgggctttggagacattttcaaagacaagccaatcaaactaagaccaaggtcaattgaagtagaaaatgactttctgccggtagaaaagactattgggaagaagttacctgcaactacagcaactccagactcatcaaaaacagaaat

SEQ ID NO: 27961 - DNA, 1887 bp, Artificial Sequence
  derived and/or modified sequence
atggaggtgagcgccgccaaggcccccagcgccgccgacctgagcgagatcgagatcaagaaggagatgaagaaggaccccctgaccaacaaggcccccgagaagcccctgcacgaggtgcccagcggcaacagcctgctgagcagcgagaccatcctgagaaccaacaagagaggcgagagaagaagaagaagatgccaggtggccttcagctacctgccccagaacgacgacgagctggagctgaaggtgggcgacatcatcgaggtggtgggcgaggtggaggagggctggtgggagggcgtgctgaacggcaagaccggcatgttccccagcaacttcatcaaggagctgagcggcgagagcgacgagctgggcatcagccaggacgagcagctgagcaagagcagcctgagagagaccaccggcagcgagagcgacggcggcgacagcagcagcaccaagagcgagggcgccaacggcaccgtggccaccgccgccatccagcccaagaaggtgaagggcgtgggcttcggcgacatcttcaaggacaagcccatcaagctgagacccagaagcatcgaggtggagaacgacttcctgcccgtggagaagaccatcggcaagaagctgcccgccaccaccgccacccccgacagcagcaagaccgagatggacagcagaaccaagagcaaggactactgcaaggtgatcttcccctacgaggcccagaacgacgacgagctgaccatcaaggagggcgacatcgtgaccctgatcaacaaggactgcatcgacgtgggctggtgggagggcgagctgaacggcagaagaggcgtgttccccgacaacttcgtgaagctgctgccccccgacttcgagaaggagggcaacagacccaagaagccccccccccccagcgcccccgtgatcaagcagggcgccggcaccaccgagagaaagcacgagatcaagaagatcccccccgagagacccgagatgctgcccaacagaaccgaggagaaggagagacccgagagagagcccaagctggacctgcagaagcccagcgtgcccgccatcccccccaagaagcccagaccccccaagaccaacagcctgagcagacccggcgccctgccccccagaagacccgagagacccgtgggccccctgacccacaccagaggcgacagccccaagatcgacctggccggcagcagcctgagcggcatcctggacaaggacctgagcgacagaagcaacgacatcgacctggagggcttcgacagcgtggtgagcagcaccgagaagctgagccaccccaccaccagcagacccaaggccaccggcagaagaccccccagccagagcctgaccagcagcagcctgagcagccccgacatcttcgacagccccagccccgaggaggacaaggaggagcacatcagcctggcccacagaggcgtggacgccagcaagaagaccagcaagaccgtgaccatcagccaggtgagcgacaacaaggccagcctgccccccaagcccggcaccatggccgccggcggcggcggccccgcccccctgagcagcgccgcccccagccccctgagcagcagcctgggcaccgccggccacagagccaacagccccagcctgttcggcaccgagggcaagcccaagatggagcccgccgccagcagccaggccgccgtggaggagctgagaacccaggtgagagagctgagaagcatcatcgagaccatgaaggaccagcagaagagagagatcaagcagctgctgagcgagctggacgaggagaagaagatcagactgagactgcagatggaggtgaacgacatcaagaaggccctgcagagcaagtag

SEQ ID NO: 27962 - DNA, 450 bp, Artificial Sequence
  derived and/or modified sequence
ttcgagaccagcgagagaagaagaagaagatgccaggtggccttcagctacctgccccagaacgacgacgagctggagctgaaggtgggcgacatcatcgaggtggtgggcgaggtggaggagggctggtgggagggcgtgctgaacggcaagaccggcatgttccccagcaacttcatcaaggagctgagcggcgagagcgacgagctgggcatcagccaggacgagcagctgagcaagagcagcctgagagagaccaccggcagcgagagcgacggcggcgacagcagcagcaccaagagcgagggcgccaacggcaccgtggccaccgccgccatccagcccaagaaggtgaagggcgtgggcttcggcgacatcttcaaggacaagcccatcaagctgagacccagaagcatcgaggtggagaacgacttcctgcccgtggagtag

SEQ ID NO: 27963 - DNA, 450 bp, Artificial Sequence
  derived and/or modified sequence
atggagagaagcgagagaagaagaagaagatgccaggtggccttcagctacctgccccagaacgacgacgagctggagctgaaggtgggcgacatcatcgaggtggtgggcgaggtggaggagggctggtgggagggcgtgctgaacggcaagaccggcatgttccccagcaacttcatcaaggagctgagcggcgagagcgacgagctgggcatcagccaggacgagcagctgagcaagagcagcctgagagagaccaccggcagcgagagcgacggcggcgacagcagcagcaccaagagcgagggcgccaacggcaccgtggccaccgccgccatccagcccaagaaggtgaagggcgtgggcttcggcgacatcttcaaggacaagcccatcaagctgagacccagaagcatcgaggtggagaacgacttcctgcccgtggagtag

SEQ ID NO: 27964 - DNA, 627 bp, Artificial Sequence
  derived and/or modified sequence
atggagatcaagaaggagatgaagaaggaccccctgaccaacaaggcccccgagaagcccctgcacgaggtgcccagcggcaacagcctgctgagcagcgagaccatcctgagaaccaacaagagaggcgagagaagaagaagaagatgccaggtggccttcagctacctgccccagaacgacgacgagctggagctgaaggtgggcgacatcatcgaggtggtgggcgaggtggaggagggctggtgggagggcgtgctgaacggcaagaccggcatgttccccagcaacttcatcaaggagctgagcggcgagagcgacgagctgggcatcagccaggacgagcagctgagcaagagcagcctgagagagaccaccggcagcgagagcgacggcggcgacagcagcagcaccaagagcgagggcgccaacggcaccgtggccaccgccgccatccagcccaagaaggtgaagggcgtgggcttcggcgacatcttcaaggacaagcccatcaagctgagacccagaagcatcgaggtggagaacgacttcctgcccgtggagaagaccatcggcaagaagctgcccgccaccaccgccacccccgacagcagcaagaccgagtag

SEQ ID NO: 27965 - protein, 116 aa, Artificial Sequence
  derived and/or modified sequence
MGWKMASPTDGTDLEASLLSFEKLDRASPDLWPEQLPGVAEFAASFKSPITSSPPKWMAEIERDDIDMLKELGSLTTANLMEKVRGLQNLAYQLGLDESREMTRGKFLNILEKPKK

SEQ ID NO: 27966 - DNA, 351 bp, Artificial Sequence
  derived and/or modified sequence
atgggctggaagatggccagccccaccgacggcaccgacctggaggccagcctgctgagcttcgagaagctggacagagccagccccgacctgtggcccgagcagctgcccggcgtggccgagttcgccgccagcttcaagagccccatcaccagcagcccccccaagtggatggccgagatcgagagagacgacatcgacatgctgaaggagctgggcagcctgaccaccgccaacctgatggagaaggtgagaggcctgcagaacctggcctaccagctgggcctggacgagagcagagagatgaccagaggcaagttcctgaacatcctggagaagcccaagaagtag

SEQ ID NO: 27967 - DNA, 351 bp, Artificial Sequence
  derived and/or modified sequence
atggggtggaagatggcctcccctaccgatggcactgatctggaagcctctctgctttcctttgaaaagctagaccgcgcatcaccagatctatggccagagcaattgcccggggttgcagagttcgctgcctcatttaaaagtccaataacctcaagcccccccaagtggatggccgaaattgaacgggatgatatagatatgttaaaggagctgggatcattgaccacggcaaacctgatggaaaaagtcagaggactacagaatctggcctaccagttaggcttggacgagtcccgcgaaatgacccgcgggaagttcctgaatatactggaaaagcccaagaagtag

SEQ ID NO: 27968 - DNA, 351 bp, Artificial Sequence
  derived and/or modified sequence
atgggctggaagatggccagccccacagatggaacagacctggaggccagcctgctgagctttgagaagctggaccgggccagcccagacctgtggccagagcagctgcccggggtggccgagtttgctgccagcttcaagagccccatcaccagcagcccccccaagtggatggccgagattgaaagagatgacatcgacatgctgaaggagctgggcagcctgaccacagccaacctgatggagaaggtgcggggcctgcagaacctggcctaccagctgggcctggatgagagccgggagatgacccggggcaagttcctgaacatcctggagaagcccaagaagtag

SEQ ID NO: 27969 - DNA, 1798 bp, Artificial Sequence
  derived and/or modified sequence
gtcacgtgacatgggttggaagatggcgtctcccacagacgggacagatctggaagcatctttgctaagttttgaaaaacttgaccgtgcctcaccagatctttggccagaacaattaccaggtgttgctgaatttgcagcttccttcaaaagtcctattactagttctccacccaaatggatggctgagatagaacgtgatgacatcgacatgttgaaagaactggggagtctcaccacggctaatttgatggagaaggttcgaggcctacagaacctagcctatcagctggggctggatgagtccagagagatgacacgggggaaattcctcaatattctagagaagcccaagaagtagcagctgcttgcggacaggatgtcctggggtccgaaaccaagctcccttcccggtgcacctctaacaatgcacacctcactgcttgcttgggagaggccagagggtgtacctccaggactgccctctcccctgctcctggcactctacacgtctgaggacattcagcagcaagagaagaatctgctctacccaaggatcattgcagttactcaatcaactttcagacttgaaccttcttagcctcggatattggtaacagctgagggcatatcattcttaaaggtcgaagtcctgctttctcatttctggaagtgattcaggagccccaggatcttacggttgatttgactcagtcatggcagtcagttgtgacatgttgattggatgggttcttttgaattgttcttgatctcttagaaagtgtttacgatgtgaggagaccagagaccaagtagattctggaccagaccatgcagcctgacctgtgaactctccagtatatactaagttcccagaatccccagctgaagaaaccagaatcttctcgaaatgtatatctgttttttaaaacttctatacctcttatgatagtcccatttgcttttcattccttacttcccagccccaccttctagttctgacttcgggcagagggatccctgagtccctcctggaattagcttgtatagtgaaaggcccatccaaggttgtctaaagaccaatgtgaaggtgacagaaaggacttttgagttctaattaatctgttacagcttcaagcaagaaagtcagtatagcctgaaagacaagagaaacgggatggtttataggagttcccatttggttgaaagctagaagccctaattgaccttaaagtaacatgctatgggatggtgggattgtcccctctgacagcacatatgaaatagttcatctatataatagaaacgcacacacacgaaaaagaatcttctgacttaaatacaactttcatggagttcttcaccacttatctgtctctgttaaaatctgaaaatctagcccatggctaaaatctattatatgtgttctccatatttcttgtataagccagtccccagcatctgatgttttgagaagtgcatggagtttcctaaactttgcacaaaagaatatcctggggccgggcatggtggctcacgcctgtaatcccagcactttgggaggccgaggcaggtggatcataggtcaaaagatcgagaccatcctggccaatatggtgaaaccctgtctctactaaaatacaaaaattagctgggcatgatggtgcatgcctatagtcccagctacttgggggcctgaggcacgagaatcgcttgaattcgggaggtggaggttgcagtgagccgaaattatgccactgcactccagcctgggcaacagagtgagactctgtctcag

SEQ ID NO: 27970 - DNA, 351 bp, Artificial Sequence
  derived and/or modified sequence
atgggctggaagatggccagccccaccgacggcaccgacctggaggcttctctgctttcatttgaaaagttggaccgggcgagcccagatctatggcccgaacagctgcctggggtagccgaattcgccgcttcattcaaatcacccattaccagcagcccacccaagtggatggcagaaattgaacgcgatgacatcgatatgctgaaagagcttgggtctctgaccacagccaatcttatggagaaggtccgcggcttgcagaacctggcttaccagctcggactcgacgagtccagggaaatgacgagaggcaagttcctaaacatcctggaaaagcctaagaagtag

SEQ ID NO: 27971 - DNA, 351 bp, Artificial Sequence
  derived and/or modified sequence
atgggctggaaaatggcaagccccactgacggcactgatctggaagctagcctactctcattcgaaaagcttgaccgcgcttcccctgatctgtggccagagcagctgcctggagtcgccgaattcgctgcatccttcaaatctcctataacgtcttcaccgccaaagtggatggccgagatagagcgggatgatatcgacatgctgaaagagttggggtcccttacaactgccaacctcatggagaaagtccgcggtttgcagaatttagcctaccagctcggcctagacgagagccgcgaaatgacaagggggaagttcctgaatatcctggaaaagccaaagaagtag

SEQ ID NO: 27972 - protein, 651 aa, Artificial Sequence
  derived and/or modified sequence
MGPASPAARGLSRRPGQPPLPLLLPLLLLLLRAQPAIGSLAGGSPGAAEAPGSAQVAGLCGRLTLHRDLRTGRWEPDPQRSRRCLRDPQRVLEYCRQMYPELQIARVEQATQAIPMERWCGGSRSGSCAHPHHQVVPFRCLPGEFVSEALLVPEGCRFLHQERMDQCESSTRRHQEAQEACSSQGLILHGSGMLLPCGSDRFRGVEYVCCPPPGTPDPSGTAVGDPSTRSWPPGSRVEGAEDEEEEESFPQPVDDYFVEPPQAEEEEETVPPPSSHTLAVVGKVTPTPRPTDGVDIYFGMPGEISEHEGFLRAKMDLEERRMRQINEVMREWAMADNQSKNLPKADRQALNEHFQSILQTLEEQVSGERQRLVETHATRVIALINDQRRAALEGFLAALQADPPQAERVLLALRRYLRAEQKEQRHTLRHYQHVAAVDPEKAQQMRFQVHTHLQVIEERVNQSLGLLDQNPHLAQELRPQIQELLHSEHLGPSELEAPAPGGSSEDKGGLQPPDSKDADTPMTLPKGSTEQDAASPEKEKMNPLEQYERKVNASVPRGFPFHSSEIQRDELAPAGTGVSREAVSGLLIMGAGGGSLIVLSMLLLRRKKPYGAISHGVVEVDPMLTLEEQQLRELQRHGYENPTYRFLEERP

SEQ ID NO: 27973 - DNA, 1956 bp, Artificial Sequence
  derived and/or modified sequence
atgggaccagcaagtcctgctgcccggggcctgtccaggagacctgggcagccccctctccctttgttgctgcccttgcttctgcttctgttaagagcacagcccgccatcggctcactcgccggcggcagcccaggcgctgcggaagctcccggctctgcacaggtggcaggtttgtgtggtaggctgactctgcatcgtgacctgagaaccggcaggtgggagccggacccccagcgcagcaggcgatgtctgcgagacccccaacgcgtactggagtattgcagacaaatgtaccccgaattacagattgctagagtcgagcaagcaacgcaggcgatccccatggaacgttggtgcggtgggtcaagatccggaagctgtgctcacccacaccatcaggtcgtccccttccgatgtctaccaggggaatttgtgtccgaggcactcttggtccctgaaggctgtcggttcctgcaccaggaacgtatggaccaatgcgagagcagtacgcgtcgtcaccaggaagctcaggaagcttgtagttctcaggggttaatcttgcatggctcgggaatgctgctgccctgcggcagtgatcgctttaggggcgtggagtatgtctgctgtccacctcctggaaccccagacccctctggcacagccgtgggcgatccgagcacccgctcttggccccccgggtccagggtggagggcgccgaggatgaggaagaggaagagtcttttccacaaccggtagacgattatttcgtggagcccccccaggctgaagaggaggaggagaccgtgccacctccgtcatctcacacgttggccgtggtagggaaggtaacccccactccccgacccaccgatggggtagacatatactttggaatgcctggggagatttccgaacacgaaggatttttacgggccaagatggatctggaggaacgccgcatgcgccagataaacgaggtaatgcgggagtgggctatggccgataatcaatcaaagaatctgccgaaggcggacagacaggccttaaacgaacattttcagtcaattctgcagaccttggaggagcaggtctcaggtgagagacagaggcttgtcgagacacatgccactagagtgatcgcactaattaacgaccagaggcgtgctgccctagaagggttcttggcggcactccaggccgacccgccccaagcggagcgtgtcctgctggcactgaggcggtatctccgcgctgaacagaaggagcagaggcatactctgcgacactatcaacacgtcgctgcggtggatcccgagaaagcccaacagatgcgctttcaggtgcatacgcatctgcaggtcatcgaagagagagtgaaccagtcactggggctgctcgaccagaacccccacttggcccaagagctgcggccccagatccaggagctgctgcacagcgaacacctgggcccctctgagctggaagctcctgcacctggtggcagctccgaggacaaaggtggactgcagccacctgactctaaggatgccgatacccccatgacacttccgaaaggtagcaccgagcaggatgcagcttctccggagaaagagaaaatgaatcccctggaacaatatgaaagaaaagttaacgccagcgttccgagaggatttccctttcatagttccgagatccagcgagacgaactggcgcccgctgggacaggggtttcacgagaagctgttagtgggctccttatcatgggagccgggggaggtagcttgatcgtcctgagcatgctcctcctgaggcggaaaaaaccttacggggctattagtcacggcgtcgtcgaggttgatccaatgcttactctcgaggaacagcagctaagagagctccagcggcacgggtacgagaatccgacatatagattccttgaggaacgaccctag

SEQ ID NO: 27974 - DNA, 1956 bp, Artificial Sequence
  derived and/or modified sequence
atgggccctgccagccctgctgcccggggcctgagcagaagacctggccagccccccctgcccctgctgctgcccctgctgctgctgctgctgcgggcccagcctgccatcggcagcctggccggcggcagccctggagctgctgaggcccctggcagcgcccaggtggccggcctgtgtggccgcctgaccctgcaccgggacctgaggacaggccgctgggagccagacccccagaggagccgccgctgcctgcgggacccccagagggtgctggagtactgccggcagatgtacccagagctgcagatcgcccgggtggagcaggccacccaggccatccccatggagcgctggtgtggcggcagccgcagcggcagctgtgcccacccccaccaccaggtggtgcccttccgctgcctgcccggggagtttgtgtctgaggccctgctggtgcctgagggctgccgcttcctgcaccaggagaggatggaccagtgtgagagcagcacccggcggcaccaggaggcccaggaggcctgcagcagccagggcctcatcctgcacggcagcggcatgctgctgccctgtggcagtgaccgcttccggggcgtggagtatgtgtgctgccccccacctggcaccccagaccccagcggcacagctgtgggggaccccagcaccaggtcctggcccccaggcagccgggtggagggcgcagaagatgaggaggaggaggagagcttcccccagcctgtggatgactactttgtggagcccccccaggccgaggaggaggaggagaccgtgcccccacccagcagccacaccctggccgtggtgggcaaggtgacccccaccccccggcccacagatggagtggacatctacttcggcatgcctggagagatcagcgagcacgagggcttcctgcgggccaagatggacctggaggagaggaggatgaggcagatcaatgaggtgatgagggagtgggccatggctgacaaccagagcaagaacctgcccaaggctgaccggcaggccctgaatgagcacttccagagcatcctgcagaccctggaggagcaggtgtctggagagcggcagaggctggtggagacccacgccaccagggtgattgccctgatcaatgaccagaggcgggccgccctggagggcttcctggccgccctgcaggccgaccccccccaggccgagcgggtgctgctggccctgcggcgctacctgcgggcagagcagaaggagcagaggcacaccctgcggcactaccagcacgtggccgctgtggaccctgagaaggcccagcagatgaggttccaggtgcacacccacctgcaggtgattgaggagcgggtgaaccagagcctgggcctgctggaccagaacccccacctggcccaggagctgcggccccagatccaggagctgctgcacagcgagcacctgggccccagcgagctggaggccccagcccctgggggcagcagtgaagataaaggaggcctgcagcccccagacagcaaggatgctgacacccccatgaccctgcccaagggcagcacagagcaggatgctgccagccctgagaaggagaagatgaaccccctggagcagtatgaaaggaaggtgaatgcctctgtgccccggggcttccccttccacagcagcgagatccagagagatgagctggccccagctggcaccggggtgtcccgggaggccgtgtctggcctgctgatcatgggcgccggcggcggcagcctgattgtgctgtccatgctgctgctgcggaggaagaagccctacggggccatcagccatggagtggtggaggtggaccccatgctgaccctggaggagcagcagctgcgggagctgcagagacatggctatgagaaccccacctaccgcttcctggaggagcggccctag

SEQ ID NO: 27975 - DNA, 1956 bp, Artificial Sequence
  derived and/or modified sequence
atgggccccgccagccccgccgcccggggcctgagccggcggcccggtcaaccgcccctgcctttgttactgcccctgctgcttttgctgttacgtgctcaacctgccatcgggagcttagccggaggatcccctggcgcagctgaagctccaggctcagcccaggtcgccggactttgtggaaggctgacactgcaccgcgacttgagaactggacggtgggagcccgaccctcagagatctcgccgctgcctccgtgacccacaaagggtgcttgagtactgtcgccaaatgtatccagaactccaaatagcaagagtggagcaggctactcaggcaatacccatggaaagatggtgcggcgggagtcgttcaggatcctgcgcccaccctcatcaccaggtcgtgcccttccggtgtttaccaggagaatttgtctctgaggccttattggttcccgaggggtgtcgcttccttcaccaagagcggatggatcagtgcgagagctccacaagaagacaccaggaagctcaagaggcctgttctagccaggggcttattctccatggcagcgggatgctattaccatgcggctccgaccggtttaggggggtcgagtatgtctgctgcccaccacccggtactcctgatccaagcggcaccgccgtgggggatccttctactaggtcctggccgccaggctccagagtggaaggcgccgaggatgaagaagaggaagaatccttcccacaacctgtggatgactactttgttgaacccccccaagcagaggaggaggaagagacggtgccccccccctcttcacacactttggcggtcgtgggcaaggtgacacctactcctaggccaacagatggtgtagatatatactttggaatgccaggtgaaatatcagagcatgaaggctttctcagagctaaaatggacctggaagagcggaggatgaggcaaatcaacgaagttatgcgggagtgggctatggctgacaatcagtccaagaacctgcccaaagccgatcgtcaggctctcaatgagcactttcagagtatcctgcagactctcgaagaacaggtgagcggtgagcgtcaacggctggtggagacgcatgcgactcgagtcatcgcgctgattaacgatcagagaagggccgccctggaaggctttctcgctgcactgcaggctgacccccctcaagctgaaagagtgctgctggccctgcgccgttatttgcgggccgaacaaaaagagcagcgccatactctgcgccactaccagcatgtggccgcagtggacccggagaaagctcaacagatgcgattccaggttcacacccacctccaggtgatagaagagagggtgaaccagtctctgggcttgctagaccaaaatccacacctcgctcaggagctgcgccctcagattcaggagctactccattctgagcatctgggtccttccgaactggaggcccccgctcctggaggcagcagcgaagacaagggtggcctgcagcccccggactcaaaggacgccgacaccccaatgaccctgcctaagggcagtactgaacaagatgcagctagtccagaaaaggagaaaatgaatccgctcgagcagtacgaacgcaaggttaatgcgtccgtgccccgcgggtttccattccattcttctgagatccagagagatgagctggcccctgccggtactggggtttcccgtgaagctgtgtccggtcttcttattatgggggcagggggaggttccctcatcgttttgtcaatgctgttactgagacggaaaaaaccctacggcgccattagccatggtgtggttgaagtggacccgatgcttacccttgaagagcagcagctgagggagctacagagacacggctacgaaaatcctacttataggttcctcgaggaaagaccttag

SEQ ID NO: 27976 - DNA, 1956 bp, Artificial Sequence
  derived and/or modified sequence
atgggtccggcaagtccggctgctaggggactatccagacgccctgggcagccccctctgcctttgctcctgcccctactcttgctgctgctccgcgctcaaccagccatcggaagtctggcgggtgggagccctggagctgccgaggcacccggaagcgctcaggtggccggactctgcgggcgactgaccctccaccgggaccttcgaacaggaaggtgggagcccgacccacagcggtcgcggagatgcttacgggacccccagcgagtccttgagtactgcaggcaaatgtatcccgagttgcagatcgccagggtggaacaggctacgcaggccattcctatggagcggtggtgcggcggtagccggagcggatcatgcgcccaccctcatcaccaggtggtgcccttcagatgtttacctggcgaattcgtgtccgaggccctcttagttccggaagggtgcagatttctgcaccaggagaggatggaccagtgtgaaagctctacacgcagacatcaggaagcacaggaggcgtgctcgagccagggactcatcctgcacggtagcggaatgctcttaccgtgcggttccgatcggtttcgaggagtagagtatgtgtgctgcccaccccctggaaccccagatccatccggcacggccgttggggacccatctactaggtcttggccaccaggaagcagagtagagggagcagaagacgaggaggaggaagagtcctttcctcagcctgtggacgattacttcgtggagccaccccaggccgaggaggaggaagagaccgtaccaccccctagctctcataccctggccgtggtaggcaaggttacccctactcctcgtccgaccgatggcgttgatatatatttcgggatgcctggcgagatctcagaacacgaagggttcctccgggcaaagatggacctggaggagaggcggatgcgacaaataaatgaagtgatgcgtgagtgggccatggcggacaaccaaagtaaaaacttgcccaaagcggatcggcaggccctgaatgaacactttcaatcaatactgcagacacttgaggaacaagtgtccggggaacgccaacgtctcgttgaaacccatgccaccagagtgattgccctgatcaatgatcagaggcgggctgcactggaaggcttccttgcagccttacaggccgaccctccacaagcagaaagggtgctgctggctctaagaaggtacctgagggctgagcagaaagaacaacgtcacacccttcgtcactatcaacatgtggccgctgttgacccagagaaagctcagcagatgaggtttcaagtccatacgcacctgcaagtcattgaagaacgagtcaaccagtcgctgggcctgctggaccagaacccccacctagctcaggaactccgacctcagatccaggagctgctgcatagcgaacatcttggcccatctgaactggaggctcccgctcctggaggctcctccgaagacaaagggggactccagcccccagacagcaaggacgctgatacccccatgaccttgcctaaaggcagtacagaacaagatgccgctagtccagagaaagagaagatgaatcccctggaacagtacgagaggaaggtaaatgccagtgtccccagaggatttccttttcacagctccgagattcaacgcgatgaactagcacccgctgggactggagtcagtcgcgaagctgtttcagggctgctgattatgggcgctggcggaggatctttaatcgtcctgtctatgctcctgttacgcagaaaaaagccatacggtgcaatctctcacggtgtggtggaagtggatcccatgctaacacttgaagaacagcagttgcgtgaacttcagcggcacggttatgaaaatccaacttatcgcttcctggaagaaaggccttag

SEQ ID NO: 27977 - DNA, 1956 bp, Artificial Sequence
  derived and/or modified sequence
atgggccccgccagccccgccgccagaggcctgagcagaagacccggccagccccccctgcccctgctgctgcccctgctgctgctgctgctgagagcccagcccgccatcggcagcctggccggcggcagccccggcgccgccgaggcccccggcagcgcccaggtggccggcctgtgcggcagactgaccctgcacagagacctgagaaccggcagatgggagcccgacccccagagaagcagaagatgcctgagagacccccagagagtgctggagtactgcagacagatgtaccccgagctgcagatcgccagagtggagcaggccacccaggccatccccatggagagatggtgcggcggcagcagaagcggcagctgcgcccacccccaccaccaggtggtgcccttcagatgcctgcccggcgagttcgtgagcgaggccctgctggtgcccgagggctgcagattcctgcaccaggagagaatggaccagtgcgagagcagcaccagaagacaccaggaggcccaggaggcctgcagcagccagggcctgatcctgcacggcagcggcatgctgctgccctgcggcagcgacagattcagaggcgtggagtacgtgtgctgccccccccccggcacccccgaccccagcggcaccgccgtgggcgaccccagcaccagaagctggccccccggcagcagagtggagggcgccgaggacgaggaggaggaggagagcttcccccagcccgtggacgactacttcgtggagcccccccaggccgaggaggaggaggagaccgtgcccccccccagcagccacaccctggccgtggtgggcaaggtgacccccacccccagacccaccgacggcgtggacatctacttcggcatgcccggcgagatcagcgagcacgagggcttcctgagagccaagatggacctggaggagagaagaatgagacagatcaacgaggtgatgagagagtgggccatggccgacaaccagagcaagaacctgcccaaggccgacagacaggccctgaacgagcacttccagagcatcctgcagaccctggaggagcaggtgagcggcgagagacagagactggtggagacccacgccaccagagtgatcgccctgatcaacgaccagagaagagccgccctggagggcttcctggccgccctgcaggccgaccccccccaggccgagagagtgctgctggccctgagaagatacctgagagccgagcagaaggagcagagacacaccctgagacactaccagcacgtggccgccgtggaccccgagaaggcccagcagatgagattccaggtgcacacccacctgcaggtgatcgaggagagagtgaaccagagcctgggcctgctggaccagaacccccacctggcccaggagctgagaccccagatccaggagctgctgcacagcgagcacctgggccccagcgagctggaggcccccgcccccggcggcagcagcgaggacaagggcggcctgcagccccccgacagcaaggacgccgacacccccatgaccctgcccaagggcagcaccgagcaggacgccgccagccccgagaaggagaagatgaaccccctggagcagtacgagagaaaggtgaacgccagcgtgcccagaggcttccccttccacagcagcgagatccagagagacgagctggcccccgccggcaccggcgtgagcagagaggccgtgagcggcctgctgatcatgggcgccggcggcggcagcctgatcgtgctgagcatgctgctgctgagaagaaagaagccctacggcgccatcagccacggcgtggtggaggtggaccccatgctgaccctggaggagcagcagctgagagagctgcagagacacggctacgagaaccccacctacagattcctggaggagagaccctag

SEQ ID NO: 27978 - DNA, 2450 bp, Artificial Sequence
  derived and/or modified sequence
ggggcggggctggcggcgccggcgcagcccgggggcggcgggaggaggaggtggcggcggtggcgctgggagctcctgtcaccgctggggccgggccgggcgggagtgcaggggacgtgagggcgcaagggccgggacatggggcccgccagccccgctgctcgcggtctaagtcgccgcccgggccagccgccgctgccgctgctgctgccactattgctgctgcttctgcgcgcgcagcccgccatcgggagcctggccggtgggagccccggcgcggccgaggccccggggtcggcccaggtggctggactatgcgggcgcctaacccttcaccgggacctgcgcaccggccgctgggaaccagacccacagcgctctcgacgctgtctccgggacccgcagcgcgtgctggagtactgcagacagatgtacccggagctgcagattgcacgtgtggagcaggctacgcaggccatccccatggagcgctggtgcgggggttcccggagcggcagctgcgcccacccccaccaccaggttgtgcccttccgctgcctgcctggtgaatttgtgagtgaggccctgctggtgcctgaaggctgccggttcttgcaccaggagcgcatggaccaatgtgagagttcaacccggaggcatcaggaggcacaggaggcctgcagctcccagggcctcatcctgcacggctcgggcatgctcttaccctgtggctcggatcggttccgtggtgtggagtatgtgtgctgtccccctccagggacccccgacccatctgggacagcagttggtgacccctccacccggtcctggcccccggggagcagagtagagggggctgaggacgaggaagaggaggaatccttcccacagccagtagatgattacttcgtggagcctccgcaggctgaagaggaagaggaaacggtcccacccccaagctcccatacacttgcagtggtcggcaaagtcactcccaccccgaggcccacagacggtgtggatatttactttggcatgcctggggaaatcagtgagcacgaggggttcctgagggccaagatggacctggaggagcgtaggatgcgccagattaatgaggtgatgcgtgaatgggccatggcagacaaccagtccaagaacctgcctaaagccgacagacaggccctgaatgagcacttccagtccattctgcagactctggaggagcaggtgtctggtgagcgacagcgcctggtggaaacccacgccacccgcgtcatcgcccttatcaacgaccagcgccgggctgccttggagggcttcctggcagccctgcaggcagatccgcctcaggcggagcgtgtcctgttggccctgcggcgctacctgcgtgcggagcagaaggaacagaggcacacgctgcgccactaccagcatgtggccgccgtggatcccgagaaggcacagcagatgcgcttccaggtgcatacccaccttcaagtgattgaggagagggtgaatcagagcctgggcctgcttgaccagaacccccacctggctcaggagctgcggccccaaatccaggaactcctccactctgaacacctgggtcccagtgaattggaagcccctgcccctgggggcagcagcgaggacaagggtgggctgcagcctccagattccaaggatgcagacacccccatgacccttccaaaagggtccacagaacaagatgctgcatcccctgagaaagagaagatgaacccgctggaacagtatgagcgaaaggtgaatgcgtctgttccaaggggtttccctttccactcatcggagattcagagggatgagctggcaccagctgggacaggggtgtcccgtgaggctgtgtcgggtctgctgatcatgggagcgggcggaggctccctcatcgtcctctccatgctgctcctgcgcaggaagaagccctacggggctatcagccatggcgtggtggaggtggaccccatgctgaccctggaggagcagcagctccgcgaactgcagcggcacggctatgagaaccccacttaccgcttcctggaggaacgaccctgacccggcccccttcaccccttcagccgagcccagacctcccctcttcctggagccccagaaccccaactcccagcctagggcagcagggagtcttgaagtgatcatttcacacccttttgtgagacggctggaaattcttatttcccctttccaattccaaaattccatccctaagaattcccagatagtcccagcagcctccccacgtggcacctcctcaccttaatttattttttaagtttatttatggctctttaaggtgaccgccaccttggtcctagtgtctattccctggaattcaccctctcatgtttccctactaacatcccaataaagtcctcttccctaccaggcca

SEQ ID NO: 27979 - protein, 210 aa, Artificial Sequence
  derived and/or modified sequence
MSGRSVRAETRSRAKDDIKRVMAAIEKVRKWEKKWVTVGDTSLRIYKWVPVTEPKVDDKNKNKKKGKDEKCGSEVTTPENSSSPGMMDMHDDNSNQSSIADASPIKQENSSNSSPAPEPNSAVPSDGTEAKVDEAQADGKEHPGAEDASDEQNSQSSMEHSMNSSEKVDRQPSGDSGLAAETSAISQDLEGVPPSKKMKLEASQQNSEEM

SEQ ID NO: 27980 - DNA, 633 bp, Artificial Sequence
  derived and/or modified sequence
atgagcgggcgatctgtccgagccgaaacacggtcccgcgcaaaggacgacattaaaagagtcatggccgccattgaaaaggtgcgcaaatgggagaagaaatgggtcaccgtaggcgacacctcgctgagaatttacaagtgggtgccagtgaccgagcctaaggttgacgataagaacaagaataaaaagaaaggaaaggatgagaaatgtgggtccgaggtgactaccccagaaaattcctccagccccggcatgatggatatgcatgatgataatagcaaccaatcttctatcgctgatgcctcacctatcaagcaagaaaactcctctaactcttctccggcaccagagcccaattccgccgtccccagcgacggtactgaggctaaggtagacgaagcccaggccgatggaaaggagcaccccggggctgaggatgcctcagatgaacagaactcccagagctccatggaacatagcatgaacagtagtgagaaggtcgacagacagcccagcggcgatagtggcttagccgcagagacctctgccatttcccaggatctagagggcgtccccccctcgaaaaaaatgaagctggaggccagccagcaaaactctgaggagatgtag

SEQ ID NO: 27981 - DNA, 633 bp, Artificial Sequence
  derived and/or modified sequence
atgagcggccgctctgtgcgggcagagaccaggagccgggccaaggatgacatcaagagggtgatggccgccatcgagaaggtgaggaagtgggagaagaagtgggtgacagtgggggacaccagcctgcgcatctacaagtgggtgcctgtgacagagcccaaggtggatgacaagaacaagaacaagaagaagggcaaggatgagaagtgtggcagcgaggtgaccaccccagagaacagcagcagccctggcatgatggacatgcatgatgacaacagcaaccagagcagcattgctgatgccagccccatcaagcaggagaacagcagcaacagcagccctgcccctgagcccaacagcgctgtgcccagtgatggaacagaggccaaggtggatgaggcccaggctgatggcaaggagcaccctggagcagaagatgccagtgatgagcagaacagccagagctccatggagcacagcatgaacagcagcgagaaggtggaccggcagcccagcggggacagcggcctggccgctgagaccagcgccatcagccaggacctggagggcgtgccccccagcaagaagatgaagctggaggccagccagcagaacagcgaggagatgtag

SEQ ID NO: 27982 - DNA, 633 bp, Artificial Sequence
  derived and/or modified sequence
atgagcggccggagcgtgcgggccgagacccggagccgggccaaggacgatattaagagagttatggctgcaatagaaaaggtgagaaaatgggaaaaaaagtgggttactgtgggtgatacctcactgagaatttataaatgggtgcctgtcacagagcctaaggtggacgacaagaacaagaacaagaagaaggggaaggacgagaagtgcggaagtgaagtgacaactccagagaactcctcaagccctggaatgatggacatgcacgatgataactccaatcagagcagcattgctgatgctagccccattaagcaggagaactcgtctaattccagccctgcccccgaacctaattctgctgtaccatcagacggaactgaagctaaggtggatgaagcccaggctgacgggaaagagcatccaggggccgaggatgcttccgacgaacaaaactcacagagcagcatggaacattctatgaacagctctgagaaagttgatagacagccgtctggggactctgggctcgcggctgagacctctgcaataagccaggatctcgagggggtcccacccagtaaaaaaatgaaactggaagcttctcagcaaaatagcgaggaaatgtag

SEQ ID NO: 27983 - DNA, 633 bp, Artificial Sequence
  derived and/or modified sequence
atgtcaggaaggagtgttagagccgagacgcgcagcagagcaaaggatgatattaaacgagttatggccgcaatcgagaaggtgcggaaatgggaaaaaaaatgggtaacagtcggtgacacttctctgcggatctacaaatgggtccccgtaacagagcccaaagtagacgataaaaataagaacaagaaaaagggtaaggacgaaaagtgtgggtcagaggtaacaacacctgagaatagcagctctcccggaatgatggacatgcatgatgacaactccaaccagtcctctattgccgatgcttctcctataaagcaggagaatagcagtaattccagtcctgccccagagccaaactctgccgttccatccgatggcacagaagcaaaggtggacgaggcccaagcagatggcaaagaacatcccggtgccgaagatgcctctgatgagcagaactctcaatcctctatggaacattcgatgaactcaagcgaaaaagtggatagacagccgtcaggcgattcaggactcgccgctgaaacatccgcgatcagccaggatttagaaggggttcctccgtccaaaaaaatgaagctggaagcttcacagcaaaactctgaggagatgtag

SEQ ID NO: 27984 - DNA, 2581 bp, Artificial Sequence
  derived and/or modified sequence
actgggccaggcgcgcggcggccccgggctttgtgtgtgtgtgtatgtgtgtgtgtgtgtgtgtgtgtgtgtgagtgtgtgcgtgtgagagtgcgagtgtctgtgcgcgagtgagtgagcggcgggcgggcgcgagtgtggccgccgcggagcgcgagcaggacccggcgggcgcgctccccagcctccgtctccccgccggaaccatgtcgggcaggtcggttcgagccgagacgaggagccgggccaaagatgatatcaagagggtcatggcggcgatcgagaaagtgcgcaaatgggagaagaaatgggtgaccgttggtgacacatccctacgaatctacaaatgggtccctgtgacggagcccaaggttgatgacaaaaacaagaataagaaaaaaggcaaggacgagaagtgtggctcagaggtgaccactccggagaacagttcctccccagggatgatggacatgcatgacgataacagcaaccagagctccatcgcagatgcctcccccatcaaacaggagaacagcagcaactccagccccgctccagagcccaactcggctgtgcccagcgacggcaccgaggccaaggtggatgaggcccaggctgatgggaaggagcacccaggagctgaagatgcttctgatgagcagaattcacagtcctcgatggaacattcgatgaacagctcagagaaagtagatcggcagccgtctggagactcgggtctggccgcagagacgtctgcaatctctcaggatttggaaggagtgccaccctctaaaaagatgaaactggaggcctctcaacaaaactccgaagagatgtagacgatgctttaaagcctccgatccatgttccatggaaggtacatcagcaattaattctagagcaactttgccccagcgattcctcttgggtgcgaacagaactactaacgtttcaagtttaccaagtgcaaatccaagaagacccagaacggcgtcacttctcagacactgaagaactctgctgtgaagcaaaacactcaaacctttaagggactgtccttggggaggcaggcggggctgacagctcaggagtgtctgcacactgtctcggaagccaggattccatttgtgttgctgctgtattttccccccacttctctatgtaacgatataagctatcggagggtggtaccgatcaggaacgctttttggcggggctttccactgttcaaccgattccttccgctttctttttttgtgccttgtgcccttgaggtgacctctggcatgtatcctggtggttcttacatccccctctgcaaagtgccctcttggtttggttcgggcggcggctgccaccctactcaccgctctcctccctgccccaggacttcatcggagcaggcagggtggagcgaaggagctccttagcccacctggtttgcaggtgcagggggaccttaggcacgccccaagcaccaggcaccagggcccaaggacgcgcaggtgttggggcacagtccccaagggctcggccccttggatcaggctgggcactcgctgtgctctcccctccttggggcgtttaggactgggcgtctccaagcccaccatggcccagatggacgtgcaaagcccttggaattttctggcacttcctctctattgcccccaccaccaccacccccatcactgctttctcccagacctccgaatacgaaatggcttctctggctgactgcaaggctgtctccttaaggcactgagtgggccggggaggctgggagccggcggcaggattagctggtgctgaactttctctcataggacgtcgcttggatttcaaatccacggtcacctgctgccctttgcctcccccgacgccccagcctgtgccccggagaggcaggatcgcagtggtcagaatccacgtgctttcctattctcaggctgttctgactctgagccaacagctggaccgtgtctcatccccagaacatgccgtctgtccccaccggggagtgggccttgatggccgggcctcgaaggccacaaacaaggcgtcgaggaattggaaagatttgcacaccctccagaaaggagagacgcaatctcccctccctcccatcccccaccttcgctggaacagcttcctctcactgaacggagacgcccccttggacgaactgcctaatcgtttggttctgaggcctggtttgctcttaattaatatatgaactcctcagaccttaaaccttttcctaagctttctttactgcactggagttctgactccctttgagttgtgtgttactgggggtggggtggggtcatgggttttgttgtttttgggggctaattggtgcatattcaggtaccacctttgacgtgtggctctttctcctgaccatcatgggaagtgtctgctggattccattttctaagagtttctgagggtgaggctcttatttttttttttaagggatcctgtctatttcctgcacttcgagaagaatcaaaatgttcctgaatttcaaatacctcatgcaaaatgtctcctgaaataagggaaaaaaaaaaaa

SEQ ID NO: 27985 - DNA, 633 bp, Artificial Sequence
  derived and/or modified sequence
atgagcggcagaagcgtgagagccgagaccagaagcagagccaaggacgacatcaagagagtgatggccgccatcgagaaggtgagaaagtgggagaagaagtgggtgaccgtgggcgacaccagcctgagaatctacaagtgggtgcccgtgaccgagcccaaggtggacgacaagaacaagaacaagaagaagggcaaggacgagaagtgcggcagcgaggtgaccacccccgagaacagcagcagccccggcatgatggacatgcacgacgacaacagcaaccagagcagcatcgccgacgccagccccatcaagcaggagaacagcagcaacagcagccccgcccccgagcccaacagcgccgtgcccagcgacggcaccgaggccaaggtggacgaggcccaggccgacggcaaggagcaccccggcgccgaggacgccagcgacgagcagaacagccagagcagcatggagcacagcatgaacagcagcgagaaggtggacagacagcccagcggcgacagcggcctggccgccgagaccagcgccatcagccaggacctggagggcgtgccccccagcaagaagatgaagctggaggccagccagcagaacagcgaggagatgtag

SEQ ID NO: 27986 - protein, 633 aa, Artificial Sequence
  derived and/or modified sequence
MYESVEVGGPTPNPFLVVDFYNQNRACLLPEKGLPAPGPYSTPLRTPLWNGSNHSIETQSSSSEEIVPSPPSPPPLPRIYKPCFVCQDKSSGYHYGVSACEGCKGFFRRSIQKNMVYTCHRDKNCIINKVTRNRCQYCRLQKCFEVGMSKESVRNDRNKKKKEVPKPECSESYTLTPEVGELIECAKRTRKPSLPSASWANTLRTTAQNNVSLWTLTSGTSSVNSPKCIIKTVEFAKQLPGFTTLTIADQITLLKAACLDILILRICTRYTPEQDTMTFSDGLTLNRTQMHNAGFGPLTDLVFAFANQLLPLEMDDAETGLLSAICLICGDRQDLEQPDRVDMLQEPLLEALKVYVRKRRPSRPHMFPKMLMKITDLRSISAKGAERVITLKMEIPGSMPPLIQEMLENSEGLDTLSGQPGGGGRDGGGLPRQAAVAPASAPAPTEAARPPTPRDRPRHMDTALALRPGFSLPFYRPCDPAPALPPPALPGSTGDLPWGTGREEAATPWTEAWALSGLPAPTAWADVRGRGQELSEAPGPGSQDGSWGPRVHQDTPLPSSPHLHHQQTPGLGSPILRTHKPLLPSWGTSTSPLPRLVTEGVGQGRGVPPVHTLPYQPQVLILAGFVFILIFLF

SEQ ID NO: 27987 - protein, 457 aa, Artificial Sequence
  derived and/or modified sequence
MYESVEVGGPTPNPFLVVDFYNQNRACLLPEKGLPAPGPYSTPLRTPLWNGSNHSIETQSSSSEEIVPSPPSPPPLPRIYKPCFVCQDKSSGYHYGVSACEGCKGFFRRSIQKNMVYTCHRDKNCIINKVTRNRCQYCRLQKCFEVGMSKESVRNDRNKKKKEVPKPECSESYTLTPEVGELIEKVRKAHQETFPALCQLGKYTTNNSSEQRVSLDIDLWDKFSELSTKCIIKTVEFAKQLPGFTTLTIADQITLLKAACLDILILRICTRYTPEQDTMTFSDGLTLNRTQMHNAGFGPLTDLVFAFANQLLPLEMDDAETGLLSAICLICGDRQDLEQPDRVDMLQEPLLEALKVYVRKRRPSRPHMFPKMLMKITDLRSISAKGAERVITLKMEIPGSMPPLIQEMLENSEGLDTLSGQPGGGGRDGGGLAPPPGSCSPSLSPSSNRSSPATHSP

SEQ ID NO: 27988 - DNA, 1902 bp, Artificial Sequence
  derived and/or modified sequence
atgtacgagtcagtggaggtcggcggaccaactcctaacccattcttggtggtcgacttttataaccaaaaccgcgcgtgtctgctcccggagaaggggctgccagcccccggaccctactccacgcccctgaggacccctctttggaatggctctaatcactccatcgagacgcaatcttcaagctccgaggagattgtgcccagccctccttcaccaccacccttgccacgtatatataagccttgtttcgtttgccaagataaatccagtggctatcactacggtgtgagtgcttgcgagggatgcaaaggctttttccggcgcagtatccaaaaaaacatggtgtacacatgtcaccgagacaaaaattgcatcattaataaggtcacgcgcaaccggtgtcagtattgccgcctgcagaagtgtttcgaagtgggaatgtcaaaggagtcagtcaggaatgatcggaataaaaagaaaaaagaggtgcctaaacctgagtgctctgaaagctatacccttaccccagaggtgggtgaactaatcgagtgtgcgaaacgcacccggaagccttcactccctagtgcatcctgggctaataccctgcgaaccacggcgcagaataatgtctcgctgtggacgcttacctctgggacttcaagtgtgaatagccccaagtgtatcatcaaaactgtggagtttgccaagcagctacctggatttaccactctgacaattgcagatcaaattacgctgttgaaggctgcttgcctggatatcttgatcctgcggatctgtacccgatacacacctgaacaggacaccatgacattcagcgacggccttactctcaatcgaacacagatgcataacgctgggttcggccccctaactgatttagttttcgctttcgcaaatcaactgttgcctctcgagatggatgatgccgagaccggcttgctctccgcaatatgtctgatctgcggggaccggcaggacctagagcagccagaccgcgtcgacatgctccaagagcctcttcttgaagctctaaaggtctacgtgcgaaaacgtaggccttcaaggccgcacatgttccccaagatgctgatgaaaataactgatctccgcagtatctctgcgaagggcgccgaaagagtcattacattaaagatggaaattcccggatctatgccccccctgatccaggagatgctggagaatagtgagggcctggataccttaagtggccaacctggcggaggtggccgcgatggaggaggactgcctcgccaggccgccgtcgcacctgcctcggccccagcgcctacagaagctgctaggccacctacgccacgggataggcctagacatatggacaccgctctggcactcagacccgggttttccctgccattttatcggccctgtgatcccgcacccgctctgcctccccctgctctacctggcagcactggagatttgccgtggggaaccggacgcgaggaggcggctactccgtggaccgaagcctgggccttatcaggattgccggcccccactgcttgggccgacgttagaggccgcggacaagagctctcagaagcccccggccccggctcccaggatggctcttgggggccaagagtgcatcaggatacaccactgccttcctccccccacttgcaccaccagcagacaccaggactagggtctcctattttgcggacccacaagccccttctccctagctggggcacctctacttctcctctgccaagacttgtcacagaaggcgtggggcaggggcgtggcgtgcccccagtccatacactgccctaccagccacaggttctgattctggccgggttcgtatttatcctgatctttctgttctag

SEQ ID NO: 27989 - DNA, 1374 bp, Artificial Sequence
  derived and/or modified sequence
atgtacgagagtgttgaggtcggcggccctacgccgaatccattcctggtggtggatttctataaccagaacagggcgtgtctcctgcccgagaagggcctccctgcccctggcccttactccacacctctgcgaacacccctctggaacgggagcaaccactcgatcgagacgcagagttcaagcagtgaggaaatcgtaccttctccaccgtcccccccacctctcccccggatatacaaaccctgtttcgtgtgccaagataagtcttctggttaccactatggggtctccgcatgtgaaggatgcaaggggtttttccgaagatcaatccaaaagaacatggtgtatacctgccatcgggacaagaattgtatcataaacaaagtgacacggaatagatgccaatactgcagactccagaaatgcttcgaagtgggcatgtccaaggagtctgttaggaacgacaggaacaaaaaaaagaaagaggtgcccaagcctgagtgcagcgagagctacacgctgacacctgaagtgggggagcttatcgagaaagtgcgcaaagctcatcaggaaactttccccgccctgtgtcagctgggcaagtacacaaccaacaattctagcgagcagcgggtcagcttagatatcgacctatgggacaagttctctgagctgagcacaaagtgcattattaaaaccgtggaatttgctaaacagctgccagggtttacgacccttactatcgccgatcagatcaccctcctgaaagccgcttgcctagacattttaatcttgaggatttgcacacgttatacaccagagcaggataccatgacattttctgacggcttgacattgaatcggactcagatgcacaatgccggcttcgggccactgactgacctcgtattcgcctttgcgaatcagctgctgccccttgagatggacgatgctgagacaggcctgttaagcgcaatttgtctgatctgcggcgatcgtcaggatctggagcagccagaccgcgttgacatgttgcaagagccgttgctggaggcactgaaggtctacgtgcggaaaagaagaccatctcgcccgcatatgtttcctaagatgcttatgaagattactgacctgaggagcatcagcgctaaaggagcagagagagtcatcaccctaaagatggaaatacccggaagcatgcctccactgatacaggagatgctggaaaacagcgaaggtttagatactctctctgggcaaccagggggcggcgggcgggatgggggcggcctggcccctccacctggatcttgctctccttcactgtccccgtcgtccaatcgatctagtcctgccacacactctccctag

SEQ ID NO: 27990 - DNA, 1902 bp, Artificial Sequence
  derived and/or modified sequence
atgtatgagagcgtggaggtgggcggccccacccccaaccccttcctggtggtggacttctacaaccagaacagagcctgcctgctgcctgagaagggcctgcctgcccctggcccctacagcacccccctgcggacccccctgtggaatggcagcaaccacagcattgagacccagagcagcagcagcgaggagatcgtgcccagcccccccagccccccacccctgccccgcatctacaagccctgctttgtgtgccaggacaagagcagcggctaccactatggagtgtctgcctgtgagggctgcaagggcttcttccgccgcagcatccagaagaacatggtgtacacctgccaccgggacaagaactgcatcatcaacaaggtgaccaggaaccgctgccagtactgccgcctgcagaagtgctttgaggtgggcatgagcaaggagagcgtgagaaatgacaggaacaagaagaagaaggaggtgcccaagccagagtgcagcgagagctacaccctgaccccagaggtgggggagctgattgaatgtgccaagaggaccaggaagcccagcctgcccagcgcctcctgggccaacaccctgcggaccacagcccagaacaacgtgtccctgtggaccctgaccagcggcaccagctctgtgaacagccccaagtgcatcatcaagacagtggagtttgccaagcagctgcccggcttcaccaccctgaccatcgctgaccagatcaccctgctgaaggccgcctgcctggacatcctgatcctgcgcatctgcacccgctacaccccagagcaggacaccatgaccttcagtgatggcctgaccctgaacagaacccagatgcacaatgccggcttcggccccctgacagacctggtgtttgcctttgccaaccagctgctgcccctggagatggatgatgctgagaccggcctgctgagcgccatctgcctgatctgtggggaccggcaggacctggagcagcctgacagagtggacatgctgcaggagcccctgctggaggccctgaaggtgtatgtgaggaagagaagacccagccggccccacatgttccccaagatgctgatgaagatcacagacctgcggagcatcagcgccaagggagctgagagggtcatcaccctgaagatggagatccctggctccatgccacccctcatccaggagatgctggagaacagcgagggcctggacaccctgagcggccagcccggcggcggcggcagagatggcggcggcctgccccggcaggccgctgtggccccagccagcgccccagcccccacagaagctgcccggccccccaccccccgggaccggcccaggcacatggacacagccctggccctgcggcccggcttcagcctgcccttctaccggccctgtgaccctgccccagccctgcccccaccagccctgcccggcagcactggagacctgccctggggcaccggccgggaggaggccgccaccccctggacagaggcctgggccctgagcggcctgcctgcccccacagcctgggcagatgtgcggggccggggccaggagctgtctgaggcccctggccctggcagccaggacggctcctggggcccccgggtgcaccaggacacccccctgcccagcagcccccacctgcaccaccagcagaccccaggcctgggcagccccatcctgcggacccacaagcccctgctgcccagctggggcaccagcaccagccccctgccccggctggtgacagagggcgtgggccagggccggggcgtgccccctgtgcacaccctgccctaccagccccaggtgctgatcctggccggctttgtgttcatcctgatcttcctgttctag

SEQ ID NO: 27991 - DNA, 1374 bp, Artificial Sequence
  derived and/or modified sequence
atgtatgagagcgtggaggtgggcggccccacccccaaccccttcctggtggtggacttctacaaccagaacagagcctgcctgctgcctgagaagggcctgcctgcccctggcccctacagcacccccctgcggacccccctgtggaatggcagcaaccacagcattgagacccagagcagcagcagcgaggagatcgtgcccagcccccccagccccccacccctgccccgcatctacaagccctgctttgtgtgccaggacaagagcagcggctaccactatggagtgtctgcctgtgagggctgcaagggcttcttccgccgcagcatccagaagaacatggtgtacacctgccaccgggacaagaactgcatcatcaacaaggtgaccaggaaccgctgccagtactgccgcctgcagaagtgctttgaggtgggcatgagcaaggagagcgtgagaaatgacaggaacaagaagaagaaggaggtgcccaagccagagtgcagcgagagctacaccctgaccccagaggtgggggagctgattgagaaggtgaggaaggcccaccaggagaccttccctgccctgtgccagctgggcaagtacaccaccaacaacagcagcgagcagagggtgtccctggacatcgacctgtgggacaagttcagcgagctgagcaccaagtgcatcatcaagacagtggagtttgccaagcagctgcccggcttcaccaccctgaccatcgctgaccagatcaccctgctgaaggccgcctgcctggacatcctgatcctgcgcatctgcacccgctacaccccagagcaggacaccatgaccttcagtgatggcctgaccctgaacagaacccagatgcacaatgccggcttcggccccctgacagacctggtgtttgcctttgccaaccagctgctgcccctggagatggatgatgctgagaccggcctgctgagcgccatctgcctgatctgtggggaccggcaggacctggagcagcctgacagagtggacatgctgcaggagcccctgctggaggccctgaaggtgtatgtgaggaagagaagacccagccggccccacatgttccccaagatgctgatgaagatcacagacctgcggagcatcagcgccaagggagctgagagggtcatcaccctgaagatggagatccctggctccatgccacccctcatccaggagatgctggagaacagcgagggcctggacaccctgagcggccagcccggcggcggcggcagagatggcggcggcctggcccctcctcctggcagctgcagccccagcctgagccccagcagcaacagaagcagccctgccacccacagcccctag

SEQ ID NO: 27992 - DNA, 1902 bp, Artificial Sequence
  derived and/or modified sequence
atgtacgagagcgtggaggtgggcggccccacccccaaccccttcttggtggttgacttctataaccagaaccgtgcctgtctgttgccggagaagggactgcctgccccaggcccgtactccactccactccggactcctctttggaatggtagcaaccacagtatagagacgcaaagcagcagcagcgaggaaattgtgccttcgccaccgagtccaccacccttgccaagaatttacaagccttgttttgtatgccaagacaagtcctccggatatcattacggtgtctccgcgtgcgaggggtgcaagggatttttccggagatctatccagaaaaacatggtgtacacatgccaccgtgataaaaattgtataatcaataaggtgacaagaaatcgctgtcagtactgcaggctgcagaagtgctttgaagtgggaatgtccaaggagagtgtgagaaatgatcgtaataagaagaagaaggaagtgccgaagcctgaatgctccgagtcatatacactcactcccgaggtgggcgagttaatcgaatgcgcaaagaggaccaggaagccttctcttccctctgccagttgggctaacacactcagaactacggctcagaataatgtatccttatggactctgacaagtggcaccagttccgtgaatagtcctaaatgcatcatcaagactgtggagtttgctaaacagctccccggttttactactctaacaattgcggatcagataaccctgcttaaagccgcatgcctagacatcctgatcttgcggatttgtactcgatacactccggagcaagacaccatgacattttcagatggacttactctgaataggacccagatgcacaacgctggatttggtccattgacggacctagtctttgctttcgccaaccagctcctgcctctggagatggatgacgcggaaacagggctcctatctgccatctgtcttatctgcggcgaccgtcaagacctggagcagcctgatagggtggatatgctgcaggaacctctgttagaagcattgaaagtgtatgtgcgcaaaagaagaccttctagacctcacatgttccccaaaatgctgatgaagatcacagacttgagatccatttcagccaaaggcgccgagagggtgatcacactgaagatggaaattcccgggagcatgccacctctaatacaggagatgttagaaaattcggagggactcgacaccttgtctgggcagcctggtggcggaggccgtgatggaggtgggctgccccgccaggctgcagtagccccagcatccgctccagcccctacagaggcagcgcgccctccaactcctcgagacaggcctcgtcatatggacaccgccctggccctcaggcctggcttttcactgcccttttataggccttgtgaccccgcacctgccctcccaccacctgctctgcccgggagcacgggtgacctgccctggggcaccggtcgagaggaggcagccactccatggacggaagcctgggcactgtcaggactgccggccccgaccgcttgggcggatgtacgaggaaggggacaggagctcagcgaagcgcccggtccaggttcacaggacggcagctgggggccaagggtgcaccaggacacaccgctgccaagtagcccacacctgcaccaccagcaaacccccggcctggggagtccaattttgcggacacacaaaccgctcctgccatcctggggaactagtacttcccctttgccccgcctcgtgaccgaaggggtcggccagggcagaggcgtccctccggtgcataccttgccttatcagccccaagtgctgatcttagccggttttgtttttatcctgatcttcctgttctag

SEQ ID NO: 27993 - DNA, 1374 bp, Artificial Sequence
  derived and/or modified sequence
atgtacgagagcgtggaggtgggcggccccacccccaaccccttcctagtcgtcgacttctataatcaaaaccgagcctgcttgctccccgaaaaagggcttcccgcccccggaccttattcaactccgcttcgcacacccctttggaatggatcaaatcattcaattgagacccagagtagttcctccgaagagatcgtgccatcccccccctctccaccacccctgccaaggatctataagccctgcttcgtgtgccaggataagtcctcgggctatcactacggcgtatccgcttgtgagggatgcaaagggttttttagacgttcaatccagaagaacatggtctacacatgccacagagacaagaactgcatcatcaacaaggtaacgaggaaccgctgtcagtactgcagattgcaaaaatgcttcgaggtgggtatgtccaaagaatccgtgagaaacgacaggaataaaaagaaaaaagaggtaccaaagcccgagtgttctgaaagttacactctcacgcccgaagttggagagcttattgagaaggttcgcaaggctcaccaggaaacatttcctgccctatgtcagctgggcaaatatactaccaacaattcatcggagcagcgcgtctcactggacatcgatctgtgggacaaattcagcgagttgtcgacaaagtgtattattaaaactgtggaatttgccaaacagctaccagggttcaccacacttaccattgcagatcaaataacactgctcaaagccgcgtgcttggatatcctgatactgagaatctgcaccaggtacacaccagaacaggacacaatgacattttcagatggcctgacccttaatcgcacacaaatgcacaacgctggattcgggccactaaccgatctggtgttcgctttcgccaaccaactgctgcccttagagatggatgatgccgagacggggctcctcagcgctatctgcctgatctgtggtgatcggcaagatctggagcagcctgaccgtgttgatatgctccaggagcctcttctggaggccctaaaggtctacgttcgcaagaggcgcccttcccggccccatatgtttcctaagatgctcatgaaaattacagatcttaggagcatcagcgcaaaaggggcggagagggttatcaccctgaagatggagattcccggtagcatgcccccgctcatccaggagatgctggagaattccgaggggctcgacaccctctccggtcagccaggcggcggcgggagagacgggggtggcctggcccctccacccggcagctgtagcccttctctttctccatcatctaatagatcttcccccgccactcattccccgtag

SEQ ID NO: 27994 - DNA, 1902 bp, Artificial Sequence
  derived and/or modified sequence
atgtacgagtcggtggaggtgggagggcctacacccaacccattcctcgtggtggacttttataatcagaaccgcgcttgcctcctccccgagaagggactgccggctcctgggccttactccacgcccctgaggacccctctttggaacggaagtaatcactctatcgagacccagtcctcctcttccgaagagatcgtgccttcacctcctagtccacctcccctgcccaggatttataagccctgttttgtctgccaagacaaatcaagcgggtatcactacggagtaagcgcttgcgagggttgtaagggattttttaggcgatcgatccaaaaaaacatggtgtacacctgccacagggacaaaaattgtataataaacaaagtaactcggaacaggtgtcaatactgtcgcttgcaaaaatgcttcgaggtgggcatgagtaaggaatcagtgcgtaatgaccggaacaagaaaaaaaaggaggtgccaaagccagagtgcagcgagtcttataccctgacgccggaggtgggagaattgatagaatgcgccaaaagaaccagaaaaccatctctgccttcagcatcttgggcaaataccctgcgaaccacagctcagaacaacgttagcctgtggaccctgacaagtggcacctcatcggtgaatagccctaagtgtatcattaagacagtcgagttcgccaagcaactgcccggattcacaactctcaccatagccgatcagattaccctgttgaaagcagcatgtctagatatcctgatcctgaggatatgcacacgctatactccagagcaggataccatgacattctccgatggtcttactctcaatagaactcagatgcacaatgccggatttggccctcttacggatctggttttcgcattcgcgaatcagcttctgcccctggagatggacgatgccgaaacgggcctcctcagcgccatatgcctgatctgtggggaccgacaggacttggaacagccggatcgagtcgacatgcttcaggagcctctgcttgaagccctaaaagtctatgtgcggaagcggaggccctcaagaccacacatgttccccaagatgctaatgaaaatcactgatctgagaagcatttcggccaaaggagccgaacgcgtgataactctaaaaatggaaatccccggttcaatgcccccattgattcaggagatgctcgagaattctgaaggactggatactctgtctggccagcccggtggaggaggacgagacggagggggacttccgaggcaggctgcggtggcaccagccagcgcacctgccccaaccgaggcggcaaggcctcctaccccccgtgacagacccaggcacatggatacagcgctagcgctcagacccggtttcagcctgcctttctatagaccctgcgaccctgcaccagctctacccccacctgcgttgccgggaagtaccggagacttaccttggggtactggccgagaagaagcggcaacaccttggacggaggcctgggccctgtctggccttccagctccaacagcgtgggccgacgtgcgcggtcggggacaagaactgtccgaagctcccggtccgggaagccaggatggatcctggggaccgagggtgcatcaagacacacctctgcccagctcaccacacctgcaccaccagcaaactcctggcttggggtcaccgatcttgagaacacataaacctttgcttccatcatggggcaccagcaccagtcccctgccccgacttgtgacggagggggtgggccaggggagaggggtaccacctgttcataccctcccttaccagcctcaggtacttatcctcgcaggcttcgtgttcatcttaatcttcctcttctag

SEQ ID NO: 27995 - DNA, 1374 bp, Artificial Sequence
  derived and/or modified sequence
atgtatgagtcagttgaggtgggcggacccacaccgaacccatttctggtggtggatttttataaccagaacagagcttgcttgctgccggagaaggggctccccgctccaggtccttattctacaccactgagaacacccctttggaacggatccaaccactccatcgagacacagtcctccagcagcgaagagatcgtgccgtcaccgccaagtccacccccattacctcgcatctacaagccctgtttcgtatgtcaagataaaagctctggctaccattacggagtttctgcatgcgaaggctgtaaagggtttttccgcaggtccatccagaaaaacatggtgtacacatgccaccgggacaaaaactgcattataaataaggtgaccaggaaccggtgccagtactgccgtctgcaaaaatgtttcgaggtgggaatgtctaaggagagcgttcgcaatgataggaataaaaagaagaaagaggtacctaaacccgaatgtagcgagtcctatacactcactccggaagtgggcgagctcatcgagaaggtgcgaaaggcgcaccaagagacgtttcctgctctgtgtcaattaggaaaatacactacaaacaatagctctgaacaacgcgtgtctctagatattgacctttgggacaaatttagtgaactgtcaaccaagtgcattatcaaaaccgtggagttcgcaaagcaactgccaggcttcaccacattaaccattgccgatcagattacactccttaaagccgcttgcttagatatacttattctgaggatctgcacacgttatacccctgagcaagatacaatgaccttcagcgacgggctgactctcaacaggacccagatgcacaatgcaggctttgggcctctgacggacctagtgtttgccttcgctaatcagttgctcccattggagatggacgacgcagagaccggacttctgtccgcaatttgcctgatctgcggcgaccgacaggacttagaacagccagaccgggtcgacatgctgcaagagccattactagaggcgctcaaggtttatgtgaggaaacgcagaccgtcccgacctcacatgttccctaaaatgctgatgaaaatcaccgatctgcggtccatatcggcaaaaggagccgaaagagtcatcactcttaagatggagattcccggttctatgccacccctgatacaggaaatgttagagaattccgagggtctcgatacactcagtggtcagccaggcggtgggggacgtgatgggggaggcctcgctccaccccctgggagttgctcaccatccctgtctccttcgagcaaccgtagtagtcctgccactcatagcccttag

SEQ ID NO: 27996 - DNA, 2780 bp, Artificial Sequence
  derived and/or modified sequence
atgtacgagagtgtagaagtggggggtcccacccctaatcccttcctagtggtggatttttataaccagaaccgggcctgtttgctcccagagaaggggctccccgccccgggtccgtactccaccccgctccggactccgctttggaatggctcaaaccactccattgagacccagagcagcagttctgaagagatagtgcccagccctccctcgccaccccctctaccccgcatctacaagccttgctttgtctgtcaggacaagtcctcaggctaccactatggggtcagcgcctgtgagggctgcaagggcttcttccgccgcagcatccagaagaacatggtgtacacgtgtcaccgggacaagaactgcatcatcaacaaggtgacccggaaccgctgccagtactgccgactgcagaagtgctttgaagtgggcatgtccaaggagtctgtgagaaacgaccgaaacaagaagaagaaggaggtgcccaagcccgagtgctctgagagctacacgctgacgccggaggtgggggagctcattgagtgcgcaaagcgcaccaggaaaccttccctgccctctgccagctgggcaaatacactacgaacaacagctcagaacaacgtgtctctctggacattgacctctgggacaagttcagtgaactctccaaagtgcatcattaagactgtggagttcgccaagcagctgcccggcttcaccaccctcaccatcgccgaccagatcaccctcctcaaggctgcctgcctggacatcctgatcctgcggatctgcacgcggtacacgcccgagcaggacaccatgaccttctcggacgggctgaccctgaaccggacccagatgcacaacgctggcttcggccccctcaccgacctggtctttgccttcgccaaccagctgctgcccctggagatggatgatgcggagacggggctgctcagcgccatctgcctcatctgcggagaccgccaggacctggagcagccggaccgggtggacatgctgcaggagccgctgctggaggcgctaaaggtctacgtgcggaagcggaggcccagccgcccccacatgttccccaagatgctaatgaagattactgacctgcgaagcatcagcgccaagggggctgagcgggtgatcacgctgaagatggagatcccgggctccatgccgcctctcatccaggaaatgttggagaactcagagggcctggacactctgagcggacagccggggggtggggggcgggacgggggtggcctgccccgccaggcagctgtagccccagcctcagccccagctccaacagaagcagcccggccacccactccccgtgaccgcccacgccacatggacacagccctcgccctccgccccggcttttctctgcctttctaccgaccatgtgaccccgcaccagccctgcccccacctgccctcccgggcagtactggggaccttccctgggggacggggagggaggaggcagcgactccttggacagaggcctgggccctcagtggactgcctgctcccacagcctgggctgacgtcagaggccgaggccaggaactgagtgaggcccctggtcctgggtctcaggatgggtcctgggggcctcgtgttcatcaagacacccctctgcccagctcaccacatcttcatcaccagcaaacgccaggacttggctcccccatcctcagaactcacaagccattgctccccagctggggaacctcaacctcccccctgcctcggttggtgacagagggggtgggacaggggcggggggttccccctgtacataccctgccataccaaccccaggtattaattctcgctggttttgtttttattttaatttttttgttttgatttttttaataagaattttcattttaagcacatttatactgaaggaatttgtgctgtgtattggggggagctggatccagagctggagggggtgggtccgggggagggagtggctcggaaggggcccccactctcctttcatgtccctgtgccccccagttctcctcctcagccttttcctcctcagttttctctttaaaactgtgaagtactaactttccaaggcctgccttcccctccctcccactggagaagccgccagcccctttctccctctgcctgaccactgggtgtggacggtgtggggcagccctgaaaggacaggctcctggccttggcacttgcctgcacccaccatgaggcatggagcagggcagagcaagggccccgggacagagttttcccagacctggctcctcggcagagctgcctcccgtcagggcccacatcatctaggctccccagcccccactgtgaaggggctggccaggggcccgagctgcccccacccccggcctcagccaccagcacccccatagggcccccagacaccacacacatgcgcgtgcgcacacacacaaacacacacacactggacagtagatgggccgacacacacttggcccgagttcctccatttccctggcctgccccccacccccaacctgtcccacccccgtgccccctccttaccccgcaggacgggcctacaggggggtctcccctcacccctgcacccccagctgggggagctggctctgccccgacctccttcaccaggggttggggccccttcccctggagcccgtgggtgcacctgttactgttgggctttccactgagatctactggataaagaataaagttctatttattct

SEQ ID NO: 27997 - DNA, 2285 bp, Artificial Sequence
  derived and/or modified sequence
agccgctgtactctgcctcggacgccacgagactctagacgggagtcccctcgaggtgaagccgctgagttcccgggccccgccaggcttccctgggagagccgacggaccccccctcccagcacacacaacttccctgcttttcaccgggactggcggagcggccggcggacttagacgcggggacttcagggcagggggcgccccctgcccgggtcaccagtcggggcgaggggacgtctcctctcccccagctgctctgctcggatggcgccgccggctgagtgacgggggcggcgcgcaggacttcccagctcggacctcttgccttcgaggggaaagatgtacgagagtgtagaagtggggggtcccacccctaatcccttcctagtggtggatttttataaccagaaccgggcctgtttgctcccagagaaggggctccccgccccgggtccgtactccaccccgctccggactccgctttggaatggctcaaaccactccattgagacccagagcagcagttctgaagagatagtgcccagccctccctcgccaccccctctaccccgcatctacaagccttgctttgtctgtcaggacaagtcctcaggctaccactatggggtcagcgcctgtgagggctgcaagggcttcttccgccgcagcatccagaagaacatggtgtacacgtgtcaccgggacaagaactgcatcatcaacaaggtgacccggaaccgctgccagtactgccgactgcagaagtgctttgaagtgggcatgtccaaggagtctgtgagaaacgaccgaaacaagaagaagaaggaggtgcccaagcccgagtgctctgagagctacacgctgacgccggaggtgggggagctcattgagaaggtgcgcaaagcgcaccaggaaaccttccctgccctctgccagctgggcaaatacactacgaacaacagctcagaacaacgtgtctctctggacattgacctctgggacaagttcagtgaactctccaccaagtgcatcattaagactgtggagttcgccaagcagctgcccggcttcaccaccctcaccatcgccgaccagatcaccctcctcaaggctgcctgcctggacatcctgatcctgcggatctgcacgcggtacacgcccgagcaggacaccatgaccttctcggacgggctgaccctgaaccggacccagatgcacaacgctggcttcggccccctcaccgacctggtctttgccttcgccaaccagctgctgcccctggagatggatgatgcggagacggggctgctcagcgccatctgcctcatctgcggagaccgccaggacctggagcagccggaccgggtggacatgctgcaggagccgctgctggaggcgctaaaggtctacgtgcggaagcggaggcccagccgcccccacatgttccccaagatgctaatgaagattactgacctgcgaagcatcagcgccaagggggctgagcgggtgatcacgctgaagatggagatcccgggctccatgccgcctctcatccaggaaatgttggagaactcagagggcctggacactctgagcggacagccggggggtggggggcgggacgggggtggcctggcccccccgccaggcagctgtagccccagcctcagccccagctccaacagaagcagcccggccacccactccccgtgaccgcccacgccacatggacacagccctcgccctccgccccggcttttctctgcctttctaccgaccatgtgaccccgcaccagccctgcccccacctgccctcccgggcagtactggggaccttccctgggggacggggagggaggaggcagcgactccttggacagaggcctgggccctcagtggactgcctgctcccacagcctgggctgacgtcagaggccgaggccaggaactgagtgaggcccctggtcctgggtctcaggatgggtcctgggggcctcgtgttcatcaagacacccctctgcccagctcaccacatcttcatcaccagcaaacgccaggacttggctcccccatcctcagaactcacaagccattgctccccagctggggaacctcaacctcccccctgcctcggttggtgacagagggggtgggacaggggcggggggttccccctgtacataccctgccataccaaccccaggtattaattctcgctggttttgtttttattttaatttttttgttttgatttttttaataagaattttcattttaagcac

SEQ ID NO: 27998 - DNA, 1902 bp, Artificial Sequence
  derived and/or modified sequence
atgtacgagagcgtggaggtgggcggccccacccccaaccccttcctggtggtggacttctacaaccagaacagagcctgcctgctgcccgagaagggcctgcccgcccccggcccctacagcacccccctgagaacccccctgtggaacggcagcaaccacagcatcgagacccagagcagcagcagcgaggagatcgtgcccagcccccccagccccccccccctgcccagaatctacaagccctgcttcgtgtgccaggacaagagcagcggctaccactacggcgtgagcgcctgcgagggctgcaagggcttcttcagaagaagcatccagaagaacatggtgtacacctgccacagagacaagaactgcatcatcaacaaggtgaccagaaacagatgccagtactgcagactgcagaagtgcttcgaggtgggcatgagcaaggagagcgtgagaaacgacagaaacaagaagaagaaggaggtgcccaagcccgagtgcagcgagagctacaccctgacccccgaggtgggcgagctgatcgagtgcgccaagagaaccagaaagcccagcctgcccagcgccagctgggccaacaccctgagaaccaccgcccagaacaacgtgagcctgtggaccctgaccagcggcaccagcagcgtgaacagccccaagtgcatcatcaagaccgtggagttcgccaagcagctgcccggcttcaccaccctgaccatcgccgaccagatcaccctgctgaaggccgcctgcctggacatcctgatcctgagaatctgcaccagatacacccccgagcaggacaccatgaccttcagcgacggcctgaccctgaacagaacccagatgcacaacgccggcttcggccccctgaccgacctggtgttcgccttcgccaaccagctgctgcccctggagatggacgacgccgagaccggcctgctgagcgccatctgcctgatctgcggcgacagacaggacctggagcagcccgacagagtggacatgctgcaggagcccctgctggaggccctgaaggtgtacgtgagaaagagaagacccagcagaccccacatgttccccaagatgctgatgaagatcaccgacctgagaagcatcagcgccaagggcgccgagagagtgatcaccctgaagatggagatccccggcagcatgccccccctgatccaggagatgctggagaacagcgagggcctggacaccctgagcggccagcccggcggcggcggcagagacggcggcggcctgcccagacaggccgccgtggcccccgccagcgcccccgcccccaccgaggccgccagaccccccacccccagagacagacccagacacatggacaccgccctggccctgagacccggcttcagcctgcccttctacagaccctgcgaccccgcccccgccctgcccccccccgccctgcccggcagcaccggcgacctgccctggggcaccggcagagaggaggccgccaccccctggaccgaggcctgggccctgagcggcctgcccgcccccaccgcctgggccgacgtgagaggcagaggccaggagctgagcgaggcccccggccccggcagccaggacggcagctggggccccagagtgcaccaggacacccccctgcccagcagcccccacctgcaccaccagcagacccccggcctgggcagccccatcctgagaacccacaagcccctgctgcccagctggggcaccagcaccagccccctgcccagactggtgaccgagggcgtgggccagggcagaggcgtgccccccgtgcacaccctgccctaccagccccaggtgctgatcctggccggcttcgtgttcatcctgatcttcctgttctag

SEQ ID NO: 27999 - DNA, 1374 bp, Artificial Sequence
  derived and/or modified sequence
atgtacgagagcgtggaggtgggcggccccacccccaaccccttcctggtggtggacttctacaaccagaacagagcctgcctgctgcccgagaagggcctgcccgcccccggcccctacagcacccccctgagaacccccctgtggaacggcagcaaccacagcatcgagacccagagcagcagcagcgaggagatcgtgcccagcccccccagccccccccccctgcccagaatctacaagccctgcttcgtgtgccaggacaagagcagcggctaccactacggcgtgagcgcctgcgagggctgcaagggcttcttcagaagaagcatccagaagaacatggtgtacacctgccacagagacaagaactgcatcatcaacaaggtgaccagaaacagatgccagtactgcagactgcagaagtgcttcgaggtgggcatgagcaaggagagcgtgagaaacgacagaaacaagaagaagaaggaggtgcccaagcccgagtgcagcgagagctacaccctgacccccgaggtgggcgagctgatcgagaaggtgagaaaggcccaccaggagaccttccccgccctgtgccagctgggcaagtacaccaccaacaacagcagcgagcagagagtgagcctggacatcgacctgtgggacaagttcagcgagctgagcaccaagtgcatcatcaagaccgtggagttcgccaagcagctgcccggcttcaccaccctgaccatcgccgaccagatcaccctgctgaaggccgcctgcctggacatcctgatcctgagaatctgcaccagatacacccccgagcaggacaccatgaccttcagcgacggcctgaccctgaacagaacccagatgcacaacgccggcttcggccccctgaccgacctggtgttcgccttcgccaaccagctgctgcccctggagatggacgacgccgagaccggcctgctgagcgccatctgcctgatctgcggcgacagacaggacctggagcagcccgacagagtggacatgctgcaggagcccctgctggaggccctgaaggtgtacgtgagaaagagaagacccagcagaccccacatgttccccaagatgctgatgaagatcaccgacctgagaagcatcagcgccaagggcgccgagagagtgatcaccctgaagatggagatccccggcagcatgccccccctgatccaggagatgctggagaacagcgagggcctggacaccctgagcggccagcccggcggcggcggcagagacggcggcggcctggcccccccccccggcagctgcagccccagcctgagccccagcagcaacagaagcagccccgccacccacagcccctag

SEQ ID NO: 28000 - protein, 147 aa, Artificial Sequence
  derived and/or modified sequence
MIIMVIIFLVLLFWENEVNDEAVMSTLEHLHVDYPQNDVPVPARYCNHMIIQRVIREPDHTCKKEHVFIHERPRKINGICISPKKVACQNLSAIFCFQSETKFKMTVCQLIEGTRYPACRYHYSPTEGFVLVTCDDLRPDSFLGYVK

SEQ ID NO: 28001 - DNA, 444 bp, Artificial Sequence
  derived and/or modified sequence
atgatcatcatggtgatcatcttcctggtgctgctgttctgggagaatgaggtgaacgacgaagctgtcatgagcaccctggagcacctgcacgttgattatccgcaaaatgatgtgccggtgcccgcgcgctattgcaaccacatgatcattcagcgggttatccgagaacctgatcacacctgcaagaaggagcacgtgtttatacacgagagacctcgaaagatcaacggcatatgtataagtcccaagaaagtagcatgccaaaatctgagcgccattttttgttttcagagcgagactaagtttaagatgaccgtatgccaacttatcgaaggaaccaggtacccagcctgtcggtaccactattcaccgaccgagggatttgtgcttgtaacctgtgacgacctgaggcctgattcctttctggggtatgtgaaatag

SEQ ID NO: 28002 - DNA, 444 bp, Artificial Sequence
  derived and/or modified sequence
atgatcattatggtgattatctttttggtgcttctcttctgggagaacgaagtgaacgacgaggctgttatgagtaccctggagcaccttcacgtcgactaccctcagaacgacgtccctgtccccgctagatactgtaaccacatgataatccaacgggtcattcgggaaccagaccatacgtgtaagaaagaacatgtcttcatacacgaacggccaagaaagattaacggtatctgcatctctccaaaaaaggtggcatgtcagaatctaagcgccattttttgctttcagtccgaaacaaagtttaagatgactgtttgtcagctgatagaaggaactaggtatcctgcatgtcgataccattatagcccaacagaaggatttgtgctggtgacttgcgatgatctgaggcctgattcattcctcggttatgtcaagtag

SEQ ID NO: 28003 - DNA, 444 bp, Artificial Sequence
  derived and/or modified sequence
atgataatcatggtgatcattttcttggtgctcctcttctgggagaacgaggtgaacgatgaggctgtgatgtcgaccttggagcatctgcatgttgattacccacagaacgacgttccagtaccagcacgatactgtaatcacatgatcatccagagagtgattagagaacctgaccatacctgcaaaaaagagcacgtctttattcacgagcggcctcgcaagattaacgggatctgtatttctcctaagaaggtggcctgtcagaatctctccgctattttttgtttccagtctgagaccaagttcaagatgactgtgtgccaattgattgaagggacccggtatccagcatgtaggtatcactactcccccactgagggcttcgtattagtgacatgtgatgatttgcgccctgattcctttcttggatatgtgaagtag

SEQ ID NO: 28004 - DNA, 444 bp, Artificial Sequence
  derived and/or modified sequence
atgatcattatggtaattatctttctcgtgttacttttttgggaaaacgaagtgaacgatgaagccgtgatgagcacattggaacatttgcacgtggattacccgcaaaacgatgtgccagtccccgctagatactgcaaccacatgataattcaacgcgtgattcgagagcccgaccatacctgcaagaaagaacacgtctttatccatgagcgtccaaggaaaatcaatggcatttgtatctcaccgaagaaagtagcatgccagaacctgtctgcaattttttgtttccagagcgagactaaatttaagatgacagtgtgtcagctgatagaaggcacaaggtatcctgcctgtcgctatcactacagtcctacggagggctttgtcctggtcacctgtgacgacctgcggccggactcattcctgggctacgttaaatag

SEQ ID NO: 28005 - DNA, 444 bp, Artificial Sequence
  derived and/or modified sequence
atgattatcatggttatcatcttcctggtcctgctcttctgggagaatgaagtaaacgatgaagccgtgatgtccacactcgagcacctgcatgtggactatccccaaaatgatgtgcccgtgccagcacggtactgcaaccacatgatcatccagagagtgattagagagccagaccatacttgtaaaaaggaacacgtttttatacacgaacgcccaagaaagattaacggcatctgtatatcccccaagaaagtcgcttgtcagaatctctccgccatcttttgtttccagtccgaaaccaagtttaagatgactgtctgccagctaattgaaggtactagatatccagcctgtcgatatcactacagccccacagagggatttgtcctcgttacatgtgacgacttacgacccgacagctttttgggttatgtgaaatag

SEQ ID NO: 28006 - DNA, 444 bp, Artificial Sequence
  derived and/or modified sequence
atgatcatcatggttataatattcctagtcttgttattttgggaaaatgaagtaaatgacgaagccgtgatgtccactttggagcacttgcacgtagactatccacagaacgacgtccccgtgcccgcacgatactgcaatcacatgatcatccaaagagtgattcgagaacccgaccacacatgcaaaaaggaacacgtgttcattcatgaaagaccgcgcaaaattaacgggatttgcatctctcccaaaaaagtcgcctgtcagaatctctccgccatcttctgtttccaatcggagaccaagtttaaaatgaccgtttgccagctcattgagggaactcgctacccagcctgcaggtaccactactctcccaccgaaggattcgttctggtgacttgtgacgacttacgacccgacagctttttgggatatgtgaagtag

SEQ ID NO: 28007 - DNA, 444 bp, Artificial Sequence
  derived and/or modified sequence
atgatcatcatggtgatcatttttctggtgcttttattttgggagaatgaagttaatgatgaagctgtgatgagtactcttgagcatcttcatgtcgattatccacagaatgacgtgcccgtccctgcccggtattgcaaccacatgataatccagagagtgattcgcgagccagatcacacttgtaagaaggaacacgtatttattcacgagaggcccagaaaaattaacggtatttgtatatctccaaagaaagtcgcttgccagaatctctccgccatcttttgttttcagtccgaaaccaaatttaagatgaccgtctgtcagttgatcgaaggaactcgctaccctgcgtgcagataccattattccccaaccgaaggctttgtcctcgtgacatgtgacgacctgcgcccagactcctttttgggttacgtgaagtag

SEQ ID NO: 28008 - DNA, 631 bp, Artificial Sequence
  derived and/or modified sequence
ggggttggagcaggaggaatctgactgtcctttgctactttctatcttcccttactcaacagcagtcaaagccaaagatgcgaagtcactcttacctctgatgataataatggtgataattttcttggtgcttctgttctgggaaaatgaggtgaatgatgaagcagtgatgtcaactttagaacacttgcatgtggactaccctcagaatgacgttcccgttcctgcaaggtactgcaaccacatgatcatacaaagagttatcagggaacctgaccacacttgtaaaaaggagcatgtcttcatccatgagaggcctcgaaaaatcaatggtatttgcatttctcccaagaaggttgcttgccaaaacctttcggccattttctgctttcagagtgagacaaagttcaaaatgacagtctgtcagctcattgaaggcacaagataccctgcctgcaggtaccactattcccccacagaggggtttgttcttgtcacttgtgatgacttgaggccagatagtttccttggctatgttaaataactcaagatcagctcccgagtctgagatctcttctctcaatggcattggagctggctgtgcctgaggcagacctggaccgtggacatg

SEQ ID NO: 28009 - DNA, 444 bp, Artificial Sequence
  derived and/or modified sequence
atgatcatcatggtgatcatcttcctggtgctgctgttctgggagaacgaggtgaacgacgaggccgtgatgagcaccctggagcacctgcacgtggactacccccagaacgacgtgcccgtgcccgccagatactgcaaccacatgatcatccagagagtgatcagagagcccgaccacacctgcaagaaggagcacgtgttcatccacgagagacccagaaagatcaacggcatctgcatcagccccaagaaggtggcctgccagaacctgagcgccatcttctgcttccagagcgagaccaagttcaagatgaccgtgtgccagctgatcgagggcaccagataccccgcctgcagataccactacagccccaccgagggcttcgtgctggtgacctgcgacgacctgagacccgacagcttcctgggctacgtgaagtag

SEQ ID NO: 28010 - DNA, 444 bp, Artificial Sequence
  derived and/or modified sequence
atgataatcatggtaataattttccttgtgctgctgttctgggaaaatgaggtcaacgacgaggcagtgatgtcgaccctggaacacttgcacgtcgactatccccagaacgacgttccggtccccgctagatactgcaaccacatgataatccaaagggtgatcagggaaccagatcacacttgcaagaaggagcatgtcttcattcacgaacggccccgcaagatcaatggaatctgcatttctcctaagaaagtagcatgccaaaaccttagcgcaatattctgttttcagtctgagacaaaatttaaaatgacggtctgccaactgatagagggcacacgctaccccgcctgccgatatcactatagtcccaccgaaggtttcgtgctggtgacctgcgatgatctgcggcccgacagtttcctgggctatgtgaaatag

SEQ ID NO: 28011 - DNA, 444 bp, Artificial Sequence
  derived and/or modified sequence
atgataatcatggtgatcattttcctcgtgctgcttttctgggaaaatgaagtgaacgatgaggcagtgatgagcacactggagcacctgcatgttgattacccccagaacgacgttccagtacctgcccggtactgtaatcacatgatcatacaaagggtgatccgcgagcctgatcacacgtgtaaaaaagaacacgtcttcatacacgaacggccccggaagattaatggcatatgtattagtcccaagaaagtggcgtgtcaaaatctgagcgcaatcttctgtttccaatcagagaccaagttcaaaatgactgtgtgccagctcatcgagggaacaaggtaccccgcttgtcggtaccactatagccccactgaaggcttcgttttagtaacatgtgatgacctccggcctgatagcttcctgggctatgtgaaatag

SEQ ID NO: 28012 - DNA, 444 bp, Artificial Sequence
  derived and/or modified sequence
atgatcatcatggtgatcatcttcctggtgctgctcttctgggagaatgaggtgaatgatgaggccgtgatgagcaccctggagcacctgcacgtggactacccccagaatgatgtgcctgtgcctgcccgctactgcaaccacatgatcatccagagggtcatccgggagccagaccacacctgcaagaaggagcacgtgttcatccacgagcggcccaggaagatcaatggcatctgcatcagccccaagaaggtggcctgccagaacctgagcgccatcttctgcttccagagcgagaccaagttcaagatgacagtgtgccagctgattgagggcacccgctacccagcctgccgctaccactacagccccacagagggctttgtgctggtgacctgtgatgacctgcggccagacagcttcctgggctacgtgaagtag

SEQ ID NO: 28013 - DNA, 444 bp, Artificial Sequence
  derived and/or modified sequence
atgataataatggtgataattttcttggtgcttctgttctgggaaaatgaggtgaatgatgaagcagtgatgtcaactttagaacacttgcatgtggactaccctcagaatgacgttcccgttcctgcaaggtactgcaaccacatgatcatacaaagagttatcagggaacctgaccacacttgtaaaaaggagcatgtcttcatccatgagaggcctcgaaaaatcaatggtatttgcatttctcccaagaaggttgcttgccaaaacctttcggccattttctgctttcagagtgagacaaagttcaaaatgacagtctgtcagctcattgaaggcacaagataccctgcctgcaggtaccactattcccccacagaggggtttgttcttgtcacttgtgatgacttgaggccagatagtttccttggctatgttaaataa

SEQ ID NO: 28014 - DNA, 444 bp, Artificial Sequence
  derived and/or modified sequence
atgatcatcatggtgatcatcttcctggtgctgctgttctgggagaatgaggtgaacgacgaagcagtgatgtctacactggaacatctccacgtcgattaccctcagaatgatgttcctgtcccagctcggtattgtaatcacatgataatacagcgcgtgatccgcgagccagatcacacttgtaaaaaggagcatgtgttcatccacgagcgacctaggaaaatcaatggaatctgcatcagccctaagaaggtggcctgtcaaaacttatcagcaatcttttgctttcaaagtgaaacaaaattcaagatgaccgtttgccaacttatcgaggggaccaggtatcccgcatgtcgctaccactacagtcctactgagggattcgtgcttgttacttgcgatgacctgcgcccagattccttcctgggttacgtgaagtag

SEQ ID NO: 28015 - RNA, 444 nt, Artificial Sequence
  derived and/or modified sequence
augaucauuaugguaauuaucuuucucguguuacuuuuuugggaaaacgaagugaacgaugaagccgugaugagcacauuggaacauuugcacguggauuacccgcaaaacgaugugccaguccccgcuagauacugcaaccacaugauaauucaacgcgugauucgagagcccgaccauaccugcaagaaagaacacgucuuuauccaugagcguccaaggaaaaucaauggcauuuguaucucaccgaagaaaguagcaugccagaaccugucugcaauuuuuuguuuccagagcgagacuaaauuuaagaugacagugugucagcugauagaaggcacaagguauccugccugucgcuaucacuacaguccuacggagggcuuuguccuggucaccugugacgaccugcggccggacucauuccugggcuacguuaaauag

SEQ ID NO: 28016 - RNA, 444 nt, Artificial Sequence
  derived and/or modified sequence
augauuaucaugguuaucaucuuccugguccugcucuucugggagaaugaaguaaacgaugaagccgugauguccacacucgagcaccugcauguggacuauccccaaaaugaugugcccgugccagcacgguacugcaaccacaugaucauccagagagugauuagagagccagaccauacuuguaaaaaggaacacguuuuuauacacgaacgcccaagaaagauuaacggcaucuguauaucccccaagaaagucgcuugucagaaucucuccgccaucuuuuguuuccaguccgaaaccaaguuuaagaugacugucugccagcuaauugaagguacuagauauccagccugucgauaucacuacagccccacagagggauuuguccucguuacaugugacgacuuacgacccgacagcuuuuuggguuaugugaaauag

SEQ ID NO: 28017 - RNA, 444 nt, Artificial Sequence
  derived and/or modified sequence
augaucaucaugguuauaauauuccuagucuuguuauuuugggaaaaugaaguaaaugacgaagccgugauguccacuuuggagcacuugcacguagacuauccacagaacgacguccccgugcccgcacgauacugcaaucacaugaucauccaaagagugauucgagaacccgaccacacaugcaaaaaggaacacguguucauucaugaaagaccgcgcaaaauuaacgggauuugcaucucucccaaaaaagucgccugucagaaucucuccgccaucuucuguuuccaaucggagaccaaguuuaaaaugaccguuugccagcucauugagggaacucgcuacccagccugcagguaccacuacucucccaccgaaggauucguucuggugacuugugacgacuuacgacccgacagcuuuuugggauaugugaaguag

SEQ ID NO: 28018 - RNA, 444 nt, Artificial Sequence
  derived and/or modified sequence
augaucaucauggugaucauuuuucuggugcuuuuauuuugggagaaugaaguuaaugaugaagcugugaugaguacucuugagcaucuucaugucgauuauccacagaaugacgugcccgucccugcccgguauugcaaccacaugauaauccagagagugauucgcgagccagaucacacuuguaagaaggaacacguauuuauucacgagaggcccagaaaaauuaacgguauuuguauaucuccaaagaaagucgcuugccagaaucucuccgccaucuuuuguuuucaguccgaaaccaaauuuaagaugaccgucugucaguugaucgaaggaacucgcuacccugcgugcagauaccauuauuccccaaccgaaggcuuuguccucgugacaugugacgaccugcgcccagacuccuuuuuggguuacgugaaguag

SEQ ID NO: 28019 - protein, 1029 aa, Artificial Sequence
  derived and/or modified sequence
MQTNEGEVSEESSSKVEQEDFVMEGHGKTPPPGEESKQEKEQEREEQLMEDKKRKKEDKKKKEATQKVTEQKTKVPEVTKPSLSQPTAASPIGSSPSPPVNGGNNAKRVAVPNGQPPSAARYMPREVPPRFRCQQDHKVLLKRGQPPPPSCMLLGGGAGPPPCTAPGANPNNAQVTGALLQSESGTAPVWSKSTPPAPDNGTSAWGEPNESSPGWGEMDDTGASTTGWGNTPANAPNAMKPNSKSMQDGWGESDGPVTGARHPSWEEEEDGGVWNTTGSQGSASSHNSASWGQGGKKQMKCSLKGGNNDSWMNPLAKQFSNMGLLSQTEDNPSSKMDLSVGSLSDKKFDVDKRAMNLGDFNDIMRKDRSGFRPPNSKDMGTTDSGPYFEKGGSHGLFGNSTAQSRGLHTPVQPLNSSPSLRAQVPPQFISPQVSASMLKQFPNSGLSPGLFNVGPQLSPQQIAMLSQLPQIPQFQLACQLLLQQQQQQQLLQNQRKISQAVRQQQEQQLARMVSALQQQQQQQQRQPGMKHSPSHPVGPKPHLDNMVPNALNVGLPDLQTKGPIPGYGSGFSSGGMDYGMVGGKEAGTESRFKQWTSMMEGLPSVATQEANMHKNGAIVAPGKTRGGSPYNQFDIIPGDTLGGHTGPAGDSWLPAKSPPTNKIGSKSSNASWPPEFQPGVPWKGIQNIDPESDPYVTPGSVLGGTATSPIVDTDHQLLRDNTTGSNSSLNTSLPSPGAWPYSASDNSFTNVHSTSAKFPDYKSTWSPDPIGHNPTHLSNKMWKNHISSRNTTPLPRPPPGLTNPKPSSPWSSTAPRSVRGWGTQDSRLASASTWSDGGSVRPSYWLVLHNLTPQIDGSTLRTICMQHGPLLTFHLNLTQGTALIRYSTKQEAAKAQTALHMCVLGNTTILAEFATDDEVSRFLAQAQPPTPAATPSAPAAGWQSLETGQNQSDPVGPALNLFGGSTGLGQWSSSAGGSSGADLAGASLWGPPNYSSSLWGVPTVEDPHRMGSPAPLLPGDLLGGGSDSI

SEQ ID NO: 28020 - protein, 37 aa, Artificial Sequence
  derived and/or modified sequence
MQTNEGEVSEESSSKVEQEDFVMEGHGKTPPPGEESK

SEQ ID NO: 28021 - DNA, 3090 bp, Artificial Sequence
  derived and/or modified sequence
atgcagaccaacgagggcgaggtgagcgaggagagcagcagcaaggtggagcaggaggacttcgtgatggagggccacggcaagacccccccccccggcgaggagagcaagcaggagaaggagcaggagagagaggagcagctgatggaggacaagaagagaaagaaggaggacaagaagaagaaggaggccacccagaaggtgaccgagcagaagaccaaggtgcccgaggtgaccaagcccagcctgagccagcccaccgccgccagccccatcggcagcagccccagcccccccgtgaacggcggcaacaacgccaagagagtggccgtgcccaacggccagccccccagcgccgccagatacatgcccagagaggtgccccccagattcagatgccagcaggaccacaaggtgctgctgaagagaggccagccccccccccccagctgcatgctgctgggcggcggcgccggcccccccccctgcaccgcccccggcgccaaccccaacaacgcccaggtgaccggcgccctgctgcagagcgagagcggcaccgcccccgtgtggagcaagagcaccccccccgcccccgacaacggcaccagcgcctggggcgagcccaacgagagcagccccggctggggcgagatggacgacaccggcgccagcaccaccggctggggcaacacccccgccaacgcccccaacgccatgaagcccaacagcaagagcatgcaggacggctggggcgagagcgacggccccgtgaccggcgccagacaccccagctgggaggaggaggaggacggcggcgtgtggaacaccaccggcagccagggcagcgccagcagccacaacagcgccagctggggccagggcggcaagaagcagatgaagtgcagcctgaagggcggcaacaacgacagctggatgaaccccctggccaagcagttcagcaacatgggcctgctgagccagaccgaggacaaccccagcagcaagatggacctgagcgtgggcagcctgagcgacaagaagttcgacgtggacaagagagccatgaacctgggcgacttcaacgacatcatgagaaaggacagaagcggcttcagaccccccaacagcaaggacatgggcaccaccgacagcggcccctacttcgagaagggcggcagccacggcctgttcggcaacagcaccgcccagagcagaggcctgcacacccccgtgcagcccctgaacagcagccccagcctgagagcccaggtgcccccccagttcatcagcccccaggtgagcgccagcatgctgaagcagttccccaacagcggcctgagccccggcctgttcaacgtgggcccccagctgagcccccagcagatcgccatgctgagccagctgccccagatcccccagttccagctggcctgccagctgctgctgcagcagcagcagcagcagcagctgctgcagaaccagagaaagatcagccaggccgtgagacagcagcaggagcagcagctggccagaatggtgagcgccctgcagcagcagcagcagcagcagcagagacagcccggcatgaagcacagccccagccaccccgtgggccccaagccccacctggacaacatggtgcccaacgccctgaacgtgggcctgcccgacctgcagaccaagggccccatccccggctacggcagcggcttcagcagcggcggcatggactacggcatggtgggcggcaaggaggccggcaccgagagcagattcaagcagtggaccagcatgatggagggcctgcccagcgtggccacccaggaggccaacatgcacaagaacggcgccatcgtggcccccggcaagaccagaggcggcagcccctacaaccagttcgacatcatccccggcgacaccctgggcggccacaccggccccgccggcgacagctggctgcccgccaagagcccccccaccaacaagatcggcagcaagagcagcaacgccagctggccccccgagttccagcccggcgtgccctggaagggcatccagaacatcgaccccgagagcgacccctacgtgacccccggcagcgtgctgggcggcaccgccaccagccccatcgtggacaccgaccaccagctgctgagagacaacaccaccggcagcaacagcagcctgaacaccagcctgcccagccccggcgcctggccctacagcgccagcgacaacagcttcaccaacgtgcacagcaccagcgccaagttccccgactacaagagcacctggagccccgaccccatcggccacaaccccacccacctgagcaacaagatgtggaagaaccacatcagcagcagaaacaccacccccctgcccagacccccccccggcctgaccaaccccaagcccagcagcccctggagcagcaccgcccccagaagcgtgagaggctggggcacccaggacagcagactggccagcgccagcacctggagcgacggcggcagcgtgagacccagctactggctggtgctgcacaacctgaccccccagatcgacggcagcaccctgagaaccatctgcatgcagcacggccccctgctgaccttccacctgaacctgacccagggcaccgccctgatcagatacagcaccaagcaggaggccgccaaggcccagaccgccctgcacatgtgcgtgctgggcaacaccaccatcctggccgagttcgccaccgacgacgaggtgagcagattcctggcccaggcccagccccccacccccgccgccacccccagcgcccccgccgccggctggcagagcctggagaccggccagaaccagagcgaccccgtgggccccgccctgaacctgttcggcggcagcaccggcctgggccagtggagcagcagcgccggcggcagcagcggcgccgacctggccggcgccagcctgtggggcccccccaactacagcagcagcctgtggggcgtgcccaccgtggaggacccccacagaatgggcagccccgcccccctgctgcccggcgacctgctgggcggcggcagcgacagcatctag

SEQ ID NO: 28022 - DNA, 114 bp, Artificial Sequence
  derived and/or modified sequence
atgcagaccaacgagggcgaggtgagcgaggagagcagcagcaaggtggagcaggaggacttcgtgatggagggccacggcaagacccccccccccggcgaggagagcaagtag

SEQ ID NO: 28023 - DNA, 3090 bp, Artificial Sequence
  derived and/or modified sequence
atgcagactaatgaaggagaggtcagtgaggagagctcttccaaggtggaacaggaggacttcgtcatggaagggcacggcaagaccccgcctcccggcgaggagagtaagcaggagaaggaacaggagagagaagagcagctgatggaggataagaaacggaaaaaagaagataaaaagaaaaaagaggctactcagaaagttacggagcagaaaactaaagttcccgaggtcactaagccaagtcttagtcaacctaccgccgcaagccccatcggttcctccccctctccccccgtgaatggcgggaacaacgccaagagggtagctgttcctaatggtcagcctccttccgcggcccgatacatgcccagagaggtacccccccgctttcgctgccagcaggaccacaaagtgctgctgaagcggggtcagcctccacctccatcctgcatgctgcttggggggggcgctggacctccaccttgtaccgcccccggcgctaaccctaataacgcacaagtcactggagcgctgctgcagagtgagtctggtacggctcccgtctggtccaaatctaccccccccgcaccagacaacgggacttccgcctggggagagccgaacgaatcaagtcccggctggggggaaatggacgacacaggagcctctactaccggctggggtaataccccggccaatgcgcccaacgcaatgaaacccaattccaaatccatgcaggatgggtggggggagtccgacggaccagtcacaggcgccagacatccaagttgggaagaggaagaagacgggggagtgtggaacactacgggttctcaaggaagcgcctcatcacataactcagctagctgggggcagggcgggaagaagcagatgaagtgttccctcaaaggcggtaacaacgattcctggatgaacccgctggctaagcagttttctaatatgggcctgctcagccagaccgaggacaatccatccagcaagatggatctcagcgtgggctcattgtcagacaagaagtttgacgtcgataagagggcaatgaacctgggagattttaacgatataatgcgaaaggatcggtccgggtttcgcccccctaactccaaggatatgggcactacggacagcggtccgtatttcgagaaaggcgggagtcatggcctgttcggtaatagcacagcccagtctcgaggcctgcatacacccgtccaacctctcaattcgtctccctccctgcgggcccaggtgccgccgcagtttatctcaccccaagtcagcgccagtatgctgaagcaattccctaattctggattgtctcccggtttgtttaatgtggggccgcagctttctccgcagcagattgctatgctgtcccaactgccccaaatccctcagtttcagctggcatgccagctgttgttacagcagcagcagcagcaacagctgctgcaaaaccagaggaaaatctcccaggctgtgagacaacagcaagaacagcaactcgcaagaatggtctccgctctgcagcagcaacagcaacagcagcaaagacagccaggaatgaaacactcaccttcacatccagtgggtcctaaacctcacctggataacatggtccctaatgcactgaacgtgggactgcctgatctacagaccaaggggccaattcccggatatgggtctggattctcctcaggtggcatggattatggcatggtcggtggaaaagaggccggcaccgagtcccgctttaagcagtggacttcaatgatggaaggcctcccttctgtggcaactcaagaggctaacatgcataagaacggggctattgtggctcctggaaaaacgagggggggttcaccgtataaccagtttgatattatccctggagacactcttgggggacacactggcccagctggtgattcttggctgccagccaaaagcccccccaccaataaaatcggctcaaagtcatcaaacgcctcctggccccctgagttccagcctggagttccttggaagggcatccagaatattgaccccgaaagcgacccatacgtgacccctggctcagtgctcggcggcactgccacgtcccctattgtcgacaccgatcaccagctactgagagacaacactaccggctctaactcatccctgaatacgtccctgccatctccaggagcctggccttattcggcaagcgacaacagctttaccaacgttcactctacgtctgctaaatttcccgattacaagtctacctggtcgccggatccaatcggccataatcccactcacctttcaaataagatgtggaagaatcatataagcagtcgcaacactacacctttgccccgccctccaccaggattgactaatcccaagccctctagcccttggtctagcactgctcccaggagcgtgcgcggttggggcacccaagattcccgattggcctccgctagtacgtggtccgacggcggaagcgtcagaccctcgtactggttggtattgcacaatttgacaccacagatcgacggctccacactgcgtaccatctgtatgcagcacggccctctgctgacattccacttgaatttgacacagggaacggccctcatccgatattcaactaagcaggaagcagctaaagcacaaacagccttgcatatgtgcgtattaggaaacaccacaattcttgctgaatttgccaccgatgatgaggtctcccgttttctggcacaagcccagccgccgacacccgccgctacaccatccgcccctgccgccggatggcagtcactcgagaccggacagaaccaatctgaccctgtagggccagccctaaatttatttggcggatctaccggcctgggccagtggagctcctccgctgggggcagcagtggagcggatctggcaggggcctccctgtgggggcctcccaattattcttcctccctgtggggcgtccccactgtcgaagacccacacaggatgggatcgcctgctcccctcttaccaggagatttgctgggtggaggcagcgattctatatag

SEQ ID NO: 28024 - DNA, 3090 bp, Artificial Sequence
  derived and/or modified sequence
atgcagaccaatgagggcgaggtatctgaagagtctagtagcaaagtggaacaggaggacttcgtgatggaggggcacggaaagacaccccccccaggcgaggagagcaaacaggagaaggaacaggagagagaggagcagttgatggaggacaagaaacggaaaaaggaggataagaagaagaaagaagccactcaaaaggtcaccgaacagaagacgaaggtgcctgaagtgacgaagccatctctgtcgcagccaactgcagcaagcccgatcggttctagtcctagcccgccagtcaatggggggaacaacgcgaagagggtggctgttcctaatgggcagccaccaagtgctgcccgttacatgcccagagaagtgccgcctcggtttagatgtcagcaggaccataaggtccttctgaagcgcggccagcctcctcctcccagttgcatgttactcggtggtggagcaggtccccccccctgcacggcgccgggtgcaaacccaaacaacgctcaggtgacaggcgctcttttgcagagcgaatcaggaacagcaccggtctggagcaaaagcaccccacctgcccctgacaacggtacctccgcttggggcgagcccaacgagtcttccccgggatggggggagatggacgacactggcgccagcactacagggtggggcaataccccagccaatgcacccaacgccatgaaacccaacagcaaaagcatgcaggatggctggggagaatctgacggtccagttacgggggcccggcatccttcttgggaggaagaggaagatggtggagtctggaatactaccgggtctcagggttctgcatcatctcataacagtgccagctgggggcagggtggaaaaaagcagatgaagtgctctttaaaaggcgggaacaacgactcatggatgaacccgctcgccaagcagttctctaacatgggcctgctttcccaaaccgaggataatccatcctcaaagatggatctctcagtcgggagcctctcggataaaaaattcgacgtggacaagcgagcaatgaaccttggcgattttaatgacatcatgcgtaaagataggtcaggctttaggccacctaactcaaaggatatgggaactactgactccggtccgtactttgagaagggaggatcgcacgggctgttcggcaatagcacagcccaatctaggggtctccacactcccgtgcaaccgctcaatagtagccccagcctgagggctcaagtgccaccgcaatttatcagtcctcaggtaagcgcatccatgctgaagcagtttcctaattcgggtctgtcaccaggattgtttaatgtgggcccccagctctcacctcagcagatcgcgatgctgtcccagctccctcagatcccacaattccagttggcctgccaactgttgctgcagcagcagcagcagcagcagctgttgcagaaccaaaggaagataagccaggctgtgcgccagcagcaggaacaacagctggcgcgtatggtgtctgcactgcagcagcagcagcagcagcagcagcgccagcccgggatgaagcatagccccagccaccctgtgggacccaaacctcacctcgacaatatggttccaaacgcactaaacgtgggcctcccagatttgcaaaccaagggacccattccagggtatggctcaggcttctccagcggcggtatggattacggcatggtaggtgggaaagaggctggaactgagagtaggtttaagcagtggactagcatgatggaaggactgccaagcgtcgctacccaggaggcaaatatgcacaaaaatggtgctatcgttgccccgggcaaaacacgggggggtagcccctacaaccagttcgatataatacccggtgatacacttgggggtcacacaggcccagcaggagattcctggctcccggcgaagtcccctcctaccaataagataggttccaaaagttctaatgctagctggccaccagagttccagcctggagtcccatggaagggtattcagaacatagaccctgagtccgatccatacgtgacacctgggtcagtgctgggtggaacggccacttcccctatagtcgacacggaccaccagctcctgcgggataacaccaccggctccaattcgtcactgaacaccagccttccctccccaggagcctggccctacagcgcaagtgataactcttttacgaacgtgcatagcacatccgcaaagttccctgactacaagtccacatggagccctgatcctatcggtcataatccgacccatctgtctaacaagatgtggaagaatcatatctctagcaggaatactactcccttgccccggccaccacccggacttaccaatccaaagccaagctcaccgtggagcagcaccgcaccgcgctcagtgcggggatggggcactcaggatagtcgactagcaagcgcctctacctggagtgatggcgggagtgtaagaccatcatactggctagtgctgcataacctcacaccgcagatagatggttcgacgctccgaaccatatgtatgcagcacggcccattactcaccttccacctcaaccttacccagggcaccgcgttgatccgatacagtacaaaacaagaggctgccaaggcacagactgccctgcacatgtgcgttcttggcaatactacgatcctggccgagttcgctacagatgacgaagtttctagatttctagcccaggcacagccacctacccctgcagccacccctagcgcccctgccgccgggtggcaatctctcgagactgggcagaaccaatcagatcctgtgggccccgcactcaacctgtttggaggctcaacaggactgggccagtggtctagcagcgctggcggttcatccggagctgacctggctggcgcctcgctgtggggaccccccaattattctagtagtctgtggggcgtgcctactgttgaagacccgcaccgtatggggtcacccgctccactgttgcccggcgacctgctaggcggcggcagcgactctatttag

SEQ ID NO: 28025 - DNA, 114 bp, Artificial Sequence
  derived and/or modified sequence
atgcagacaaacgagggggaggtctctgaggagtcatcatccaaggtggagcaagaggatttcgttatggagggtcacggaaagactcctccaccgggcgaagagtctaagtag

SEQ ID NO: 28026 - DNA, 3090 bp, Artificial Sequence
  derived and/or modified sequence
atgcagaccaatgaaggagaggtgtctgaggagagcagcagcaaggtggagcaggaggactttgtgatggagggccacggcaagaccccacctcctggagaggagagcaagcaggagaaggagcaggagcgggaggagcagctgatggaggacaagaagaggaagaaggaggacaagaagaagaaggaggccacccagaaggtgacagagcagaagaccaaggtgcctgaggtgaccaagcccagcctgagccagcccacagctgccagccccatcggcagcagccccagcccccctgtgaatggaggcaacaatgccaagagggtggccgtgcccaacggccagccccccagcgctgcccgctacatgccccgggaggtgcccccacgcttccgctgccagcaggaccacaaggtgctgctgaagaggggccagcccccaccacccagctgcatgctgctgggcggcggggccggccccccaccctgcacagcccctggggccaaccccaacaatgcccaggtgactggagccctgctgcagagcgagagcggcacagcccctgtgtggagcaagagcaccccaccagccccagacaatggcaccagcgcctggggcgagcccaatgaaagcagccctggctggggcgagatggatgacacaggagccagcaccaccggctggggcaacaccccagccaatgccccaaatgccatgaagcccaacagcaagtccatgcaggacggctggggcgagagtgatggccctgtgactggagcccggcaccccagctgggaggaggaggaggatggcggcgtgtggaacaccaccggcagccagggcagcgccagcagccacaacagcgcctcctggggccagggcggcaagaagcagatgaagtgcagcctgaagggcggcaacaatgacagctggatgaaccccctggccaagcagttcagcaacatgggcctgctgagccagacagaggacaaccccagcagcaagatggacctgtctgtgggcagcctgagtgacaagaagtttgatgtggacaagagggccatgaacctgggggacttcaatgacatcatgaggaaggacagaagtggcttccggccccccaacagcaaggacatgggcaccacagacagcggcccctactttgagaagggcggcagccacggcctgtttggaaacagcacagcccagagccggggcctgcacacccctgtgcagcccctgaacagcagccccagcctgcgggcccaggtgcccccccagttcatcagcccccaggtgtctgcctccatgctgaagcagttccccaacagcggcctgagccctggcctcttcaacgtgggcccccagctgagcccccagcagatcgccatgctgagccagctgccccagatcccccagttccagctggcctgccagctgctgctgcagcagcagcagcagcagcagctgctgcagaaccagaggaagatcagccaggccgtgcggcagcagcaggagcagcagctggccaggatggtgtctgccctgcagcagcagcagcagcagcagcagaggcagcccggcatgaagcacagccccagccaccctgtgggccccaagccccacctggacaacatggtgcccaatgccctgaatgtgggcctgcctgacctgcagaccaagggccccatccctggctacggcagcggcttcagcagcggcggcatggactatggcatggtgggcggcaaggaggccggcacagagagccgcttcaagcagtggacctccatgatggagggcctgcccagcgtggccacccaggaggccaacatgcacaagaatggagccatcgtggcccctgggaagacccggggcggcagcccctacaaccagtttgacatcatccctggggacaccctgggcggccacactggacctgctggggacagctggctgcctgccaagagcccccccaccaacaagattggcagcaagagcagcaatgcctcctggcccccagagttccagcccggggtgccctggaagggcatccagaacatcgaccctgagagtgacccctacgtgaccccaggctctgtgctgggcggcacagccaccagccccatcgtggacacagaccaccagctgctgcgggacaacaccaccggcagcaacagcagcctgaacaccagcctgcccagccctggggcctggccctacagcgccagtgacaacagcttcaccaacgtgcacagcaccagcgccaagttcccagactacaagagcacctggagcccagaccccatcggccacaaccccacccacctgagcaacaagatgtggaagaaccacatcagcagcaggaacaccacccccctgcccaggcctcctcctggcctgaccaaccccaagcccagcagcccctggagcagcacagcccccaggtctgtgcggggctggggcacccaggacagccggctggccagcgccagcacctggagcgatggcggctctgtgcggcccagctactggctggtgctgcacaacctgaccccccagattgatggcagcaccctgcggaccatctgcatgcagcacggccccctgctgaccttccacctgaacctgacccagggcacagccctgatccgctacagcaccaagcaggaggccgccaaggcccagacagccctgcacatgtgtgtgctgggcaacaccaccatcctggccgagtttgccacagatgatgaggtgagccgcttcctggcccaggcccagccccccaccccagctgccacccccagcgccccagctgctggctggcagagcctggagaccggccagaaccagagcgaccctgtgggccctgccctgaacctgtttggaggcagcacaggcctgggccagtggagcagcagcgctgggggcagcagtggagctgacctggccggggccagcctgtggggcccccccaactacagcagcagcctgtggggcgtgcccaccgtggaggacccccacaggatgggcagccctgcccccctgctgcccggggacctgctgggcggcggcagtgacagcatctag

SEQ ID NO: 28027 - DNA, 114 bp, Artificial Sequence
  derived and/or modified sequence
atgcagaccaatgaaggagaggtgtctgaggagagcagcagcaaggtggagcaggaggactttgtgatggagggccacggcaagaccccacctcctggagaggagagcaagtag

SEQ ID NO: 28028 - DNA, 3090 bp, Artificial Sequence
  derived and/or modified sequence
atgcagaccaacgagggcgaggtgagcgaggagagcagcagcaaggtagagcaggaagatttcgtgatggaggggcacggcaaaacgcccccgcccggagaagagtcaaagcaggagaaggagcaagagagggaagaacagctgatggaggataaaaaacgcaagaaggaggataaaaaaaagaaagaagctacacagaaggtcaccgaacagaaaaccaaggtcccagaggttaccaaaccatccctgagccagcccactgcagcatcaccaattggaagctcaccctcccctcctgtcaatggtggcaataatgccaaaagggtggctgtccccaacggccagccgccatcagccgctaggtacatgccccgtgaagtgccacctaggtttcgctgccagcaggaccataaggtgctgttgaaaaggggccagcctccgcccccttcatgcatgctactgggaggtggagcaggccccccaccatgcacggctccaggagccaacccgaataatgcccaagtaaccggggcgttactccagagtgaatctggcacagccccagtatggagtaagagcacgccccctgcccccgataacgggacaagtgcatggggcgaacctaacgagagtagccccggctggggcgagatggacgatacaggagcctcgactaccggctggggcaacacccccgccaacgctccaaatgccatgaagcccaacagtaagagcatgcaagacggttggggtgagtcggacggtcccgtgacaggcgccaggcacccatcctgggaggaggaggaagatggaggggtatggaacactaccgggagtcagggtagtgcttcttctcacaactccgcttcttgggggcagggaggcaaaaaacagatgaaatgttcgctgaagggcggaaacaatgattcctggatgaatcccttggcaaaacaattcagtaacatgggccttttaagccaaaccgaagacaaccccagttccaagatggacctctctgtgggaagccttagcgataaaaaatttgatgttgataagcgagctatgaatttaggcgatttcaatgatatcatgcggaaagataggtctgggttccgccccccaaactccaaagacatgggtaccactgacagtgggccctattttgagaagggagggagccacggcttgtttggcaactctacagcacaatctcggggccttcatacccctgtgcagcctctgaactctagccccagcctacgggcccaggtgcctcctcagttcattagtcctcaggtgagtgccagtatgttgaagcagttcccaaattcgggactgtcccccggtttgtttaatgtgggaccacaattgagtcctcagcaaatagcgatgctcagccagctgccccagattccccagttccagttggcctgccagctgctgctccagcagcagcaacagcagcagttactgcagaaccagagaaagattagtcaggccgtgcggcaacagcaggaacaacagctggccagaatggtgagtgccttacagcagcagcagcagcagcaacaacgacagccgggaatgaaacacagtcccagccatcctgtcggacctaagcctcacctggataacatggtccccaacgccttgaatgtggggctgcccgacctgcaaaccaaggggcccattccgggatatggctccgggttcagctccggcgggatggactatggcatggtcggaggtaaagaagccggaactgaaagccgcttcaaacaatggacctccatgatggaggggctaccctctgtggctacacaggaggccaatatgcacaaaaatggtgccattgtggcccccggcaagactcgtggaggcagtccgtacaaccagttcgatatcatccctggggacactttggggggacacactggtccagccggggacagctggctgcctgcaaagtctccccccactaataaaattggcagcaagtcatccaatgctagctggccgccagagtttcaaccgggggtgccatggaaaggtatacagaacatcgacccagaatcggatccttatgttactcctggaagtgtccttggcggcaccgctacttccccaatcgtcgacacagaccaccagctgctccgggataacaccaccggctccaactcttcgttgaacacatctctgccaagccctggcgcgtggccatacagtgctagtgataattcctttacaaatgttcatagcactagcgctaaatttcctgattacaagagcacttggtcacctgatcctattggccataaccctacccatctgagcaacaaaatgtggaaaaaccacatctccagtcgcaacacaacgcccctgcctagaccaccccccggactcaccaaccccaaaccttcatccccctggagtagcaccgctcctaggtcagttagaggctgggggacccaggactcaaggctggccagtgcttctacttggtccgatggcggatctgtaagaccgtcatactggcttgtgcttcataatctcacacctcaaatagatggttctacactcaggacaatctgtatgcagcacggaccgctcttaacattccatctcaacctcacccagggcaccgccctgatccgctactcaaccaagcaagaggcagctaaagcccagactgcccttcacatgtgcgtccttgggaacacaacgatacttgcagagttcgcgactgacgatgaggtaagtcgttttctagctcaggcccagccccctactccagccgccactcccagcgcccctgcagccggttggcaaagtctggagaccggccagaatcagtccgaccctgtgggtcccgccctcaatctattcggggggtctaccgggctgggccagtggtccagctctgccggcggcagttcaggagcagatctcgccggcgccagcctgtgggggcccccaaactactcctctagtttgtggggagtgccaactgtcgaagacccccatcggatgggcagccctgcacccctgctgccaggggatcttctaggcggaggttctgattcgatatag

SEQ ID NO: 28029 - DNA, 3090 bp, Artificial Sequence
  derived and/or modified sequence
atgcagaccaacgagggcgaggtgagcgaggagagcagcagcaaggtagagcaggaggatttcgtgatggagggtcacggcaaaactcctccaccaggggaagagagcaagcaggaaaaagagcaggagcgagaagagcagctgatggaagacaagaagcgaaagaaagaggataagaaaaaaaaggaggcgacacagaaagtcactgaacagaagaccaaggtgccagaagtgaccaagcccagcctaagtcagcccaccgccgccagccctattgggagctcaccttctcccccggtgaacggtggcaacaatgctaaacgtgtcgccgttcccaacggtcagccaccttccgccgcccgctacatgccccgcgaagtgccaccccggttccgctgtcagcaagatcacaaagtgctgttgaagcgaggtcagcccccccccccctcctgcatgctccttggaggaggagccggacctccaccttgcacagctcccggcgccaaccccaacaatgcccaagtaaccggtgctctgttgcagtctgagtctggcactgccccagtgtggtccaagtccacacccccagcccctgacaacgggacctctgcttggggagaacctaatgaatcttcacccgggtggggggaaatggatgacactggagcttcaacaactgggtggggcaataccccagctaacgcacccaacgccatgaagccgaactctaaaagtatgcaagacgggtggggagagagtgacggaccagttactggcgccaggcatccaagttgggaagaggaggaggatgggggcgtctggaacactacggggtcacaaggttccgcttcctcccataactccgcgagttgggggcagggtggaaaaaagcagatgaaatgttcgctgaaaggtggtaataatgattcctggatgaatcctttagcaaagcagttctctaatatggggctgctgtctcagaccgaggacaaccctagtagcaaaatggacctctctgttggcagcctctctgacaaaaagttcgacgtagacaaacgggcgatgaatctcggtgactttaacgacataatgcggaaagacagaagcggctttcgtccaccaaatagcaaagatatgggtactacagacagcggcccctatttcgagaaaggagggtcacacggtctgtttggcaacagcaccgcacagtcaagaggtctccatacaccagtgcaaccgctgaattcatccccatcacttcgggcgcaggtaccaccccagttcattagccctcaggtgagtgcaagcatgcttaagcagttccccaacagcgggcttagcccaggcctttttaacgtgggtccccaactttctccccagcagatcgctatgctaagtcagctgccccagatcccacaatttcagttggcctgccaactcctgttacaacagcaacagcagcagcagctgctccaaaatcaacgaaaaattagccaagctgtaagacagcagcaggaacaacagctggccagaatggtttccgccctgcagcagcaacaacagcagcagcagagacagcccggaatgaagcactctcccagccatccggtagggccgaagcctcacttagataatatggttccgaacgccttaaacgtgggtttgcccgacctgcagacaaaagggcccataccaggctacggctcgggtttcagctcaggagggatggattatggaatggtaggggggaaggaggctggtaccgagtcgcgtttcaagcaatggaccagtatgatggagggtctgccctctgtcgccactcaggaagccaatatgcacaaaaacggcgcaatcgttgcgcccgggaaaacgagaggaggtagcccatacaatcagtttgacattattcctggagataccctgggaggccacaccggcccggctggcgactcttggctcccagccaagagcccacctacgaataaaattggctcgaaaagctcaaacgcatcatggccgcccgaattccagcctggtgtgccatggaagggtattcagaatatcgaccctgagtctgatccttacgttactcccggaagcgttctggggggaacagccacatctcccatcgtggacacggatcaccagctcctaagggataacaccactggctctaactcctcactgaacacttcgcttccaagccccggcgcatggccctacagtgccagcgacaatagttttactaacgtgcacagtacaagtgctaagtttccagactacaagtctacatggtcaccagatccgatcggccacaaccccacccacttatcaaacaagatgtggaagaaccacatttcttcccgtaacacaacaccgttgccacggcccccaccaggactgactaacccaaagcccagtagcccatggtcgagtaccgctccgaggtccgtacgaggttgggggacccaagactctaggctggctagcgcctcaacgtggagcgatggcggctctgtgcgtccttcctactggcttgtgcttcacaatctgacacctcagatagacgggtcaaccctgcggacgatctgtatgcagcatggcccattactgactttccatctgaatcttacccaggggaccgctcttatccggtatagcaccaagcaggaagctgcaaaggcgcagaccgctctacacatgtgtgtgctgggcaatacaaccatcttagccgaatttgccacagacgatgaagttagcagattcctagcacaagcacagcctcccacccctgccgcgacacccagtgcaccggccgcaggctggcagtctcttgagaccgggcagaaccagagtgatccagtagggcccgccctcaacttgtttggcggatctaccgggctaggccagtggagcagctccgctggcggatccagcggcgccgatttggccggagcctctctctgggggccgcccaattactcctcttctttatggggagttccgacagttgaggacccccaccgcatgggttcacccgcacctctgctacctggagatttgttgggaggaggttcagacagcatatag

SEQ ID NO: 28030 - DNA, 114 bp, Artificial Sequence
  derived and/or modified sequence
atgcagaccaacgagggcgaggtgagcgaggagagcagcagcaaggtagaacaggaggactttgtcatggaaggacatggtaaaacgccacctccaggggaagagtcaaaatag

SEQ ID NO: 28031 - DNA, 3090 bp, Artificial Sequence
  derived and/or modified sequence
atgcagactaatgaaggcgaggtctccgaggagagcagttccaaagttgaacaggaggactttgtgatggagggacatgggaagactccgccaccgggagaggagtccaaacaggagaaggaacaggaacgggaagagcaactcatggaggacaaaaaacggaagaaggaagataaaaagaagaaagaggcgacccagaaagtcacagaacaaaagacaaaagtgcctgaagtgacaaaaccttcactaagccagccaaccgcggcatctcctataggcagcagcccttccccgccagtaaacgggggaaataacgctaagagagtggccgtccctaatggacaacccccatccgccgctcgctacatgcctagagaagtcccacctaggttccgctgtcagcaggatcacaaggtgctcctgaaaaggggtcagcctcctccaccttcctgtatgctccttgggggtggagcgggacccccaccatgcaccgcaccaggggcaaaccccaataatgcgcaggtcactggggctttgctacagagtgagtcaggaaccgctcctgtgtggtcgaagagtactcctcccgctccagacaatgggacgtccgcatggggcgaacctaatgaatcctcccccggatggggcgaaatggatgacacaggtgcctctacgacagggtggggtaacacaccagctaacgcccctaacgcaatgaagccgaactcgaagagcatgcaagacggctggggggagagtgatggtccagtaaccggagcccgacatccctcctgggaggaagaggaggacggtggagtgtggaacaccactggatcacaagggtctgcctctagccacaatagcgcttcatggggacaggggggtaagaagcagatgaaatgttcactcaaaggcggaaataatgactcgtggatgaatcccctggcgaagcagttctccaatatgggtttactgtcacagactgaagacaacccatcctctaagatggacttatcagtggggtcactgtccgacaagaagttcgatgtggacaaaagggcgatgaacctgggagattttaatgacattatgcgaaaggacaggtctggtttcaggcccccaaattctaaagacatggggacgactgacagcggcccttacttcgaaaaaggaggaagccatggcctttttggcaactccaccgctcaatcaagaggcctgcatactcccgttcagcccttaaactcttctcctagcctacgggcacaggttccaccacaatttatcagtccacaggtttccgctagcatgctcaagcaatttccaaatagcggcctctctcctggcctatttaatgtcgggccacagctcagtccccagcagatcgctatgctgtctcagctgccgcagataccccagtttcagttggcctgtcaattgctcctccagcagcaacagcaacagcagttgctgcagaaccagaggaagattagccaagcagtgcggcagcagcaggagcagcagctggccagaatggtatctgcccttcagcaacagcagcagcagcagcagcgccagcctggtatgaaacacagtcctagccaccccgtagggcctaagccgcatctggacaacatggtgcccaacgccttaaacgtgggcctgccagatctccaaacgaaaggccctatacccggttacggcagtgggtttagttcaggtgggatggattacgggatggtcggagggaaagaagcaggaactgagagcagattcaagcagtggacatcaatgatggaagggctcccttccgttgcaactcaggaggcaaatatgcataagaacggggcaatcgtggcccctggtaagacgcgcggaggttctccctacaaccagtttgacatcatccccggagatacgctcggcggtcacacaggaccagcaggggattcctggctcccagcgaagtctccaccaacaaataagatcggctcgaagtcttccaacgcctcttggccccctgagttccagcccggagttccttggaaggggatccagaacatcgaccccgagagtgacccatacgtgactcccggttccgtcctggggggaactgccacctcaccaattgtggacactgaccatcagttgctgagagacaacaccactggtagcaacagttctctgaataccagcctgcctagtccgggagcctggccctacagtgccagtgacaattccttcacaaacgtgcattctacctcagccaaattccctgactacaaatctacttggagtcctgatccaattggacacaatcccacacatctgagtaacaagatgtggaagaaccacatctcgtcacggaacacaacgcctcttccaaggccaccccctgggctgacaaatcctaaaccttcctctccttggagttccaccgcacccagaagtgtccgtggatggggtacacaggactctcggctggcctccgcttccacttggagcgacggagggtccgttagaccttcttactggcttgtgttacacaacctgacccctcaaatagacggcagtactctgcggacaatttgcatgcagcatggccctctgctcacattccacttaaatctcactcagggaaccgccctgataagatacagtaccaagcaggaggcagccaaggcacagaccgccttgcatatgtgtgttctgggcaacaccacgatcctagcagagttcgcaacagatgacgaggttagccggttcttggcgcaggctcaacctcctacccccgcagccaccccttccgcaccagccgctggctggcagtccctggagaccggacagaaccagagcgaccctgttgggcctgcattaaacctttttggtgggagcacaggactgggtcagtggagtagctccgctgggggatcatcaggcgctgatctggctggagcctccctatggggcccaccaaattattctagctctctttggggagtgccaaccgtggaggatccccaccgcatgggcagcccagcacccctcctgcccggagaccttctgggcggtggtagcgactctatttag

SEQ ID NO: 28032 - DNA, 3090 bp, Artificial Sequence
  derived and/or modified sequence
atgcaaaccaatgagggagaagtgtccgaggagagcagtagcaaggtggaacaggaggacttcgtgatggagggacacgggaagactcccccaccaggggaagagtctaagcaggagaaggagcaggagagagaagaacaactgatggaggacaaaaagcgaaaaaaagaggacaaaaagaaaaaggaggccacccagaaagtgaccgaacagaagaccaaagtgcctgaggtgaccaaaccgagcctgtctcagccaactgccgcttcacctattgggtccagcccctcaccaccagtgaacggtgggaacaacgcaaaacgcgtagccgtgccaaacgggcaaccaccctcagccgcacgctatatgcctcgggaggtcccgccaagattccggtgccagcaggaccacaaggttctgttgaaaaggggccaacctcctccaccctcttgcatgttgctcggtggaggtgcaggcccaccaccctgtaccgcccctggggctaacccaaacaacgcacaggtaaccggcgcattactgcagtctgagtccggtactgctcccgtctggtctaagtctacacctccagcgccagacaatgggacttccgcttggggagaacctaatgagagctcccctggttggggcgaaatggatgacaccggcgctagtaccactggttggggaaatactccagccaatgcccctaatgcaatgaagcccaattctaaatccatgcaggacggttggggcgagagcgacggccctgttaccggggctaggcacccctcttgggaggaggaggaggacggcggtgtttggaataccacaggatcacaggggtctgccagctctcataacagcgcatcttggggacagggagggaaaaaacagatgaaatgttcactaaagggagggaacaatgatagttggatgaaccccctcgctaagcagtttagcaatatgggtttactgtctcaaacagaggataatccttcttccaagatggatctgagtgtaggatcgctctccgacaagaagttcgatgtggacaaacgggctatgaacctgggggactttaatgatattatgagaaaggatagaagcggctttaggccaccaaactcaaaggacatggggaccacagactcagggccttactttgagaaaggcggatcacatggtttgttcggaaactccacagcacagagtcgtggactgcatacccctgtacaacccttaaactctagcccaagcctcagagctcaggtgccccctcaatttatctcgccacaggtatcagcttcaatgctgaaacagtttcccaattctgggctgtcacccggtctattcaacgtgggccctcagttgtctccgcagcagatcgctatgctttcacagttgccccagattcctcagttccagttggcatgccagctattgttgcaacagcagcagcagcagcagctgctccagaatcagaggaaaatctcgcaggctgtgcgccaacagcaggaacagcagctggccaggatggtgtccgccctgcagcagcagcaacaacagcagcagagacagcccggaatgaagcatagccctagccacccagttggccctaaaccccatctagacaatatggttcctaatgcattaaatgttgggcttcctgatctgcaaaccaaaggtcctattccaggttacggcagcgggtttagcagcggtggcatggattacggcatggtgggtggcaaggaggccggtaccgaatcaaggttcaagcagtggacatcaatgatggaagggcttccatctgtggcaacgcaggaggcgaatatgcataagaacggggctatcgtagctcccggaaagactagaggcggttcaccctacaaccagttcgatattatccccggagatactcttgggggtcacacaggcccagccggagactcttggctgcccgctaagtcccctccaactaataagattggcagcaaaagctctaacgcctcttggcccccagagtttcaacccggagtgccatggaaaggaatccaaaacatcgatccagagtctgacccatatgttacccctggcagcgtcctgggcggtactgcaaccagccccatcgtggatacagaccatcagctgttgcgggacaataccaccggttccaattcttcgttgaataccagcctccctagccccggagcttggccttactccgccagcgataattcgttcactaacgtgcacagcacttcagccaagttccctgattacaaatctacttggagccccgacccaattgggcataaccccacacatctgagcaacaagatgtggaaaaatcatattagctcaagaaataccaccccactacctaggccgcctcctggcctgactaaccccaaaccttccagtccatggtcttccaccgcaccaaggtcagtgagaggttggggcactcaagacagtaggctggcctccgctagtacctggagcgacgggggtagcgtgagaccctcatactggttggtgctgcataatctcacacctcaaatcgatgggagtaccctgcgaacaatctgtatgcaacacggtcccctgctcactttccacctgaatctcacccagggaaccgcgttgatccggtattccacaaagcaggaggccgcaaaagcacagacggctctgcacatgtgcgtgctcggcaacacgactatccttgctgagtttgccaccgatgacgaagtgtcccggttcctcgcacaggcccaacctccaacccctgcagccacgccaagtgcccctgctgccggttggcagagtctcgagacaggccagaatcagtcagatccagtaggtccagcactgaatttattcgggggatcgactggcttgggtcagtggtccagttcagccggaggctcctccggagctgatctggccggtgctagtctttgggggccacctaattacagtagcagtctctggggcgtgcccactgtcgaggatccccaccgtatgggctccccagctcctttactgcccggagacctcctcggaggcggttctgactctatctag

SEQ ID NO: 28033 - DNA, 114 bp, Artificial Sequence
  derived and/or modified sequence
atgcagaccaatgagggggaggtgtcagaggaatcttcctctaaagtggaacaggaagactttgtaatggaaggccacggcaagacacccccaccaggagaggagtccaaatag

SEQ ID NO: 28034 - DNA, 15958 bp, Artificial Sequence
  derived and/or modified sequence
ttgtttattttgtttttagtttttggggtccccgtgctgctgcaaggcgaaacgggagggagtgacccctgcgcccctcagtcccccctacgacgtcgcctccatagtctgcggagaagcggagactgcgcgcctcgcctcacagcgaaacgccgcgcactcggagccggcacggctcggcgggttgtggttttttgcactgaatgtaacctagactcatcttcacgggcttgtgttgccccaggtactgtcaaaggcagtatttttgtgtttctgcagagttttgcacaaaatctgttcccatgcaaaccaatgagggagaagtatcggaagaaagcagttccaaggtggaacaggaggattttgtaatggaagggcatggcaagactccacctcctggtgaagaaagcaaacaagagaaggagcaagaaagggaagaacagttaatggaagacaagaaaaggaagaaagaggataaaaagaaaaaagaagccactcagaaggtcacggaacaaaaaaccaaagtgcccgaagtgacgaaaccaagtttaagccaaccaacggccgccagcccaattggcagctctccatcgccaccagtcaatggtggcaacaatgccaaaagggtggcagtgccgaacggacaaccgccaagcgccgcccgctacatgcctcgggaggtgccgccgcgattccgttgccagcaggaccacaaagtgttactaaaacgtgggcagccccctccaccgtcctgcatgctccttgggggtggggcagggcctcctccctgcacagcacctggagcaaacccaaacaacgcacaagtgacaggagcgctgctgcagagtgagagtgggactgcgccagtctggagcaaaagcacaccacctgctccagataatggtacttccgcttggggtgagccaaatgaaagcagtcctgggtggggcgagatggatgatacaggagcatcgaccacaggctgggggaacacgcccgccaacgctcccaatgccatgaagcctaattccaaatctatgcaagacggctggggggagagtgacgggccagtcacaggagctcgccatcccagctgggaagaggaggaggatggaggagtctggaacaccactggctctcagggcagtgcttcctcccacaactcagcaagctggggacaaggaggaaagaaacaaatgaagtgctcactcaaaggaggaaacaatgattcatggatgaatcctcttgccaaacagttttcaaatatgggattgctgagtcagactgaagataatccaagcagcaaaatggatttgtctgtaggaagcctttcagataaaaaatttgatgtggacaagcgagcgatgaatctcggggattttaatgatatcatgaggaaggatcgatctgggttccgtccacctaattccaaagacatgggaaccacagatagtgggccttattttgagaagggcggtagtcatggtttgtttggaaacagcacagcacaatcgagaggtctgcacacacccgtgcagccactaaattcttctcccagtctccgggcgcaagtgcctccccagtttatttccccccaggtttctgcctcaatgctcaagcagtttcccaacagtggcctgagtccaggtcttttcaatgtggggccccagttatctcctcaacaaattgccatgctgagccagcttccacaaattccccagtttcagttggcatgtcagcttctcttgcagcagcagcaacagcagcagttgttacagaaccagagaaagatttctcaagctgtacgccaacagcaagagcagcagctggctcgaatggtgagtgcactgcagcagcagcagcagcagcagcagaggcagccaggcatgaagcactcgccctctcatcctgttgggcccaagccgcatctggacaacatggtacccaacgcattgaatgtggggctcccagaccttcaaaccaaagggccaatacctggatatggttctggcttcagctctggcggcatggactatggcatggttggtgggaaggaggctggaaccgagtctcgctttaaacagtggacctccatgatggaggggctgccctctgtagccacacaggaagccaatatgcacaaaaatggcgctatagtggcccctggtaaaacccggggagggtcaccgtacaaccagtttgatatcatccctggtgacacactgggtggccatacgggtcctgctggtgatagctggttacctgccaaatctccaccaacaaataaaatcggaagtaaatccagcaatgccagttggcctccagaattccaaccaggagtgccatggaaaggtatccaaaacattgaccctgaatctgacccctatgtcaccccaggaagtgtgctggggggtacagccacatctcccattgtagatactgaccaccaactgctgcgggataacaccacagggtctaattcttccctcaacacctcgctgccttcacctggtgcctggccctacagtgcctctgacaactcctttaccaacgttcatagcacttcagcaaagttccctgattacaaatcaacatggtccccagatcccataggacacaaccccactcatctctccaacaagatgtggaaaaaccatatttcctccaggaacactacaccgctgccccgcccacctcctggtctgaccaaccccaaaccatcatctccctggagcagcacagcaccccgatcagtcagggggtgggggacacaggactcacggctcgcctcggcctctacctggagtgatggtggctcagttcgtcctagttactggctggttcttcacaatctcaccccacagattgatgggtcaaccttgagaacgatctgcatgcagcatggcccactgctgacattccatctgaatctaacccagggcactgccctgatccgatacagcaccaaacaggaggcggccaaggcccaaactgcactgcacatgtgtgtgttgggaaacactaccatccttgctgagtttgccactgatgatgaagtcagccgctttctggcacaagctcagccccctacacctgcagcaaccccaagtgcgccagctgcggggtggcagtcgctggagaccggccagaaccagtcagatcccgtgggacctgctctgaatctttttggtgggtccactgggctcgggcagtggagcagcagcgctggtggcagcagcggggccgatcttgctggcgcttcattgtgggggcccccaaactattcttctagcttatggggagtcccaacggtggaagatccccataggatgggcagccctgctcctttactacctggtgaccttctgggaggagggtcggattcaatctgaacttagaactttcaactctgacctcgtgaccttttttggaacagcagcagcactaacttgaccttttcgttttttttttcaacttgcaataaatacatttttaaaaggaaaaaagaaaacggagagaaaaaaaggtgggtcattgacagactgtctgagcacatagttgcctcccttataacttcagttttttcgtttggaatatgaatccaaaaagagaacatatcactcttgaaatacttgaatcatgaacgccaacctagaaagacaatgtgaagcaagtacacataccatttaaatttaaacacaaaaaaattaaaaaaattagtttctagtttttcacttttttcatgttatatggaagttgttgctaagaaacatatatactgaaaaaaaatagctttttaactttgtttgcactgggtgtgtttccgtccttaggtctaccatgtttgggagggagggaaattcaaaagaattgttgggggaggggggagggaagacttgacggagcctcactttaaaaacaaaaacacaaaaaacctaaaaaaaaaaaaaaggaaaaaatttgtgattggctggttgataaataccagtgtgttctggcacatgtaactgcccaggcatgctcgttctggtgtgtgtgtgcacgtgtgttcatgtgcattcgcgtgcatccttctctgtctctgtgtgtgtgcctgtgttcttcccttctcccctgccccaccctgacttctcagaaagctgcatcgctgacagtctgcaggctggctggccggcccatctgctttttattttatttttttaactatgagaacacacaggcccggagagccactgctactaaagcaactccattgggctgcattaagatgaacagagtgctttttaatgatgaaagcagggagctcctttccatttgcaacttagcctgaatgtggggtttctctggctgttcttttgacctagcagtagagtggagcactgccaagtccaaaaaactagagcaggaggtacctcttggagcaacggtgtgtttatttctgtttttttttttttttaagtgaatggccaccaggcacatctgagtatctgttaagtttcatgcaggccttttcgttagtttgaaatgggaacggaagataacttttgatgatgcgatgtctcaaaaacagagaaactttgttccctctttccttatgatcaggtttgagaaattcttcaaaaaattaggtgaagttgagttacatatttctgttggttggttctctttttcattttatgaaaacagaaaagaataagtggtgagcagcctcctgaaagcatctgcagctactccctctgctcctttctcgccgagcgttacctgtgccaggccgtggcgcgttacagcaccaggccatcactgacagaaacgtttacttaacgaatgttcttaaaccagtgtgtacttcaagcgtttccttttgtttctctgtgttgtgtatttcctgtgtatgtggttttgcttaggcaggtataacttagcgaagacttttaagtattgcacctttttttgatttttgacctcttccccccaccttgtaattttgcttttttaatttcggtatttaaatacttttttttttttttaagcatcaatgtagtagtactctgggccgaacaggggtcaacgtttaatctacagttatcaccaacatgtatgtacttatgtcggaatcaaaatgtatcaaactgcttattgtgaagagaattatagcagacctgaagggggcgaaaaaccagatagggtggggggatggatgccggtgacgtgctagcacttgtgtggacatcccagtctgcattatgctgtttaacataaagtgccgacattttgtaccagcaaatacctgcccattccaacccttggtgggagcagacctctactgtcctctgtaacttgctgctattgaggacaagggagtttttctttctttagcgtcttcagtgaaggatacaatacaacaatgcctaatgtatttgactttttagcttgtgtctgtgtgtaggtgggtgggtgggtgtgtataggaaaagcctaaaacaagttatttgcatttcagtggttttgtgagacaaagaatgggaaattctgtagcccttctggcttaccctgttgattataaacctagcctcaaaagagattgacaggcatgactcaagtgagtgttcacatatacaagcctgcatgagccctctgtgggtaggtggtcacacttggcatctgcagcattgacgtggccccgctgggtgccttgagcatgccctcttcctgctctgcaatttgaatcaccaccgtgccccttccaccactgttccccatgcaaaagctctgcttccagcagcccccactgaccgctctctgtgtggagcaaagtgctgtcgtgcggtgaccaccaggtgaagagcagcttgtattcagacatctagagaaggttaaatcttagtgtccctgggccaggagcatatcccaaggctcctgcgagccagtggcgaccctgtccactgccgctcttggttcactgctgtgtcctgccccaccctcctctcctcctgcctgttggttccttgacctgcactatgggttagttgagttccttacgatactacggtgaaagccgggtgctagagcccctcttgtttacaagacataatgagggatttgaaatatgtaaaaataaacatgagaagctaaaatgttcttccatcataagcttaaagggaaaaaaactaaaaactttaaaaaaaaaagaccaaaaagtgcgtatatatatacatataaatatatattttagatgaagactaactctgggagcatttaacagtgttttttgtttctgtttttaacatttgttttcctgctttaaaatttgcaagcattctcaggaattctagggtaggaagccagttttttgaagatggtttatttaaccatatcttatcctagagagatggctgtttctttcctgttaataaacttttacaagttcctgaaacttcagaaagtttaaacaatttttacttaaaaaaatgtaaaaagaaaagtctccaaacattattgtcatactggggatcacacattttaaaacacatagaaatattttttaaaaattatcaatttagcagcaacaggtaaattcattatcttaaaaatatgggagaaggattaagctttgtaagagctcgatcatggattcttttgaaattgtgtgtagtttaatgggagagtgtttggtgtatatagatgagaatgccatcactttgttcctttccatttgagactgaactgaaatctcccctagtaatttttatttttttaaaggaacccttctccttgtccccacaaccccagcaacaaaagaaaggaaggaaggaagaaacaacagcttaaaaaaaaaagtaatctgtaaaatagtacagttggattgctgagaatctatgtaaagagttaggaaatataggttaataatttttggaacaaattttaaatataggcattactagaggaaaattatctatggactgtcctattaatgaagaatgtctgtcttacctccgtttgttttgggaggaggagaaaatatagaagaatctaataaggaacaagtgattttacttttttagctcccagctactgttgtgctcgttttaattgctgttttgaagatctgctgcttaattatccccatcccttagccggagatgtggagtgtttcctttcagtttttggtgatgttgaattcttttgtattccctcctggggccaggggtcagaattcccaagcatgaccacagcttcttttaaacattaagcttcccagtgggaaggaaactccagctcgacaggtaaagggagtgggtggggttgctgcctgcaatttctctaaaaccgctttagtgccttcgtacatacacccagacatcctgagcaagggggacgcacatgtgtgtgtgtgtggtccagtcactccacagatgtaagatactcacccataaaggaaattggagtggttctggacaggccccaaaggcagtgggctgaatttaaaataaataaacaaacgtcaagcaagttaatatgcttatgtctcagtaatgtagaatgccaagttccttcctgtgtcgtgtgccctccattactgtgcattgattcctccaggtgtgtaattgtgacaactgcagtgatttggaaagtctctttgtcttgggcaaatagaaggggttcctgttgttctgctcttgtccttcgtctcctccccttttcccccagacctcccccttctttttgtcaacttgctgggagctttgctttattggttggcagtgacctaagaacaggatatggtgaggatgtcatggaagagaagagctctttccgtggtattctttggcaagagccatgtctactaagaggttagatgacttcagtatacttataaaattcagtgagagtgccttcttctcttctaccacactctggcatagatacaggcttgctggtcacctctcattacatagatttattttaaaaacattttgattatgttaatttgagctttcccttttttttttttaactactttttaaaacacttgattactagtggcttagaggtgtgtacatctcctgaacatcacaaacttggtttctacctaccacacgagtagccaaaagaaaagaagcactaatagagaaaggggtgtctcacaccagacagaggacctctgctgtcaattagatccagtatcatgacctaactttaagtgtggaaaagagttcagatctctgagacactgtgaagaaatggatggctcatgtaacatctctgatccctcagtccccaaccctggacgtgtttcatttacaacattcataggagttaacttagcagtgttgcaagttaaggttccaaaccaaattatttaatcagtgtccccccaataaatcacttatccatttattgctagttagttttatttatagcaacttgatttcctatgagtatggctcctgttgtaagaattttcccacctcttctgacatgaatgtagcataagttagcaatcggttcttccaaactcctgtgggttgaatatggtatagaaggtatgcaagaggaaaaagaaaggaaaagataaaactcctgcctgagaatttggaagcacctttattaacacatatatctcgcagaaactagaagctcataggctgttaactttttgcaactattcactcatttttaccacttttttttttgggtgagggggtgatttttgtaaggttaacagccagattccattttgacctcagatgctgtgtactttttaatttcattttttatattctgccatcttgactcttctctaaaacagaatgaaaatgtctgcatgctgagcaaaatgcttacgccaagcctgtttttctctgcagagtaaacaggatgttttcagcagacttggctctaatagccatctctaagattagggaacaattgagtctttatgtagaaaagatccattttttccccatcctcagagttaaaattcaacatttaaagctttatcggttattgttttagatttgagatttttgtttttaagtatctataagatctttagaagtgagataaatttttcgctggttaaaaaaaatcaaactttcctctgcagtgtttttgccaagttttgtcacacttcatgtgtatgcattaactatacttcttagtgttactgcaaaaaaaaaaaacaaaaacaaaacaaaaaaaagccttgttctttaattgtgtttttcctcctgtgagtggacaactaaagccgcgtgatgatgcggatgaaaatattctggtctgtgtgtatacaatgaattgtcagtcttcagacctcatggtcgttaagaaaatagggaactcacaaaccctgctgcgcactacatttacttctttatctgcaagtacagggagtccatacagtcaagaaacacacagatacacataatgctattgaggacattgtcattctgtaagaaaacagaatattatctagatttccagagttagtgcagaccctgtgataacagtctgtgggtttgtggccagcgccaaaggtgtgtgtattttcagaaatggtccctatttgtcagtgatagtgttttttttttcttaagtttgacaaagggggtggtaatatcacattctttagatttgaaataattatcagctccaagaatctgtgaacatagtaataacaataaaaattcaacatcgaccctccctaacctgctcaccatacctccccaccccatgcctctgaagaaagaggccatgaacctacgaggtggtaaagggggacacaggtcagggagtggagagctactcctccagcagctcagcacccacactgcccgcatgcgtgtggccaccgggaccagatcccgagtgattgtggcatacccctaatatttgagtagtttttaagctgtcagtctcttgtcataacctcctaccgccacccaaaaaagtaacgaaagttgcagtaactgccagtgtttgcctcaccaaatttaaatcgttcccttttcagttagctatatacctgaatttgtttttaacaagaaactgtacatggccaggaaaaatggtactaccttggccaaagggtctttgcaaaaagctcagtcttcagttcttcactgtgacaaatgcttatcttgttcatgggaggggaaagatcagataaataggcaagaagtactctgttttaaataaagaataaatagtgtccgtttaaagcactttgtgcctcaacttcatttttaaactgtaaatcattgctttggaaataaattcccaattataattgacccatatctagccaatatcaacaagttgggatggtttttgtttttttcttttttttcaaaaagggaaattcctctttactgctcacagtaagctgcaaaagaaagttgtcaaggtggcttatgatgctgttgtagcagagctgtgaaaggaagtgctttgctttctctcccgccttccggaatctggcgttccttccccttcggctactgaaaggtgtgtacaactcccagaggggtggctgtaaaagttgactggaggcaaagtggagtggccttattgccaggactagccctacagaagagctttacagagaggaggacagtacatcctatgtgtgttcgccaaaaatgggaaaggtgggtatttaggcaaaacaaaataaaaacctttggaaccctttaagaagttacataccttttaaaggtagtatagtttctcaccaagtgatgcattttagcatgacacttcttgccagaaattttgggataagttggaataaatgtgtttaaaacatcatccaccgccctttttaaattttgtctaaggaattacttaagtatagtatttctgaatgtgcctttgtgagtacagagaccgtccgttctaggaagaagctatccgttggatacaaacaaacagacggtcagctttagtcattagggaagtcaaagttcctcctggaagtcccaggagcagctgttgagatttcattagcatcaatattgcacagtgtagagttgagtggaagagattctgggacttgggagaggagacaggggaaggtacccaggcgacgcagacccacgttagtccaagagcgcaggtttacacatctgcattccctagttttctccgtctgtatgtttgtgctcatgtggctttggctgttttgttttttgtttttctgtaagcactggagaattggaatatggtgatacttgtgacacattcatgcatgtaaacaaggcattttccagcttctgccgtgtgcagagcgggcagcacgcttttaccctttgagtctgtgtcctgaggcggccattacattcccacatgggcgtcacatcacgttgctgttgatgcaaacagggtattacacacaaggaaaaggggttttgaagagttaagattgaagtgtttgagaaagaaaagagaaaaatctgaaatcatattttatttcttcagagctattatagttgaacacagaaatctgcagtgtctttatttgtttttatgttttaaacaatttcacctcttctccccactcctatcttctaaagaaatatcaagcaaatgctaagggccatttccatgattcctcagagctcccccaaagaggagaacagtccctcccactcgattccttcagcttcattcaggaagacacagggaggagagatgctgcttctgcgctttgctctcattcctctctcatggccttgaaatgtattattatgcaaatgtgaattttgatactgaatttaagaagaggttgttggatttttttttttttttttttttttttcaaaaaaaaaagtcccacatgtggtcatcgtcgcttctttatgttgtaaggtgaattgtaactatgcattctgcaaagggggtggggaggagagggcagaaaggggaagggagtagcgttgcatccttgttcttcagtttctgtgtccatggtgtccccgtgtcctggaggggaaggggagtgagagacgaatgtggtaaggtcagcacagtgagatagagacctctgagtcctcttgccactgttgctggcaggtctgatggccaggtaaattccagggggcctgcagttcctgtcaaccaatgtggttcaggattcttgatcctagccgtgcagtgttaatccagtgcagcaatggaactccacaggctccagtgttctctggaaaaagtactcatcctttcctgaattcagagcccttcaagctcaggaaaccacgcttcactcgtgctgacctgaaagttaatctttaggtcgattttgaaaaactccgcctcctctctcctttttaatatttctttcttcctttttaatcatgtttaagtgaacttactcttagttataaggaactgtcctgctttgtggggaagagggctgttgcttgtcaggcaaaaaagttttctcttcctacccaccatccctctctctgcttcccttgcatttggcaggctgtatgaagccaatgagctgcgaggtgttttgacaggggaggtctgcatgcagcctcttctttgtcctaacaattcctttgttgatcttgcctgtgatgaatcatagcgcctgcattgctctggtctaggcattatttgcaacacacagtatcgtaagcgagagattgttctgcctatattcagtgttttccatgcagcaattcttcttgttgacgttcacagtactgtaacgagtaacagacttgatcacagtctcctcgtgcctgtgcagggctgcacaggcatgatcttatcagggttccaatctgttagattgcctttaaacaaaaaaaacaacaaaaaaataaaatcctgacgtttcaactgtctcacacaaaataatacctcgaggtacatttccccctgcaatgtaaacccttaactcctctctcctttctgacatcagtggattatcctttttaaaatatgaacatgtaaatagcaggataactttaaaaaacattttctttgctgtgaaagtaaccctaaaatatgttttcttcttttgtatttttttggtttttgtttttaagccatcagaagtttcagatctttactctttcatgtttaagaagaaagagcagaggaggtcgggggagccggtttgcatttgtgttggaggggtgttatctccattgcctcccacacagtgacagcagaccagtatgtaaaccctgtcttggctgggcgcggtggctcacaccagtaatcccagcactttgggaggctgaggcaggcagatcatctgaggtcaggagtttaagaccagcctggccaacatggtgaaaccccgtctctactaaaaaattagccggacgcagtggcgcgcgcctgtggtcccagctgctcgggaggctaaggcaggagaattgcttgaacccgggagacggaggttgcggtgagccgagattgcaccactgcactccagtgtgggcaacagagcaagacttcgactcaaaaacataaaataaacaaaagacacacacacacacaaaaaccctgtcttaaatagctgccatctcttccagcaatctagtgccagggtaagaagtgtctgaatttctctcttccagcagatccatcccctgcagggactccagaatgttctccacacaatacctggagctctcaacctttcttggttcagacacacacatacacaccccttgagtaactcagtatcattttgtagttcacagaaggatgtagtccctggcattttggtttgcactgtagaatccatagccttgtcactttgttatgctctggaaatgtactgatttcttacttgggaggaaacttgtgtaaggagatgtgcaaaccaccctgaaagccatgtgcatcctcacctcttccattaccccctccatgagctcgaagcgacattaagtagagggaaatgcttttaacaaatgctgctcatgtggatctgtcagctattgcttgcctagatttgggcacccatgaagcagggttggaatggatcattttgaattgcttctttgcagacacccccttcgcccccatctttaagataaaccctttactagtcaagaagcccttttcagttggatctcactgatcttgtatagtgacgacttcctttgaaggaagaagcttgattataagtgcatgcatattatccacccaccttctgatttgggcactgttcaccttggaattttatttattttgtttatctggaggccctttttctatcagtctctgatccctcatgggttctgcctgcccttgtatctcttgtacaatgctcccaaagggctttgctgatctctgcacttctttcctgggacactccccccaccaccaccctttgcacacaccagtgaccaaagtgtatgcagtgatctcacagaagacatcaaaaatggtgcatgcaccgtgaatgtgctcacagagacacgtgcacaagattctgcacccttggccttaatctcagtatgacttaaggtgcaggaacatttttaacaggttttaaaaaaacaaaaaacccttctgggaggaaaaaaataaaaagcagatacaacagctcaactgttcccactcctaactctccactatgtgcttataacttcacattctatgccctccccgccacccacctcatccctgttctgcgtaaccaaaaaacagacaacaaaagcaacctgaggagaggtttctggactattttatctgtctccatttagatggagatataaatgctgctttgggttccataatcctagggggctatgtttacatagtaaaatacatcctaccaaatcaggaaacagtgaataatgggagtcacttcacagagacgcaggaggacctggggggcgtagcagaggaggataggtagagaagtaccattttaattatttgtgacttgtggcttccttcctcctctcctcctccctccacgtctctctttgccccctttagacagaaggtgcagaaaagggcatcaaaaagaggctggattttttaaaaggcagctttccaactttgcacacaaacaggtaacaggaaggtacagcaaaaatcctctcatctgaaacactgtcagcagaaacaaaacctgtaaaaatgactaatcagctgcacatattgatgctctctgcaagttacctttaagtgttttttttttcttatacttgaagttgcttttacgatattattttggtggctttcttttctctctttgatgggcaatagaggaagtagataatgggatttaaggacgcctgggggagaaaagggaggatgtggcattgtctttttttttttttttttttttttttttagcatagaggtttaatcaaactcccatatgttgaaattgctcctcatattactggttttacatggacacagaaactaggcactttagaggtgcacttgcatggcaggctgggcccccttttctatattttattttcctttttagtatagtggtacttaaaatcactggttcacttaaaaaaacaaacaataaaatgttaaactctactaatgtacaaataagctgaaaagttgcattttatgtgtattttttgccatagcaggtactgtatttctcatgctggatttcaaaaaaaaaaaaaaaagtatcaaaaacaaaaaaaactaaagggtggtgttttattggattgtgacaggttgagtaataaggaattaagtcgtcgtcatttcattaaaactgagagatgatgtaatgcatatataagagttttctgaagggttttttttgggcttttaaacagcttatttttgtttttgtttagtttttttattttattttattttggaaagatatgattgtattatgtgcaactcagttgcttacattataactacaaaatatttttgggttcctggaaaaaaaagaaaaaagactaataaatgtgtttggctgctaagc

SEQ ID NO: 28035 - DNA, 3444 bp, Artificial Sequence
  derived and/or modified sequence
cggcccgcggaggcgcgtccgcccctggctggcggtggcagagggaggcgtcaggcctcggatcctcgggtccctgcgcagcgtcccggcctgtgtgcaggacctgcgtgacaagggttgtggttttttgcactgaatgtaacctagactcatcttcacgggcttgtgttgccccaggtactgtcaaaggcagtatttttgtgtttctgcagagttttgcacaaaatctgttcccatgcaaaccaatgagggagaagtatcggaagaaagcagttccaaggtggaacaggaggattttgtaatggaagggcatggcaagactccacctcctggtgaagaaagcaaacaagagaaggagcaagaaagggaagaacagttaatggaagacaagaaaaggaagaaagaggataaaaagaaaaaagaagccactcagaaggtcacggaacaaaaaaccaaagtgcccgaagtgacgaaaccaagtttaagccaaccaacggccgccagcccaattggcagctctccatcgccaccagtcaatggtggcaacaatgccaaaagggtggcagtgccgaacggacaaccgccaagcgccgcccgctacatgcctcgggaggtgccgccgcgattccgttgccagcaggaccacaaagtgttactaaaacgtgggcagccccctccaccgtcctgcatgctccttgggggtggggcagggcctcctccctgcacagcacctggagcaaacccaaacaacgcacaagtgacaggagcgctgctgcagagtgagagtgggactgcgccagtctggagcaaaagcacaccacctgctccagataatggtacttccgcttggggtgagccaaatgaaagcagtcctgggtggggcgagatggatgatacaggagcatcgaccacaggctgggggaacacgcccgccaacgctcccaatgccatgaagcctaattccaaatctatgcaagacggctggggggagagtgacgggccagtcacaggagctcgccatcccagctgggaagaggaggaggatggaggagtctggaacaccactggctctcagggcagtgcttcctcccacaactcagcaagctggggacaaggaggaaagaaacaaatgaagtgctcactcaaaggaggaaacaatgattcatggatgaatcctcttgccaaacagttttcaaatatgggattgctgagtcagactgaagataatccaagcagcaaaatggatttgtctgtaggaagcctttcagataaaaaatttgatgtggacaagcgagcgatgaatctcggggattttaatgatatcatgaggaaggatcgatctgggttccgtccacctaattccaaagacatgggaaccacagatagtgggccttattttgagaagggcggtagtcatggtttgtttggaaacagcacagcacaatcgagaggtctgcacacacccgtgcagccactaaattcttctcccagtctccgggcgcaagtgcctccccagtttatttccccccaggtttctgcctcaatgctcaagcagtttcccaacagtggcctgagtccaggtcttttcaatgtggggccccagttatctcctcaacaaattgccatgctgagccagcttccacaaattccccagtttcagttggcatgtcagcttctcttgcagcagcagcaacagcagcagttgttacagaaccagagaaagatttctcaagctgtacgccaacagcaagagcagcagctggctcgaatggtgagtgcactgcagcagcagcagcagcagcagcagaggcagccaggcatgaagcactcgccctctcatcctgttgggcccaagccgcatctggacaacatggtacccaacgcattgaatgtggggctcccagaccttcaaaccaaagggccaatacctggatatggttctggcttcagctctggcggcatggactatggcatggttggtgggaaggaggctggaaccgagtctcgctttaaacagtggacctccatgatggaggggctgccctctgtagccacacaggaagccaatatgcacaaaaatggcgctatagtggcccctggtaaaacccggggagggtcaccgtacaaccagtttgatatcatccctggtgacacactgggtggccatacgggtcctgctggtgatagctggttacctgccaaatctccaccaacaaataaaatcggaagtaaatccagcaatgccagttggcctccagaattccaaccaggagtgccatggaaaggtatccaaaacattgaccctgaatctgacccctatgtcaccccaggaagtgtgctggggggtacagccacatctcccattgtagatactgaccaccaactgctgcgggataacaccacagggtctaattcttccctcaacacctcgctgccttcacctggtgcctggccctacagtgcctctgacaactcctttaccaacgttcatagcacttcagcaaagttccctgattacaaatcaacatggtccccagatcccataggacacaaccccactcatctctccaacaagatgtggaaaaaccatatttcctccaggaacactacaccgctgccccgcccacctcctggtctgaccaaccccaaaccatcatctccctggagcagcacagcaccccgatcagtcagggggtgggggacacaggactcacggctcgcctcggcctctacctggagtgatggtggctcagttcgtcctagttactggctggttcttcacaatctcaccccacagattgatgggtcaaccttgagaacgatctgcatgcagcatggcccactgctgacattccatctgaatctaacccagggcactgccctgatccgatacagcaccaaacaggaggcggccaaggcccaaactgcactgcacatgtgtgtgttgggaaacactaccatccttgctgagtttgccactgatgatgaagtcagccgctttctggcacaagctcagccccctacacctgcagcaaccccaagtgcgccagctgcggggtggcagtcgctggagaccggccagaaccagtcagatcccgtgggacctgctctgaatctttttggtgggtccactgggctcgggcagtggagcagcagcgctggtggcagcagcggggccgatcttgctggcgcttcattgtgggggcccccaaactattcttctagcttatggggagtcccaacggtggaagatccccataggatgggcagccctgctcctttactacctggtgaccttctgggaggagggtcggattcaatctgaacttagaactttcaactctgacctcgtgaccttttttggaacagcagcagcactaacttgaccttttcgttttttttttcaacttgcaataaatacatttttaaaaggaaaaaagaaaa

SEQ ID NO: 28036 - DNA, 415 bp, Artificial Sequence
  derived and/or modified sequence
ttgtttattttgtttttagtttttggggtccccgtgctgctgcaaggcgaaacgggagggagtgacccctgcgcccctcagtcccccctacgacgtcgcctccatagtctgcggagaagcggagactgcgcgcctcgcctcacagcgaaacgccgcgcactcggagccggcacggctcggcgggttgtggttttttgcactgaatgtaacctagactcatcttcacgggcttgtgttgccccaggtactgtcaaaggcagtatttttgtgtttctgcagagttttgcacaaaatctgttcccatgcaaaccaatgagggagaagtatcggaagaaagcagttccaaggtggaacaggaggattttgtaatggaagggcatggcaagactccacctcctggtgaagaaagcaaaca

SEQ ID NO: 28037 - protein, 242 aa, Artificial Sequence
  derived and/or modified sequence
MGSACIKVTKYFLFLFNLIFFILGAVILGFGVWILADKSSFISVLQTSSSSLRMGAYVFIGVGAVTMLMGFLGCIGAVNEVRCLLGLLKQEMGGIVTELIRDYNSSREDSLQDAWDYVQAQVKCCGWVSFYNWTDNAELMNRPEVTYPCSCEVKGEEDNSLSVRKGFCEAPGNRTQSGNHPEDWPVYQEGCMEKVQAWLQENLGIILGVGVGVAIIELLGMVLSICLCRHVHSEDYSKVPKY

SEQ ID NO: 28038 - protein, 68 aa, Artificial Sequence
  derived and/or modified sequence
MGSACIKVTKYFLFLFNLIFFILGAVILGFGVWILADKSSFISVLQTSSSSLRMGAYVFIGVGAVTML

SEQ ID NO: 28039 - protein, 38 aa, Artificial Sequence
  derived and/or modified sequence
MGSACIKVTKYFLFLFNLIFFILGAVILGFGVWILADK

SEQ ID NO: 28040 - DNA, 729 bp, Artificial Sequence
  derived and/or modified sequence
atgggaagtgcatgtatcaaagttacaaagtatttcctgtttttatttaatctgatcttctttatcctgggcgcagtgatcctggggtttggggtctggatcttagcggataagagctccttcatttcagtcctgcagacaagttcaagctcccttaggatgggcgcctatgtctttatcggggtcggagcagtgacaatgctcatggggttcctgggctgcatcggagctgtaaatgaggtgcgatgcctccttggcctgctgaaacaggaaatgggaggaatagtcactgagctgatacgagattacaactccagccgagaagactccctgcaggacgcctgggactacgtccaggcgcaagtcaaatgctgtgggtgggtttcgttctacaattggacagacaacgcagagcttatgaacaggcctgaggtaacgtacccttgcagctgtgaggtgaagggagaagaagacaactctctgtccgtgcgcaagggcttttgcgaggcccctggaaaccgtacccagagtggaaaccatccagaagactggcccgtgtatcaggagggatgtatggagaaagttcaagcttggctccaagagaacctggggatcatcctgggggtgggcgtcggggtcgcaatcattgaactcctagggatggttttgtcaatttgcctatgccgccacgtgcattcagaagactactcgaaagtgcctaagtactag

SEQ ID NO: 28041 - DNA, 207 bp, Artificial Sequence
  derived and/or modified sequence
atgggctctgcttgcatcaaggtgacaaagtatttcctgttcttgtttaatctcatatttttcattctgggcgccgtgatactgggcttcggagtatggatcctggccgataagtcatccttcatttccgttctccagacgtcttccagttctctcaggatgggcgcctatgttttcatcggtgttggggccgtcaccatgctctag

SEQ ID NO: 28042 - DNA, 117 bp, Artificial Sequence
  derived and/or modified sequence
atgggcagtgcctgcataaaagttacaaagtatttcctttttctctttaatctcatctttttcattcttggggcagttatcctcggattcggagtgtggattttagccgacaagtag

SEQ ID NO: 28043 - DNA, 729 bp, Artificial Sequence
  derived and/or modified sequence
atgggcagcgcctgcatcaaggtgaccaagtacttcctgttcctgttcaacctgatcttcttcatcctgggcgctgtgatcctgggcttcggcgtgtggatcctggccgacaagagcagcttcatctctgtgctgcagaccagcagcagcagcctgaggatgggcgcctacgtgttcatcggcgtgggcgctgtgaccatgctgatgggcttcctgggctgcattggagctgtgaatgaggtgcgctgcctgctgggcctgctgaagcaggagatgggcggcatcgtgacagagctgatccgggactacaacagcagccgggaggacagcctgcaggatgcctgggactatgtgcaggcccaggtgaagtgctgcggctgggtgtccttctacaactggacagacaatgctgagctgatgaacagacctgaggtgacctacccctgcagctgtgaggtgaagggggaggaggacaacagcctgtctgtgaggaagggcttctgtgaggcccctggcaacagaacccagagcggcaaccaccctgaggactggcctgtgtaccaggagggctgcatggagaaggtgcaggcctggctgcaggagaacctgggcatcatcctgggcgtgggcgtgggcgtggccatcatcgagctgctgggcatggtgctgagcatctgcctgtgccgccacgtgcacagcgaggactacagcaaggtgcccaagtactag

SEQ ID NO: 28044 - DNA, 207 bp, Artificial Sequence
  derived and/or modified sequence
atgggcagcgcctgcatcaaggtgaccaagtacttcctgttcctgttcaacctgatcttcttcatcctgggcgctgtgatcctgggcttcggcgtgtggatcctggccgacaagagcagcttcatctctgtgctgcagaccagcagcagcagcctgaggatgggcgcctacgtgttcatcggcgtgggcgctgtgaccatgctgtag

SEQ ID NO: 28045 - DNA, 117 bp, Artificial Sequence
  derived and/or modified sequence
atgggcagcgcctgcatcaaggtgaccaagtacttcctgttcctgttcaacctgatcttcttcatcctgggcgctgtgatcctgggcttcggcgtgtggatcctggccgacaagtag

SEQ ID NO: 28046 - DNA, 729 bp, Artificial Sequence
  derived and/or modified sequence
atgggcagcgcctgcatcaaggtgaccaagtacttcctgttcctgttcaatctcatcttcttcattctgggcgccgtcatactcgggttcggcgtctggattttggcggacaaatcatcctttatctccgttctccagacctcgtccagctctcttaggatgggcgcttacgtgtttattggggtgggagcagtcacaatgctgatgggattcctggggtgtattggggctgttaacgaggtacggtgcctgttaggattgctcaagcaagaaatgggcggtattgttaccgagctgatcagagattataatagcagtagagaggatagcctgcaggacgcttgggactacgtccaggcacaagtgaaatgttgtggatgggtgagtttctataactggactgacaacgcagaactcatgaatcgacccgaggttacatacccatgtagctgtgaagtgaaaggagaagaagacaacagtctgagtgtacgaaaggggttttgcgaggcgcccggtaacagaacccagtcgggcaaccaccccgaagactggcccgtttaccaagagggctgcatggagaaagtgcaggcctggctgcaggaaaatctggggattattttgggtgttggcgtcggggtcgctattattgagctgctcggcatggtgctgtcaatttgcctgtgtcggcatgtccactcagaggactactctaaggtgcctaagtactag

SEQ ID NO: 28047 - DNA, 207 bp, Artificial Sequence
  derived and/or modified sequence
atgggcagcgcctgcatcaaggtgaccaagtacttcctgttcctgttcaacttgatatttttcatactgggcgccgtgatcctcggtttcggagtttggattctcgccgataaatcctccttcataagtgtgctgcagacgagctcatcatccctccgaatgggtgcatacgtttttatcggggtcggggcagtcactatgctgtag

SEQ ID NO: 28048 - DNA, 117 bp, Artificial Sequence
  derived and/or modified sequence
atgggcagcgcctgcatcaaggtgaccaagtacttcctgttcctgtttaatttaatattctttatactcggggccgtgattctcggattcggcgtctggattttggccgacaagtag

SEQ ID NO: 28049 - DNA, 729 bp, Artificial Sequence
  derived and/or modified sequence
atgggctccgcgtgtataaaggtcacaaagtacttcctctttttgttcaacctgatattcttcattcttggcgctgtgatcctgggcttcggcgtctggatcctcgcagacaagagttctttcatcagtgtcctgcaaaccagtagttcctccctgagaatgggcgcatacgtgttcatcggcgtcggagcagtaactatgctcatgggctttctggggtgcattggggctgtgaacgaggtgcggtgcctcctcggcctgctcaaacaggagatggggggtatcgttactgaactcatcagagactacaatagtagcagagaagattcccttcaggacgcatgggattatgtccaagcccaggtcaagtgctgcggctgggtgtctttttacaactggactgacaacgccgaacttatgaaccgacccgaggttacttacccatgctcctgcgaagtcaagggcgaggaggacaactcgctctcggtgcggaaaggcttttgtgaggcgccaggcaatcgaacccagtcaggtaatcacccagaagactggccggtttaccaagagggatgcatggagaaggtgcaagcctggctccaggaaaacttaggcattattctaggggtcggagtcggcgtggccatcattgagttgttgggtatggtgcttagtatatgcctctgtaggcacgtgcatagcgaggattattcaaaagtgccaaaatactag

SEQ ID NO: 28050 - DNA, 207 bp, Artificial Sequence
  derived and/or modified sequence
atgggcagtgcgtgtatcaaagttaccaagtactttctattcctcttcaacctcatattcttcatcctgggcgctgtcattctcggcttcggggtgtggattctagctgataagtctagtttcatttccgtgttgcagaccagctctagcagtctgcgcatgggcgcatacgtctttatcggagtgggtgcggtaacgatgctatag

SEQ ID NO: 28051 - DNA, 117 bp, Artificial Sequence
  derived and/or modified sequence
atggggtctgcatgtattaaagtaaccaagtattttcttttcctttttaacctcatttttttcattctgggggctgttatactgggattcggcgtctggattctggctgacaagtag

SEQ ID NO: 28052 - DNA, 729 bp, Artificial Sequence
  derived and/or modified sequence
atgggcagcgcctgcatcaaggtgaccaagtacttcctgttcctgttcaacctgatcttcttcatcctgggcgccgtgatcctgggcttcggcgtgtggatcctggccgacaagagcagcttcatcagcgtgctgcagaccagcagcagcagcctgagaatgggcgcctacgtgttcatcggcgtgggcgccgtgaccatgctgatgggcttcctgggctgcatcggcgccgtgaacgaggtgagatgcctgctgggcctgctgaagcaggagatgggcggcatcgtgaccgagctgatcagagactacaacagcagcagagaggacagcctgcaggacgcctgggactacgtgcaggcccaggtgaagtgctgcggctgggtgagcttctacaactggaccgacaacgccgagctgatgaacagacccgaggtgacctacccctgcagctgcgaggtgaagggcgaggaggacaacagcctgagcgtgagaaagggcttctgcgaggcccccggcaacagaacccagagcggcaaccaccccgaggactggcccgtgtaccaggagggctgcatggagaaggtgcaggcctggctgcaggagaacctgggcatcatcctgggcgtgggcgtgggcgtggccatcatcgagctgctgggcatggtgctgagcatctgcctgtgcagacacgtgcacagcgaggactacagcaaggtgcccaagtactag

SEQ ID NO: 28053 - DNA, 207 bp, Artificial Sequence
  derived and/or modified sequence
atgggcagcgcctgcatcaaggtgaccaagtacttcctgttcctgttcaacctgatcttcttcatcctgggcgccgtgatcctgggcttcggcgtgtggatcctggccgacaagagcagcttcatcagcgtgctgcagaccagcagcagcagcctgagaatgggcgcctacgtgttcatcggcgtgggcgccgtgaccatgctgtag

SEQ ID NO: 28054 - DNA, 117 bp, Artificial Sequence
  derived and/or modified sequence
atgggcagcgcctgcatcaaggtgaccaagtacttcctgttcctgttcaacctgatcttcttcatcctgggcgccgtgatcctgggcttcggcgtgtggatcctggccgacaagtag

SEQ ID NO: 28055 - protein, 592 aa, Artificial Sequence
  derived and/or modified sequence
MGRGLLRGLWPLHIVLWTRIASTIPPHVQKSDVEMEAQKDEIICPSCNRTAHPLRHINNDMIVTDNNGAVKFPQLCKFCDVRFSTCDNQKSCMSNCSITSICEKPQEVCVAVWRKNDENITLETVCHDPKLPYHDFILEDAASPKCIMKEKKKPGETFFMCSCSSDECNDNIIFSEEYNTSNPDLLLVIFQVTGISLLPPLGVAISVIIIFYCYRVNRQQKLSSTWETGKTRKLMEFSEHCAIILEDDRSDISSTCANNINHNTELLPIELDTLVGKGRFAEVYKAKLKQNTSEQFETVAVKIFPYEEYASWKTEKDIFSDINLKHENILQFLTAEERKTELGKQYWLITAFHAKGNLQEYLTRHVISWEDLRKLGSSLARGIAHLHSDHTPCGRPKMPIVHRDLKSSNILVKNDLTCCLCDFGLSLRLDPTLSVDDLANSGQVGTARYMAPEVLESRMNLENVESFKQTDVYSMALVLWEMTSRCNAVGEVKDYEPPFGSKVREHPCVESMKDNVLRDRGRPEIPSFWLNHQGIQMVCETLTECWDHDPEARLTAQCVAERFSELEHLDRLSGRSCSEEKIPEDGSLNTTK

SEQ ID NO: 28056 - DNA, 1779 bp, Artificial Sequence
  derived and/or modified sequence
atgggcagaggcctgctgagaggcctgtggcccctgcacatcgtgctgtggaccagaatcgccagcaccatccccccccacgtgcagaagagcgacgtggagatggaggcccagaaggacgagatcatctgccccagctgcaacagaaccgcccaccccctgagacacatcaacaacgacatgatcgtgaccgacaacaacggcgccgtgaagttcccccagctgtgcaagttctgcgacgtgagattcagcacctgcgacaaccagaagagctgcatgagcaactgcagcatcaccagcatctgcgagaagccccaggaggtgtgcgtggccgtgtggagaaagaacgacgagaacatcaccctggagaccgtgtgccacgaccccaagctgccctaccacgacttcatcctggaggacgccgccagccccaagtgcatcatgaaggagaagaagaagcccggcgagaccttcttcatgtgcagctgcagcagcgacgagtgcaacgacaacatcatcttcagcgaggagtacaacaccagcaaccccgacctgctgctggtgatcttccaggtgaccggcatcagcctgctgccccccctgggcgtggccatcagcgtgatcatcatcttctactgctacagagtgaacagacagcagaagctgagcagcacctgggagaccggcaagaccagaaagctgatggagttcagcgagcactgcgccatcatcctggaggacgacagaagcgacatcagcagcacctgcgccaacaacatcaaccacaacaccgagctgctgcccatcgagctggacaccctggtgggcaagggcagattcgccgaggtgtacaaggccaagctgaagcagaacaccagcgagcagttcgagaccgtggccgtgaagatcttcccctacgaggagtacgccagctggaagaccgagaaggacatcttcagcgacatcaacctgaagcacgagaacatcctgcagttcctgaccgccgaggagagaaagaccgagctgggcaagcagtactggctgatcaccgccttccacgccaagggcaacctgcaggagtacctgaccagacacgtgatcagctgggaggacctgagaaagctgggcagcagcctggccagaggcatcgcccacctgcacagcgaccacaccccctgcggcagacccaagatgcccatcgtgcacagagacctgaagagcagcaacatcctggtgaagaacgacctgacctgctgcctgtgcgacttcggcctgagcctgagactggaccccaccctgagcgtggacgacctggccaacagcggccaggtgggcaccgccagatacatggcccccgaggtgctggagagcagaatgaacctggagaacgtggagagcttcaagcagaccgacgtgtacagcatggccctggtgctgtgggagatgaccagcagatgcaacgccgtgggcgaggtgaaggactacgagccccccttcggcagcaaggtgagagagcacccctgcgtggagagcatgaaggacaacgtgctgagagacagaggcagacccgagatccccagcttctggctgaaccaccagggcatccagatggtgtgcgagaccctgaccgagtgctgggaccacgaccccgaggccagactgaccgcccagtgcgtggccgagagattcagcgagctggagcacctggacagactgagcggcagaagctgcagcgaggagaagatccccgaggacggcagcctgaacaccaccaagtag

SEQ ID NO: 28057 - DNA, 1779 bp, Artificial Sequence
  derived and/or modified sequence
atgggtcgaggattgttgaggggactgtggccactccacattgtgctgtggacacgcattgcttccacaattccaccacacgttcagaagtccgacgtggaaatggaagctcagaaggatgagataatctgtccttcctgtaaccgaactgctcatcccctccgtcacatcaataacgacatgatcgttaccgacaacaatggtgcagtcaaattcccacagctatgcaagttctgtgacgtgcgtttctccacatgtgacaatcagaagtcctgcatgtccaactgttccatcactagcatctgtgagaaaccccaagaggtgtgcgtggccgtgtggcggaagaatgatgagaatatcaccctggagaccgtatgtcatgaccccaaactgccataccacgacttcatcttggaagatgctgcttctccaaaatgtattatgaaggagaagaaaaagcctggagagacctttttcatgtgctcttgtagctccgatgaatgcaatgacaacattatcttctctgaggagtataacaccagcaatccagacctattgctcgtaatattccaggttactggtatcagtctgctgcctcctctaggagtggctatctcagtcattataattttttactgctacagagttaatcgccagcagaaactttccagcacctgggaaaccgggaaaactagaaagctaatggagttttctgagcactgcgcgatcatcctcgaggacgaccggagcgatatctcttcaacctgtgctaacaatattaaccataatactgaactgctacccatcgagctcgacacattggtgggcaaaggcaggttcgctgaggtgtacaaagccaagctaaagcagaacacttcagaacagttcgagactgtcgccgtcaagattttcccatacgaggagtacgcttcctggaagactgagaaagacatattttcagacattaacctgaaacacgaaaatatcttacagttcttgacggctgaggagagaaagaccgagctgggcaaacaatactggttgattaccgcatttcacgccaagggtaatctccaagaatatctaactagacacgttatcagctgggaagatctgcggaagctgggatcgtcgttagcccgcggcatagcacacctccattccgatcacacaccctgcggccggcctaaaatgcctatcgtgcatagggatcttaagtcatccaatattctcgtgaagaacgatctgacctgttgcctatgtgattttggactcagtctgcgccttgacccaacactgtccgtggacgacttagccaactccggtcaggtcggcacagccaggtacatggctcccgaagtactcgagagtagaatgaatctggaaaatgtggaatctttcaaacagaccgacgtgtattctatggcactggtgttatgggagatgacctcccggtgtaacgctgtgggggaagttaaggattacgaaccaccattcggatctaaagtgcgggagcatccttgcgttgagtcaatgaaggacaacgtactgcgggaccgtgggagaccagaaataccttctttctggctaaaccaccagggcatccagatggtgtgcgagacactcaccgaatgttgggaccacgatccagaagcccggctgacggcccagtgcgtggcagaacgattctctgaactggagcacttagaccggctcagtgggagaagctgttccgaggaaaagatccctgaagatggttccctgaacacaacaaaatag

SEQ ID NO: 28058 - DNA, 1779 bp, Artificial Sequence
  derived and/or modified sequence
atgggccggggcctgctgcggggcctgtggcccctgcacatcgtgctgtggacccgcatcgccagcaccatcccccctcatgtgcagaagagtgatgtggagatggaggcccagaaggatgagatcatctgccccagctgcaacagaacagcccaccccctgcggcacatcaacaatgacatgattgtgacagacaacaatggagctgtgaagttcccccagctgtgcaagttctgtgatgtgcgcttcagcacctgtgacaaccagaagagctgcatgagcaactgcagcatcaccagcatctgtgagaagccccaggaggtgtgtgtggccgtgtggaggaagaatgatgagaacatcaccctggagaccgtgtgccacgaccccaagctgccctaccatgacttcatcctggaggatgctgccagccccaagtgcatcatgaaggagaagaagaagccaggagagaccttcttcatgtgcagctgcagcagtgatgaatgtaatgacaacatcatcttcagcgaggagtacaacaccagcaacccagacctgctgctggtgatcttccaggtgacaggcatcagcctgctgccccccctgggcgtggccatcagcgtcatcatcatcttctactgctacagagtgaaccggcagcagaagctgagcagcacctgggagaccgggaagaccaggaagctgatggagttcagcgagcactgtgccatcatcctggaggatgacagaagtgacatcagcagcacctgtgccaacaacatcaaccacaacacagagctgctgcccatcgagctggacaccctggtgggcaagggccgctttgctgaggtgtacaaggccaagctgaagcagaacaccagcgagcagtttgagaccgtggccgtgaagatcttcccctatgaggagtatgcctcctggaagacagagaaggacatcttcagtgacatcaacctgaagcatgagaacatcctgcagttcctgacagctgaggagaggaagacagagctgggcaagcagtactggctgatcacagccttccacgccaagggcaacctgcaggagtacctgaccaggcatgtgatctcctgggaggacctgaggaagctgggcagcagcctggcccggggcatcgcccacctgcacagcgaccacaccccctgtggccggcccaagatgcccatcgtgcaccgggacctgaagagcagcaacatcctggtgaagaatgacctgacctgctgcctgtgtgactttggcctgagcctgcggctggaccccaccctgtctgtggatgacctggccaacagcggccaggtgggcacagcccgctacatggcccctgaggtgctggagagcaggatgaacctggagaatgtggagagcttcaagcagacagatgtgtacagcatggccctggtgctgtgggagatgaccagccgctgcaatgctgtgggggaggtgaaggactatgagcccccatttggcagcaaggtgcgggagcacccctgtgtggagagcatgaaggacaacgtgctgcgggaccggggccggcctgagatccccagcttctggctgaaccaccagggcatccagatggtgtgtgagaccctgacagagtgctgggaccatgaccctgaggcccggctgacagcccagtgtgtggccgagcgcttcagcgagctggagcacctggaccggctgagcggccgcagctgcagcgaggagaagatcccagaagatggcagcctgaacaccaccaagtag

SEQ ID NO: 28059 - DNA, 1779 bp, Artificial Sequence
  derived and/or modified sequence
atgggccggggcctgctgcggggcctgtggcccctgcacatcgtgctgtggacccgaatcgcaagcacaatcccacctcacgtacagaaaagtgacgttgagatggaagcacagaaggatgagatcatttgccctagctgtaataggacagcacacccactcaggcatataaacaatgacatgatcgtgacggataacaatggcgcagtgaagtttccccagctgtgcaagttctgtgatgtacgattctctacctgtgataatcaaaagagttgcatgtctaattgcagtattaccagtatctgcgaaaagccccaggaagtgtgtgtcgccgtatggaggaagaacgacgagaatatcactcttgagaccgtgtgccacgaccccaaactgccttatcacgactttattttggaagacgccgcaagccccaagtgtattatgaaggagaaaaagaagccaggagagacatttttcatgtgcagctgttcatcagatgaatgcaacgacaacatcatatttagtgaggagtacaacacaagtaatccagatctcttgctggtgatctttcaagtcacaggcatcagtctccttcctccactgggcgtggccatcagcgttattattattttttattgttatagggttaatagacaacaaaagctctcatccacttgggaaacaggcaagacgcggaaactaatggagttcagcgagcactgtgcgatcattcttgaggatgaccgatctgatatttccagcacatgcgccaataatatcaatcataatactgaattgttaccgatcgagctcgatacactcgttggcaaggggcggtttgccgaagtttacaaggccaaactgaagcagaacaccagtgaacagttcgaaaccgtagccgtaaagatattcccttacgaggaatacgcctcctggaagactgaaaaggatatcttttcagacattaacctgaagcacgaaaatattctacagtttctgaccgccgaggaacggaagactgaattgggcaaacagtattggctgattaccgcttttcacgcaaaaggcaatttacaggaatatttaacacgccacgtgatctcgtgggaggatctgcgcaaactgggatcatctctcgcccgcggcatcgctcaccttcattccgatcatacgccatgtggaaggcccaaaatgcccatcgtgcacagagatctcaagtcttctaatattttggtcaaaaatgacctgacctgctgcctctgtgattttggcctatccctgcggctggacccaaccctttctgtcgatgaccttgccaatagcggacaggtcggaaccgctcgctacatggcacctgaggtgctggagtcacgcatgaacctggaaaacgtcgagtcgtttaaacaaacagatgtgtatagcatggccctagtgctgtgggagatgaccagtcgctgcaacgccgtgggcgaagtgaaagactatgaaccaccattcgggtctaaagtgcgggaacatccttgtgtggagagtatgaaagataacgtacttagagatcgtggccgacctgaaattccttccttctggctgaaccatcagggcattcaaatggtttgcgaaactctcacagaatgctgggaccatgaccccgaagccaggctgaccgcccagtgtgtagcggagaggttctctgaactggaacatctggaccggctctcggggcgctcttgctcagaagagaagatacctgaggatggctcactcaacacgacaaagtag

SEQ ID NO: 28060 - DNA, 1779 bp, Artificial Sequence
  derived and/or modified sequence
atgggtaggggcctgctcagaggactgtggccattgcacatcgtcctgtggacaagaattgcctcaactatccctcctcacgtccaaaagtcagatgtcgaaatggaggcccaaaaagacgagattatttgtccgagctgcaatcgtacagcgcaccccctgcgacacattaacaacgacatgattgttaccgacaacaatggagccgtcaaattcccgcagttgtgtaaattttgcgatgttcggttctctacctgtgacaatcagaagagttgcatgagtaactgttcaataacatccatttgcgagaaaccccaggaagtctgtgttgcagtctggagaaagaacgacgagaacattacactcgaaaccgtctgtcacgatccaaaactcccatatcacgactttatcctggaggatgcagccagccccaagtgcataatgaaagaaaaaaagaaacccggagagacatttttcatgtgttcatgttctagcgacgagtgcaatgataacatcattttctcggaggaatacaacacgagcaaccctgatctcctgcttgttatcttccaggtcaccggtataagcctgctgccacctttaggtgtggcaatttcagtgatcatcatcttctattgttatcgagttaaccgacaacagaaactttcttcaacatgggaaactggcaagaccagaaagttgatggagttttctgagcattgcgctataattcttgaagatgacagaagcgacatcagctctacttgcgccaataacataaaccacaatactgaactcctgcccatagaattagacaccctggttgggaaagggaggtttgccgaggtttataaggccaagctgaagcagaatacttctgagcaattcgagaccgtggccgttaaaattttcccttacgaggaatacgccagctggaagacggagaaagacattttctctgacataaatctaaagcatgaaaacattcttcagttcctgacagccgaagaaaggaaaaccgagctggggaaacagtattggctgattactgcatttcatgctaaaggcaacttgcaggaatatctcacgaggcacgtgatcagctgggaagacttgcgaaaactggggagtagcctcgcgcgtggcatcgcccatctacactcggaccacacaccatgtggtcgcccaaagatgcctatagtccacagagaccttaaatcttctaatattcttgttaagaatgatcttacgtgctgtttgtgtgacttcggattgtctttaaggttagatccaacactctcagtcgatgacctggccaattctggccaggtgggtaccgcccgatacatggcacctgaagtgctggagtcacggatgaacttagagaatgtagaatcctttaagcagacggatgtttactccatggctctggtcctatgggagatgacatctaggtgcaatgccgtgggagaggtgaaggactacgagccaccatttggcagcaaggtcagggagcatccgtgcgtggagagcatgaaggacaacgtcttacgggaccgtggcaggcccgagatcccgtccttttggttgaaccatcagggaatacagatggtgtgtgagaccctaacagagtgctgggatcacgatccagaagcgcgtctgactgcccaatgcgtcgccgaacgcttttccgagttggagcatctggaccgactttccggacgctcgtgctctgaagagaagatacccgaggatgggtcgctgaacacgactaaatag

SEQ ID NO: 28061 - DNA, 4605 bp, Artificial Sequence
  derived and/or modified sequence
actcgcgcgcacggagcgacgacacccccgcgcgtgcacccgctcgggacaggagccggactcctgtgcagcttccctcggccgccgggggcctccccgcgcctcgccggcctccaggccccctcctggctggcgagcgggcgccacatctggcccgcacatctgcgctgccggcccggcgcggggtccggagagggcgcggcgcggaggcgcagccaggggtccgggaaggcgccgtccgctgcgctgggggctcggtctatgacgagcagcggggtctgccatgggtcgggggctgctcaggggcctgtggccgctgcacatcgtcctgtggacgcgtatcgccagcacgatcccaccgcacgttcagaagtcggatgtggaaatggaggcccagaaagatgaaatcatctgccccagctgtaataggactgcccatccactgagacatattaataacgacatgatagtcactgacaacaacggtgcagtcaagtttccacaactgtgtaaattttgtgatgtgagattttccacctgtgacaaccagaaatcctgcatgagcaactgcagcatcacctccatctgtgagaagccacaggaagtctgtgtggctgtatggagaaagaatgacgagaacataacactagagacagtttgccatgaccccaagctcccctaccatgactttattctggaagatgctgcttctccaaagtgcattatgaaggaaaaaaaaaagcctggtgagactttcttcatgtgttcctgtagctctgatgagtgcaatgacaacatcatcttctcagaagaatataacaccagcaatcctgacttgttgctagtcatatttcaagtgacaggcatcagcctcctgccaccactgggagttgccatatctgtcatcatcatcttctactgctaccgcgttaaccggcagcagaagctgagttcaacctgggaaaccggcaagacgcggaagctcatggagttcagcgagcactgtgccatcatcctggaagatgaccgctctgacatcagctccacgtgtgccaacaacatcaaccacaacacagagctgctgcccattgagctggacaccctggtggggaaaggtcgctttgctgaggtctataaggccaagctgaagcagaacacttcagagcagtttgagacagtggcagtcaagatctttccctatgaggagtatgcctcttggaagacagagaaggacatcttctcagacatcaatctgaagcatgagaacatactccagttcctgacggctgaggagcggaagacggagttggggaaacaatactggctgatcaccgccttccacgccaagggcaacctacaggagtacctgacgcggcatgtcatcagctgggaggacctgcgcaagctgggcagctccctcgcccgggggattgctcacctccacagtgatcacactccatgtgggaggcccaagatgcccatcgtgcacagggacctcaagagctccaatatcctcgtgaagaacgacctaacctgctgcctgtgtgactttgggctttccctgcgtctggaccctactctgtctgtggatgacctggctaacagtgggcaggtgggaactgcaagatacatggctccagaagtcctagaatccaggatgaatttggagaatgttgagtccttcaagcagaccgatgtctactccatggctctggtgctctgggaaatgacatctcgctgtaatgcagtgggagaagtaaaagattatgagcctccatttggttccaaggtgcgggagcacccctgtgtcgaaagcatgaaggacaacgtgttgagagatcgagggcgaccagaaattcccagcttctggctcaaccaccagggcatccagatggtgtgtgagacgttgactgagtgctgggaccacgacccagaggcccgtctcacagcccagtgtgtggcagaacgcttcagtgagctggagcatctggacaggctctcggggaggagctgctcggaggagaagattcctgaagacggctccctaaacactaccaaatagctcttctggggcaggctgggccatgtccaaagaggctgcccctctcaccaaagaacagaggcagcaggaagctgcccctgaactgatgcttcctggaaaaccaagggggtcactcccctccctgtaagctgtggggataagcagaaacaacagcagcagggagtgggtgacatagagcattctatgcctttgacattgtcataggataagctgtgttagcacttcctcaggaaatgagattgatttttacaatagccaataacatttgcactttattaatgcctgtatataaatatgaatagctatgttttatatatatatatatatatctatatatgtctatagctctatatatatagccataccttgaaaagagacaaggaaaaacatcaaatattcccaggaaattggttttattggagaactccagaaccaagcagagaaggaagggacccatgacagcattagcatttgacaatcacacatgcagtggttctctgactgtaaaacagtgaactttgcatgaggaaagaggctccatgtctcacagccagctatgaccacattgcacttgcttttgcaaaataatcattccctgcctagcacttctcttctggccatggaactaagtacagtggcactgtttgaggaccagtgttcccggggttcctgtgtgcccttatttctcctggacttttcatttaagctccaagccccaaatctggggggctagtttagaaactctccctcaacctagtttagaaactctaccccatctttaataccttgaatgttttgaaccccactttttaccttcatgggttgcagaaaaatcagaacagatgtccccatccatgcgattgccccaccatctactaatgaaaaattgttctttttttcatctttcccctgcacttatgttactattctctgctcccagccttcatccttttctaaaaaggagcaaattctcactctaggctttatcgtgtttactttttcattacacttgacttgattttctagttttctatacaaacaccaatgggttccatctttctgggctcctgattgctcaagcacagtttggcctgatgaagaggatttcaactacacaatactatcattgtcaggactatgacctcaggcactctaaacatatgttttgtttggtcagcacagcgtttcaaaaagtgaagccactttataaatatttggagattttgcaggaaaatctggatccccaggtaaggatagcagatggttttcagttatctccagtccacgttcacaaaatgtgaaggtgtggagacacttacaaagctgcctcacttctcactgtaaacattagctctttccactgcctacctggaccccagtctaggaattaaatctgcacctaaccaaggtcccttgtaagaaatgtccattcaagcagtcattctctgggtatataatatgattttgactaccttatctggtgttaagatttgaagttggccttttattggactaaaggggaactcctttaagggtctcagttagcccaagtttcttttgcttatatgttaatagttttaccctctgcattggagagaggagtgctttactccaagaagctttcctcatggttaccgttctctccatcatgccagccttctcaacctttgcagaaattactagagaggatttgaatgtgggacacaaaggtcccatttgcagttagaaaatttgtgtccacaaggacaagaacaaagtatgagctttaaaactccataggaaacttgttaatcaacaaagaagtgttaatgctgcaagtaatctcttttttaaaactttttgaagctacttattttcagccaaataggaatattagagagggactggtagtgagaatatcagctctgtttggatggtggaaggtctcattttattgagatttttaagatacatgcaaaggtttggaaatagaacctctaggcaccctcctcagtgtgggtgggctgagagttaaagacagtgtggctgcagtagcatagaggcgcctagaaattccacttgcaccgtagggcatgctgataccatcccaatagctgttgcccattgacctctagtggtgagtttctagaatactggtccattcatgagatattcaagattcaagagtattctcacttctgggttatcagcataaactggaatgtagtgtcagaggatactgtggcttgttttgtttatgtttttttttcttattcaagaaaaaagaccaaggaataacattctgtagttcctaaaaatactgacttttttcactactatacataaagggaaagttttattcttttatggaacacttcagctgtactcatgtattaaaataggaatgtgaatgctatatactctttttatatcaaaagtctcaagcacttatttttattctatgcattgtttgtcttttacataaataaaatgtttattagattgaataaagcaaaatactcaggtgagcatcctgcctcctgttcccattcctagtagctaaa

SEQ ID NO: 28062 - DNA, 2385 bp, Artificial Sequence
  derived and/or modified sequence
actcgcgcgcacggagcgacgacacccccgcgcgtgcacccgctcgggacaggagccggactcctgtgcagcttccctcggccgccgggggcctccccgcgcctcgccggcctccaggccccctcctggctggcgagcgggcgccacatctggcccgcacatctgcgctgccggcccggcgcggggtccggagagggcgcggcgcggaggcgcagccaggggtccgggaaggcgccgtccgctgcgctgggggctcggtctatgacgagcagcggggtctgccatgggtcgggggctgctcaggggcctgtggccgctgcacatcgtcctgtggacgcgtatcgccagcacgatcccaccgcacgttcagaagtcggatgtggaaatggaggcccagaaagatgaaatcatctgccccagctgtaataggactgcccatccactgagacatattaataacgacatgatagtcactgacaacaacggtgcagtcaagtttccacaactgtgtaaattttgtgatgtgagattttccacctgtgacaaccagaaatcctgcatgagcaactgcagcatcacctccatctgtgagaagccacaggaagtctgtgtggctgtatggagaaagaatgacgagaacataacactagagacagtttgccatgaccccaagctcccctaccatgactttattctggaagatgctgcttctccaaagtgcattatgaaggaaaaaaaaaagcctggtgagactttcttcatgtgttcctgtagctctgatgagtgcaatgacaacatcatcttctcagaaggtagatgtaaaatcagacatataggttcaaacaatcgattgcaaaggagcacttgtcaaaacactggctgggaatctgctcatgtgatgaagaccccagggtttagagaatataacaccagcaatcctgacttgttgctagtcatatttcaagtgacaggcatcagcctcctgccaccactgggagttgccatatctgtcatcatcatcttctactgctaccgcgttaaccggcagcagaagctgagttcaacctgggaaaccggcaagacgcggaagctcatggagttcagcgagcactgtgccatcatcctggaagatgaccgctctgacatcagctccacgtgtgccaacaacatcaaccacaacacagagctgctgcccattgagctggacaccctggtggggaaaggtcgctttgctgaggtctataaggccaagctgaagcagaacacttcagagcagtttgagacagtggcagtcaagatctttccctatgaggagtatgcctcttggaagacagagaaggacatcttctcagacatcaatctgaagcatgagaacatactccagttcctgacggctgaggagcggaagacggagttggggaaacaatactggctgatcaccgccttccacgccaagggcaacctacaggagtacctgacgcggcatgtcatcagctgggaggacctgcgcaagctgggcagctccctcgcccgggggattgctcacctccacagtgatcacactccatgtgggaggcccaagatgcccatcgtgcacagggacctcaagagctccaatatcctcgtgaagaacgacctaacctgctgcctgtgtgactttgggctttccctgcgtctggaccctactctgtctgtggatgacctggctaacagtgggcaggtgggaactgcaagatacatggctccagaagtcctagaatccaggatgaatttggagaatgttgagtccttcaagcagaccgatgtctactccatggctctggtgctctgggaaatgacatctcgctgtaatgcagtgggagaagtaaaagattatgagcctccatttggttccaaggtgcgggagcacccctgtgtcgaaagcatgaaggacaacgtgttgagagatcgagggcgaccagaaattcccagcttctggctcaaccaccagggcatccagatggtgtgtgagacgttgactgagtgctgggaccacgacccagaggcccgtctcacagcccagtgtgtggcagaacgcttcagtgagctggagcatctggacaggctctcggggaggagctgctcggaggagaagattcctgaagacggctccctaaacactaccaaatagctcttctggggcaggctgggccatgtccaaagaggctgcccctctcaccaaagaacagaggcagcaggaagctgcccctgaactgatgcttcctggaaaaccaagggggtcactcccctccctgtaagctgtggggataagcagaaacaacagcagcagggagtgggtgacatagagcattctatgcctttgacattgtcataggataagctgtg

SEQ ID NO: 28063 - protein, 267 aa, Artificial Sequence
  derived and/or modified sequence
MTRENVAHNALRQEGLVKGKDDTWKWGTSFQGSSSSVWETSHLHFRQLRYHETSGPQEALSRLRELCRRWLRPEARTKAQILELLVLEQFLSILPGEIRTWVQLHHPGSGEEAVALVEELQKDLDGPAIQVPVLVKDQDTLQKVVSAPGTTLPPVLPGSHIAAEICPHPPTDLVAFNLQDPQHDSPAPEASALSQEENPRNQLMALMLLTAQPQELVMFEEVSVCFTSEEWACLGPIQRALYWDVMLENYGNVTSLGYRKYRRQRNK

SEQ ID NO: 28064 - DNA, 804 bp, Artificial Sequence
  derived and/or modified sequence
atgaccagagagaacgtggcccacaacgccctgagacaggagggcctggtgaagggcaaggacgacacctggaagtggggcaccagcttccagggcagcagcagcagcgtgtgggagaccagccacctgcacttcagacagctgagataccacgagaccagcggcccccaggaggccctgagcagactgagagagctgtgcagaagatggctgagacccgaggccagaaccaaggcccagatcctggagctgctggtgctggagcagttcctgagcatcctgcccggcgagatcagaacctgggtgcagctgcaccaccccggcagcggcgaggaggccgtggccctggtggaggagctgcagaaggacctggacggccccgccatccaggtgcccgtgctggtgaaggaccaggacaccctgcagaaggtggtgagcgcccccggcaccaccctgccccccgtgctgcccggcagccacatcgccgccgagatctgcccccacccccccaccgacctggtggccttcaacctgcaggacccccagcacgacagccccgcccccgaggccagcgccctgagccaggaggagaaccccagaaaccagctgatggccctgatgctgctgaccgcccagccccaggagctggtgatgttcgaggaggtgagcgtgtgcttcaccagcgaggagtgggcctgcctgggccccatccagagagccctgtactgggacgtgatgctggagaactacggcaacgtgaccagcctgggctacagaaagtacagaagacagagaaacaagtag

SEQ ID NO: 28065 - DNA, 240 bp, Artificial Sequence
  derived and/or modified sequence
atgaccagagagaacgtggcccacaacgccctgagacaggagggcctggtgaagggcaaggacgacacctggaagtggggcaccagcttccagggcagcagcagcagcgtgtgggagaccagccacctgcacttcagacagctgagataccacgagaccagcggcccccaggaggccctgagcagactgagagagctgtgcagaagatggctgagacccgaggccagaaccaaggcctag

SEQ ID NO: 28066 - DNA, 804 bp, Artificial Sequence
  derived and/or modified sequence
atgactcgggaaaacgtagctcataatgccctgagacaggagggccttgttaagggcaaagatgatacgtggaagtggggtacatcattccagggctcctccagctccgtgtgggaaacttcccacctgcactttcgccagctccgctaccacgaaactagcggaccacaggaagccttatctcgattgcgcgagctatgtcggcggtggctcaggccagaggccagaactaaagctcagatcttggagttgctggttcttgagcaattcctgtccatcctgccaggagagatacgcacttgggtgcagctgcatcatcccggaagtggcgaagaagctgtcgccctagtggaggaacttcagaaggatttggacggtcccgctattcaggtgcctgttctagtcaaagaccaggatacactccagaaggtcgtgtctgcacccggaaccacacttcccccggtgctgccgggatctcacatcgcagcggaaatttgtccacatccccctacagatctcgtggcgttcaatctccaggacccgcagcatgactcacctgcccctgaggcaagcgcattgagccaggaggaaaacccgagaaatcagctaatggcactcatgttgctgactgcacagccccaggaattggtcatgttcgaagaagtgtctgtctgttttacatctgaggagtgggcatgcttagggcccatccagagggccctgtactgggatgtcatgttggagaactatggaaacgtaacgtccctggggtatcgtaaatatagacgccaacggaacaaatag

SEQ ID NO: 28067 - DNA, 804 bp, Artificial Sequence
  derived and/or modified sequence
atgactagagagaacgtcgcccacaacgccttgcgtcaggagggactggtcaagggcaaagacgatacctggaagtggggcacatcattccagggctcatcttcctctgtttgggagacttcccatctgcatttcagacaactgagatatcatgagacttccggccctcaggaggccctaagccgattacgcgagctgtgtaggcgctggcttagaccggaagcgagaaccaaggcacaaatcctggagttactggttcttgaacaattcctgagcatccttcccggcgagattcggacctgggtgcagctgcaccacccaggctcaggagaggaggccgtcgctctcgtcgaagaactccaaaaagatcttgatgggcctgccatccaagtgcccgtcctggttaaagatcaggacaccctccaaaaagttgtctcagcacccggaacaactctccctcctgttttgcccgggagtcatatcgcggcagagatctgtcctcacccccccaccgacctcgtagcgtttaacttgcaagatccacagcatgatagcccggctcctgaggccagtgcactttctcaggaggagaatcccaggaaccaactaatggctctcatgctcctcacggcacagccacaggagcttgtaatgttcgaagaggtatctgtgtgctttaccagtgaagagtgggcttgtctgggcccaatccagcgggctctgtattgggatgtcatgctggagaattatggcaatgtcacgtcgctggggtaccgcaaatacaggcggcagcgcaataaatag

SEQ ID NO: 28068 - DNA, 240 bp, Artificial Sequence
  derived and/or modified sequence
atgacaagagagaatgtcgcgcataatgccttgcggcaggaaggacttgtgaagggcaaggacgatacctggaaatgggggaccagttttcagggttcctcctcgagcgtttgggagacatcgcatttgcattttagacaactgcgataccatgaaacatctggcccgcaggaggcactgtccaggctgagggagttatgccgacgctggcttaggccagaggcacgtactaaggcatag

SEQ ID NO: 28069 - DNA, 804 bp, Artificial Sequence
  derived and/or modified sequence
atgacccgggagaatgtggcccacaatgccctgcggcaggagggcctggtgaagggcaaggatgacacctggaagtggggcaccagcttccagggcagcagcagctctgtgtgggagaccagccacctgcacttccggcagctgcgctaccacgagaccagcggcccccaggaggccctgagccggctgcgggagctgtgccgccgctggctgcggcctgaggcccggaccaaggcccagatcctggagctgctggtgctggagcagttcctgagcatcctgcctggagagatccgcacctgggtgcagctgcaccaccctggcagcggggaggaggccgtggccctggtggaggagctgcagaaggacctggatggccctgccatccaggtgcctgtgctggtgaaggaccaggacaccctgcagaaggtggtgtctgcccctggcaccaccctgccccctgtgctgcccggcagccacatcgctgctgagatctgcccccaccccccaacagacctggtggccttcaacctgcaggacccccagcacgacagccctgcccctgaggccagcgccctgagccaggaggagaaccccaggaaccagctgatggccctgatgctgctgacagcccagccccaggagctggtgatgtttgaggaggtgtctgtgtgcttcaccagcgaggagtgggcctgcctgggccccatccagagggccctgtactgggatgtgatgctggagaactatggaaatgtgaccagcctgggctacaggaagtaccgccggcagaggaacaagtag

SEQ ID NO: 28070 - DNA, 240 bp, Artificial Sequence
  derived and/or modified sequence
atgacccgggagaatgtggcccacaatgccctgcggcaggagggcctggtgaagggcaaggatgacacctggaagtggggcaccagcttccagggcagcagcagctctgtgtgggagaccagccacctgcacttccggcagctgcgctaccacgagaccagcggcccccaggaggccctgagccggctgcgggagctgtgccgccgctggctgcggcctgaggcccggaccaaggcctag

SEQ ID NO: 28071 - DNA, 804 bp, Artificial Sequence
  derived and/or modified sequence
atgacccgggagaacgtggcccacaacgccctgcggcaggagggccttgtgaaggggaaagacgatacctggaagtggggaacttcattccaagggagctctagcagcgtatgggaaacctcccacctgcattttaggcagttacgttaccacgagacgagcggaccccaggaggccctttccagacttcgagaactatgcagaagatggttacggcccgaagcgcgaacaaaagcccaaattctggaactgcttgtgctggagcaattcttatcaattctcccaggagagataaggacctgggtgcagctccatcaccctggatctggcgaagaggccgtagccctggtggaagagctccagaaagatcttgacggacccgccatccaggtgccagttttggtgaaagaccaggataccctacagaaggtagtgtctgctcctgggaccactctccctcctgtcctccccggttctcacatagctgcagagatatgcccccatcctccgacagacttggtcgcttttaatctgcaggacccccaacatgattctcccgcccctgaggctagcgccttgagtcaagaagagaacccacggaatcaactcatggcactgatgttgctgacagcccaaccccaggaacttgtaatgttcgaggaagtctctgtttgttttacatctgaggaatgggcttgtctgggtcctatccagagagccttgtactgggatgtgatgttggagaattacggcaacgtcacgagcctcggataccggaaataccgacgccaaaggaacaagtag

SEQ ID NO: 28072 - DNA, 804 bp, Artificial Sequence
  derived and/or modified sequence
atgacccgggagaacgtggcccacaacgccctgcggcaggagggcctcgttaaagggaaggatgatacctggaagtgggggactagtttccagggttccagctcttccgtgtgggaaacgagccatctgcacttccgccagctacgttatcatgagacttctggcccccaggaagctctaagccggctccgtgaactgtgtcggaggtggctgcgtcctgaagcccgtaccaaagcacagattcttgagctgctagtgttagagcaattcctcagcattcttccaggcgaaatacgcacttgggtacagttgcaccatccaggcagcggcgaggaagctgtcgccctggtcgaagagcttcagaaggacctggatggccctgctattcaagtcccagtcttagtaaaggatcaagatacactccagaaggttgtcagtgcccctggtacaaccctgcctcccgtacttcccggaagccacatagcggcggagatatgcccccatccccctacagaccttgttgccttcaacctccaagatcctcagcatgacagtccagccccggaggcatctgctctctcacaggaggaaaaccccagaaatcaacttatggcactaatgctgcttacagcgcagccccaggaactggtcatgttcgaggaggtaagcgtgtgctttacgtccgaagaatgggcttgtctgggcccaatccagagggcgttgtactgggatgttatgttagaaaattatggcaatgttaccagtctaggctacagaaagtataggcgacagaggaacaaatag

SEQ ID NO: 28073 - DNA, 240 bp, Artificial Sequence
  derived and/or modified sequence
atgacccgggagaacgtggcccacaacgccctgcggcaggagggcctggtaaaaggcaaagacgacacctggaaatggggaacctcatttcaaggcagtagctcctccgtctgggagacctctcacctgcactttaggcagctccggtaccatgaaacctcaggaccccaggaggccctgagtaggttaagagagctttgcaggcgctggttaaggccagaagcccgcaccaaggcctag

SEQ ID NO: 28074 - DNA, 804 bp, Artificial Sequence
  derived and/or modified sequence
atgacccgggagaacgtggcgcacaacgcacttcggcaagagggccttgttaagggcaaagacgatacgtggaagtggggcaccagctttcaaggctcctccagtagcgtttgggagaccagccacctccactttagacagctgaggtatcatgagaccagtggtcctcaggaggcactctcccggctccgtgagctttgtcgccgttggctgcgtcccgaggcccgtacaaaggcgcagatcctggagctgctcgtcctcgaacagtttctgtctatcttgccaggcgagattagaacgtgggtgcagctccatcacccaggaagtggggaggaagcagtcgccctggtagaagaactgcagaaggacttagatgggccagcaattcaggtccctgtcctggtgaaagatcaggacacacttcagaaagtcgtgagtgctcccggaactaccctgccacctgtgctccctgggtcccatattgcggcagagatctgcccccatccccctactgatctcgtagcgttcaacctacaggatccacagcacgactcgccagccccagaggcttcggctctgagccaagaagagaacccccgaaaccagctaatggccctgatgctgttaactgctcagcctcaagaacttgttatgttcgaagaggtgtccgtgtgctttacatccgaagaatgggcgtgtctgggacctatccagagagcattgtattgggacgttatgttggaaaattacggcaacgtgaccagcctgggctacagaaaatatcgaaggcaaaggaacaaatag

SEQ ID NO: 28075 - DNA, 804 bp, Artificial Sequence
  derived and/or modified sequence
atgactcgcgagaatgtagctcacaacgcactccgccaagaggggctggtgaaaggaaaggacgacacgtggaagtgggggacttcttttcagggctcttccagcagtgtctgggaaacatcccatcttcactttagacaactgcggtaccatgagaccagcgggccacaggaggccctgtctagattacgggaactttgtagaaggtggcttagaccggaagccaggactaaggcgcaaatcctagaactcttggtgctcgagcagtttcttagcatactccctggcgagatcaggacctgggtgcagctacatcatcccggatcaggggaagaggccgtggcactggttgaagaactacagaaggatctggacggcccagcaatccaggttccagttctcgtcaaagaccaagataccctccagaaggttgtgtccgccccaggcactacgctacctcccgtgctccccggaagtcacattgcagctgaaatatgcccccacccccctacagacctggtcgcgttcaatctgcaggaccctcagcatgattctccggcacccgaagcttctgcactctctcaggaggaaaatccgaggaaccaattgatggcactcatgctgcttaccgctcaaccacaggaacttgtcatgttcgaggaggtgagtgtttgtttcacgagcgaggaatgggcctgcctgggcccaattcaaagagctctgtactgggacgtgatgttggaaaactatggcaatgtgacgtccctcgggtacaggaagtatcgcagacagcggaataaatag

SEQ ID NO: 28076 - DNA, 240 bp, Artificial Sequence
  derived and/or modified sequence
atgacaagggaaaatgtggcccacaacgccctccggcaggagggactggtgaaaggcaaagacgatacttggaagtggggcacctcattccagggaagctccagctctgtatgggagaccagccacttgcacttccgacagctacgatatcacgaaacctccggaccacaggaagccctgagccgtctgcgggaactgtgcagaaggtggttgagaccagaagcgaggaccaaggcctag

SEQ ID NO: 28077 - DNA, 1989 bp, Artificial Sequence
  derived and/or modified sequence
agtattctcggctcggccattattctgtgcctcggctgccggaagggctcgttcctgtgtcatctcctagcggcctggcgccgaggcggcggtacgcaaggctggagccgcagcgggagcccccgatgatactctccaagctgtaaggaagaagtcaaggattaaggagacctggactggagaggagcctttttcaaaaaacaacaatgacaagagaaaatgtagcccacaatgctctgagacaagagggccttgtgaaggggaaggatgatacctggaaatggggaaccagcttccaaggaagtagctcctctgtttgggagacctcccacctacactttagacaattacgttaccatgagacatctggaccccaggaagccctgagccggctcagggaactctgtcgccggtggctgagaccagaagcacgcaccaaggcacagatcctggagctgctggtgctggagcagtttctgagcatcctgcctggggagattcggacctgggtacagctccatcaccctggaagtggcgaggaggctgtggccctggtagaggagctgcagaaagaccttgatggaccagcaatacaagttccagtccttgtcaaggatcaggacactctccagaaggtggtgagtgccccaggaacaacacttcctcctgtacttcctggcagccacatagcagctgaaatttgcccgcatcctcctactgacctagtggcattcaacctccaggatcctcagcatgattctcctgcccctgaagcttctgccctttcccaggaagagaacccaagaaatcaattaatggcacttatgctcctaacagcccagccccaggagttggtgatgttcgaggaggtgtcagtatgcttcacttcagaggaatgggcatgtctgggcccaatccagagggccttgtactgggatgtgatgctggagaattatggaaatgtgacctccctaggttacaggaaatacaggaggcagaggaacaaataaaagacaccacgagaaacagacacatccagaacgtggaatattgcataagaaagctgccctggattcttcaaaatattattatgatgaaaaagagaggggagtgaaaattgttcaagctgtcttgagtctgctgtgagtttattataccattctctgcttttgtgtatgtatgaaaatttcgatatgaaaggtataaaacatggatgaggaggcttgtttttaaaagataatactagagagccgttaggtactaagaaccagaaatagactcacataaatggccaattgatttttgacaggggcaaaagcaattcaatggaggagggatcgccttttcagcaaatactgttggagtaattggatatccataggcagtaaaccaacaacttcaggacctaggactgagctaagaaggctcagatgactcaaaagcatgctccttagaaggaaaaaaaatgttaaattggacttcatcaaaattaagataatttaccctgtaagagacctttttacaaagatgatattacaggttgggaaaaaatatttgcaaatcatatccaacaagggatttgtatgtaaactacataaagaactttccaaatttaacagtaataagtaaatacaattagaaaataagcaaaagacagacatttcactgaagtatagatagcaaataagcaaatgaaaagatgttcaacatcattaggcatgagggaaatgcagagtaaaatcgtgagatatcacctatcagaatagcttaactttttttttttaatggtggtaactgctggcaaggatgaagagaaacaggatctcatacattgctgggaatgtaaaatggtacagccactctggaatataatttggcagtttcttgtaaaaccacacatgtatatgtcatgcttcaggaattgcacttctgagcatttatcccagagaaatgaaaacttgcgttcacacaaaaacctgtatacgaatg

SEQ ID NO: 28078 - DNA, 2935 bp, Artificial Sequence
  derived and/or modified sequence
ctcggctgccggaagggctcgttcctgtgtcatctcctagcggcctggcgccgaggcggcggtacgcaaggctggagccgcagcgggagcccccggtcttgtagatgatactctccaagctgtaaggaagaagtcaaggattaaggagacctggactggagaggagcctttttcaaaaaacaacaatgacaagagaaaatgtagcccacaatgctctgagacaagagggccttgtgaaggggaaggatgatacctggaaatggggaaccagcttccaaggaagtagctcctctgtttgggagacctcccacctacactttagacaattacgttaccatgagacatctggaccccaggaagccctgagccggctcagggaactctgtcgccggtggctgagaccagaagcacgcaccaaggcacagatcctggagctgctggtgctggagcagtttctgagcatcctgcctggggagattcggacctgggtacagctccatcaccctggaagtggcgaggaggctgtggccctggtagaggagctgcagaaagaccttgatggaccagcaatacaagttccagtccttgtcaaggatcaggacactctccagaaggtggtgagtgccccaggaacaacacttcctcctgtacttcctggcagccacatagcagctgaaatttgcccgcatcctcctactgacctagtggcattcaacctccaggatcctcagcatgattctcctgcccctgaagcttctgccctttcccaggaagagaacccaagaaatcaattaatggcacttatgctcctaacagcccagccccaggagttggtgatgttcgaggaggtgtcagtatgcttcacttcagaggaatgggcatgtctgggcccaatccagagggccttgtactgggatgtgatgctggagaattatggaaatgtgacctccctaggttacaggaaatacaggaggcagaggaacaaataaaagacaccacgagaaacagacacatccagaacgtggaatattgcataagaaagctgccctggattcttcaaaatattattatgatgaaaaagagaggggagtgaaaattgttcaagctgtcttgagtctgctgtgagtttattataccattctctgcttttgtgtatgtatgaaaatttcgatatgaaaggtataaaacatggatgaggaggcttgtttttaaaagataatactagagagccgttaggtactaagaaccagaaatagactcacataaatggccaattgatttttgacaggggcaaaagcaattcaatggaggagggatcgccttttcagcaaatactgttggagtaattggatatccataggcagtaaaccaacaacttcaggacctaggactgagctaagaaggctcagatgactcaaaagcatgctccttagaaggaaaaaaaatgttaaattggacttcatcaaaattaagataatttaccctgtaagagacctttttacaaagatgatattacaggttgggaaaaaatatttgcaaatcatatccaacaagggatttgtatgtaaactacataaagaactttccaaatttaacagtaataagtaaatacaattagaaaataagcaaaagacagacatttcactgaagtatagatagcaaataagcaaatgaaaagatgttcaacatcattaggcatgagggaaatgcagagtaaaatcgtgagatatcacctatcagaatagcttaactttttttttttaatggtggtaactgctggcaaggatgaagagaaacaggatctcatacattgctgggaatgtaaaatggtacagccactctggaatataatttggcagtttcttgtaaaaccacacatgtatatgtcatgcttcaggaattgcacttctgagcatttatcccagagaaatgaaaacttgcgttcacacaaaaacctgtatacgaatgttcatagcagctttatttgtaatggtcgaaacctgtaggcaacccatatatccttccttaggtggttaaaacaaattgtggtttatgtattaccatggaatacttgttactctgcaataaaattgacttattgatatccataacaactcaaataaatttcaagggaattaatgctgagtgaaaataatcacaaaaggccatattctgtatgaaaatattcatataacattctcaaaatgataaaactatagagatgaaaaatggattaatggttgccaaaggttagggatggtgggaggaaaaatggggagagggttggatggaactattaaaaggtagcaccagaaaggtctttgtggtgatggaacacttgtgtatcttgattgcagtggtggttacacaaatctataggtgctatacctatacacacatactgtaccaatgttgatttcctttttcattttatgtaagatgtaaccatgaggggaaagtgggtgaagggtgctatctttgcaacttcctgtgattctatcatttcaaaataaaaagtaaaaaccaacaatggcaacgaaaacccaaaactaaagagctgtaaccaactaaagtgtgtgaaactgatttgaaaaaaagttataaaatacatgttttaggacagttgggaaatttgaatatgactggttattagatggtattagggaatttttgttgattttcttacctgtgacggtggtggtagtttgaagaatattcttaatcttaagggatgcatgttgaagtatttggaatgaagtgttctgatgtttacaactttcaaaaaaatgattttaaatatgtattgagagatcaggcaaacatagcaaaatgttcattgttgagtccacatggaaaatacgggtattcaatgtgccatactttcaactcttctgtactctgatattttcaaaataaaacatttgaggggaaatta

SEQ ID NO: 28079 - DNA, 546 bp, Artificial Sequence
  derived and/or modified sequence
acagagatgtggaaacctcacgaagcctagaagggccggagggacaggctgggagttagctgggagttgctgacgcagttccttctgcgctttgttcaagatgtgggtctggcgctttcgtgactcaagaccctcttaggaacttcttcactgaactcaaggaggagatcaggcaagatctgtgctgtgcagatcctttggattgaggctgctgtgcacaggaatatggatgatactctccaagctgtaaggaagaagtcaaggattaaggagacctggactggagaggagcctttttcaaaaaacaacaatgacaagagaaaatgtagcccacaatgctctgagacaagagggccttgtgaaggggaaggatgatacctggaaatggggaaccagcttccaaggaagtagctcctctgtttgggagacctcccacctacactttagacaattacgttaccatgagacatctggaccccaggaagccctgagccggctcagggaactctgtcgccggtggctgagaccagaagcacgcaccaaggc

SEQ ID NO: 28080 - protein, 1147 aa, Artificial Sequence
  derived and/or modified sequence
MENNRDKVLSPVDSGNKLVAEGNLYSDKIKEKVQLIEDRHRKNNEKAQEASVLLRDNLELQNFLQNCQELTLWINDKLLTSQDVSYDEARNLHNKWLKHQAFVAELASHEGWLENIDAEGKQLMDEKPQFTALVSQKLEALHRLWDELQATTKEKTQHLSAARSSDLRLQTHADLNKWISAMEDQLRSDDPGKDLTSVNRMLAKLKRVEDQVNVRKEELGELFAQVPSMGEEGGDADLSIEKRFLDLLEPLGRRKKQLESSRAKLQISRDLEDETLWVEERLPLAQSADYGTNLQTVQLFMKKNQTLQNEILGHTPRVEDVLQRGQQLVEAAEIDCQDLEERLGHLQSSWDRLREAAAGRLQRLRDANEAQQYYLDADEAEAWIGEQELYVISDEIPKDEEGAIVMLKRHLRQQRAVEDYGRNIKQLASRAQGLLSAGHPEGEQIIRLQGQVDKHYAGLKDVAEERKRKLENMYHLFQLKRETDDLEQWISEKELVASSPEMGQDFDHVTLLRDKFRDFARETGAIGQERVDNVNAFIERLIDAGHSEAATIAEWKDGLNEMWADLLELIDTRMQLLAASYDLHRYFYTGAEILGLIDEKHRELPEDVGLDASTAESFHRVHTAFERELHLLGVQVQQFQDVATRLQTAYAGEKAEAIQNKEQEVSAAWQALLDACAGRRTQLVDTADKFRFFSMARDLLSWMESIIRQIETQERPRDVSSVELLMKYHQGINAEIETRSKNFSACLELGESLLQRQHQASEEIREKLQQVMSRRKEMNEKWEARWERLRMLLEVCQFSRDASVAEAWLIAQEPYLASGDFGHTVDSVEKLIKRHEAFEKSTASWAERFAALEKPTTLELKERQIAERPAEETGPQEEEGETAGEAPVSHHAATERTSPGEEEGTWPQNLQQPPPPGQHKDGQKSTGDERPTTEPLFKVLDTPLSEGDEPATLPAPRDHGQSVQMEGYLGRKHDLEGPNKKASNSKGEEGEERRETEEEDEEEEETESVAVEMQQHASHVSWNNLYCVLRNSELTFYKDAKNLALGMPYHGEEPLALRHAICEIAANYKKKKHVFKLRLSNGSEWLFHGKDEEEMLSWLQGVSTAINESQSIRVKAQSLPLPSLSGPDASLGKKDKEKRFSFFPKKK

SEQ ID NO: 28081 - protein, 2328 aa, Artificial Sequence
  derived and/or modified sequence
MTSATEFENVGNQPPYSRINARWDAPDDELDNDNSSARLFERSRIKALADEREVVQKKTFTKWVNSHLARVSCRITDLYKDLRDGRMLIKLLEVLSGEMLPKPTKGKMRIHCLENVDKALQFLKEQRVHLENMGSHDIVDGNHRLVLGLIWTIILRFQIQDIVVQTQEGRETRSAKDALLLWCQMKTAGYPHVNVTNFTSSWKDGLAFNALIHKHRPDLIDFDKLKDSNARHNLEHAFNVAERQLGIIPLLDPEDVFTENPDEKSIITYVVAFYHYFSKMKVLAVEGKRVGKVIDHAIETEKMIEKYSGLASDLLTWIEQTITVLNSRKFANSLTGVQQQLQAFSTYRTVEKPPKFQEKGNLEVLLFTIQSRMRANNQKVYTPHDGKLVSDINRAWESLEEAEYRRELALRNELIRQEKLEQLARRFDRKAAMRETWLSENQRLVAQDNFGYDLAAVEAAKKKHEAIETDTAAYEERVRALEDLAQELEKENYHDQKRITARKDNILRLWSYLQELLQSRRQRLETTLALQKLFQDMLHSIDWMDEIKAHLLSAEFGKHLLEVEDLLQKHKLMEADIAIQGDKVKAITAATLKFTEGKGYQPCDPQVIQDRISHLEQCFEELSNMAAGRKAQLEQSKRLWKFFWEMDEAESWIKEKEQIYSSLDYGKDLTSVLILQRKHKAFEDELRGLDAHLEQIFQEAHGMVARKQFGHPQIEARIKEVSAQWDQLKDLAAFCKKNLQDAENFFQFQGDADDLKAWLQDAHRLLSGEDVGQDEGATRALGKKHKDFLEELEESRGVMEHLEQQAQGFPEEFRDSPDVTHRLQALRELYQQVVAQADLRQQRLQEALDLYTVFGETDACELWMGEKEKWLAEMEMPDTLEDLEVVQHRFDILDQEMKTLMTQIDGVNLAANSLVESGHPRSREVKQYQDHLNTRWQAFQTLVSERREAVDSALRVHNYCVDCEETSKWITDKTKVVESTKDLGRDLAGIIAIQRKLSGLERDVAAIQARVDALERESQQLMDSHPEQKEDIGQRQKHLEELWQGLQQSLQGQEDLLGEVSQLQAFLQDLDDFQAWLSITQKAVASEDMPESLPEAEQLLQQHAGIKDEIDGHQDSYQRVKESGEKVIQGQTDPEYLLLGQRLEGLDTGWNALGRMWESRSHTLAQCLGFQEFQKDAKQAEAILSNQEYTLAHLEPPDSLEAAEAGIRKFEDFLGSMENNRDKVLSPVDSGNKLVAEGNLYSDKIKEKVQLIEDRHRKNNEKAQEASVLLRDNLELQNFLQNCQELTLWINDKLLTSQDVSYDEARNLHNKWLKHQAFVAELASHEGWLENIDAEGKQLMDEKPQFTALVSQKLEALHRLWDELQATTKEKTQHLSAARSSDLRLQTHADLNKWISAMEDQLRSDDPGKDLTSVNRMLAKLKRVEDQVNVRKEELGELFAQVPSMGEEGGDADLSIEKRFLDLLEPLGRRKKQLESSRAKLQISRDLEDETLWVEERLPLAQSADYGTNLQTVQLFMKKNQTLQNEILGHTPRVEDVLQRGQQLVEAAEIDCQDLEERLGHLQSSWDRLREAAAGRLQRLRDANEAQQYYLDADEAEAWIGEQELYVISDEIPKDEEGAIVMLKRHLRQQRAVEDYGRNIKQLASRAQGLLSAGHPEGEQIIRLQGQVDKHYAGLKDVAEERKRKLENMYHLFQLKRETDDLEQWISEKELVASSPEMGQDFDHVTLLRDKFRDFARETGAIGQERVDNVNAFIERLIDAGHSEAATIAEWKDGLNEMWADLLELIDTRMQLLAASYDLHRYFYTGAEILGLIDEKHRELPEDVGLDASTAESFHRVHTAFERELHLLGVQVQQFQDVATRLQTAYAGEKAEAIQNKEQEVSAAWQALLDACAGRRTQLVDTADKFRFFSMARDLLSWMESIIRQIETQERPRDVSSVELLMKYHQGINAEIETRSKNFSACLELGESLLQRQHQASEEIREKLQQVMSRRKEMNEKWEARWERLRMLLEVCQFSRDASVAEAWLIAQEPYLASGDFGHTVDSVEKLIKRHEAFEKSTASWAERFAALEKPTTLELKERQIAERPAEETGPQEEEGETAGEAPVSHHAATERTSPGEEEGTWPQNLQQPPPPGQHKDGQKSTGDERPTTEPLFKVLDTPLSEGDEPATLPAPRDHGQSVQMEGYLGRKHDLEGPNKKASNRSWNNLYCVLRNSELTFYKDAKNLALGMPYHGEEPLALRHAICEIAANYKKKKHVFKLRLSNGSEWLFHGKDEEEMLSWLQGVSTAINESQSIRVKAQSLPLPSLSGPDASLGKKDKEKRFSFFPKKK

SEQ ID NO: 28082 - protein, 2332 aa, Artificial Sequence
  derived and/or modified sequence
EPADMTSATEFENVGNQPPYSRINARWDAPDDELDNDNSSARLFERSRIKALADEREVVQKKTFTKWVNSHLARVSCRITDLYKDLRDGRMLIKLLEVLSGEMLPKPTKGKMRIHCLENVDKALQFLKEQRVHLENMGSHDIVDGNHRLVLGLIWTIILRFQIQDIVVQTQEGRETRSAKDALLLWCQMKTAGYPHVNVTNFTSSWKDGLAFNALIHKHRPDLIDFDKLKDSNARHNLEHAFNVAERQLGIIPLLDPEDVFTENPDEKSIITYVVAFYHYFSKMKVLAVEGKRVGKVIDHAIETEKMIEKYSGLASDLLTWIEQTITVLNSRKFANSLTGVQQQLQAFSTYRTVEKPPKFQEKGNLEVLLFTIQSRMRANNQKVYTPHDGKLVSDINRAWESLEEAEYRRELALRNELIRQEKLEQLARRFDRKAAMRETWLSENQRLVAQDNFGYDLAAVEAAKKKHEAIETDTAAYEERVRALEDLAQELEKENYHDQKRITARKDNILRLWSYLQELLQSRRQRLETTLALQKLFQDMLHSIDWMDEIKAHLLSAEFGKHLLEVEDLLQKHKLMEADIAIQGDKVKAITAATLKFTEGKGYQPCDPQVIQDRISHLEQCFEELSNMAAGRKAQLEQSKRLWKFFWEMDEAESWIKEKEQIYSSLDYGKDLTSVLILQRKHKAFEDELRGLDAHLEQIFQEAHGMVARKQFGHPQIEARIKEVSAQWDQLKDLAAFCKKNLQDAENFFQFQGDADDLKAWLQDAHRLLSGEDVGQDEGATRALGKKHKDFLEELEESRGVMEHLEQQAQGFPEEFRDSPDVTHRLQALRELYQQVVAQADLRQQRLQEALDLYTVFGETDACELWMGEKEKWLAEMEMPDTLEDLEVVQHRFDILDQEMKTLMTQIDGVNLAANSLVESGHPRSREVKQYQDHLNTRWQAFQTLVSERREAVDSALRVHNYCVDCEETSKWITDKTKVVESTKDLGRDLAGIIAIQRKLSGLERDVAAIQARVDALERESQQLMDSHPEQKEDIGQRQKHLEELWQGLQQSLQGQEDLLGEVSQLQAFLQDLDDFQAWLSITQKAVASEDMPESLPEAEQLLQQHAGIKDEIDGHQDSYQRVKESGEKVIQGQTDPEYLLLGQRLEGLDTGWNALGRMWESRSHTLAQCLGFQEFQKDAKQAEAILSNQEYTLAHLEPPDSLEAAEAGIRKFEDFLGSMENNRDKVLSPVDSGNKLVAEGNLYSDKIKEKVQLIEDRHRKNNEKAQEASVLLRDNLELQNFLQNCQELTLWINDKLLTSQDVSYDEARNLHNKWLKHQAFVAELASHEGWLENIDAEGKQLMDEKPQFTALVSQKLEALHRLWDELQATTKEKTQHLSAARSSDLRLQTHADLNKWISAMEDQLRSDDPGKDLTSVNRMLAKLKRVEDQVNVRKEELGELFAQVPSMGEEGGDADLSIEKRFLDLLEPLGRRKKQLESSRAKLQISRDLEDETLWVEERLPLAQSADYGTNLQTVQLFMKKNQTLQNEILGHTPRVEDVLQRGQQLVEAAEIDCQDLEERLGHLQSSWDRLREAAAGRLQRLRDANEAQQYYLDADEAEAWIGEQELYVISDEIPKDEEGAIVMLKRHLRQQRAVEDYGRNIKQLASRAQGLLSAGHPEGEQIIRLQGQVDKHYAGLKDVAEERKRKLENMYHLFQLKRETDDLEQWISEKELVASSPEMGQDFDHVTLLRDKFRDFARETGAIGQERVDNVNAFIERLIDAGHSEAATIAEWKDGLNEMWADLLELIDTRMQLLAASYDLHRYFYTGAEILGLIDEKHRELPEDVGLDASTAESFHRVHTAFERELHLLGVQVQQFQDVATRLQTAYAGEKAEAIQNKEQEVSAAWQALLDACAGRRTQLVDTADKFRFFSMARDLLSWMESIIRQIETQERPRDVSSVELLMKYHQGINAEIETRSKNFSACLELGESLLQRQHQASEEIREKLQQVMSRRKEMNEKWEARWERLRMLLEVCQFSRDASVAEAWLIAQEPYLASGDFGHTVDSVEKLIKRHEAFEKSTASWAERFAALEKPTTLELKERQIAERPAEETGPQEEEGETAGEAPVSHHAATERTSPGEEEGTWPQNLQQPPPPGQHKDGQKSTGDERPTTEPLFKVLDTPLSEGDEPATLPAPRDHGQSVQMEGYLGRKHDLEGPNKKASNRSWNNLYCVLRNSELTFYKDAKNLALGMPYHGEEPLALRHAICEIAANYKKKKHVFKLRLSNGSEWLFHGKDEEEMLSWLQGVSTAINESQSIRVKAQSLPLPSLSGPDASLGKKDKEKRFSFFPKKK

SEQ ID NO: 28083 - DNA, 225 bp, Artificial Sequence
  derived and/or modified sequence
atgaagttccaggagtgccacagcgaggtgatgagacatggccagaagatctaccccagccaccaccgcatcgagatggctgtggagatcgccagcctgaagtgccagcacagcagcatcaaccagagccccaccaggaagaacagcaacagcaccaccggctggctgctgtgggacctgctgatgggcatcggcaacagcggcagcaatgtggtgctgacctag

SEQ ID NO: 28084 - DNA, 3444 bp, Artificial Sequence
  derived and/or modified sequence
atggagaacaacagagacaaggtgctgagccccgtggacagcggcaacaagctggtggccgagggcaacctgtacagcgacaagatcaaggagaaggtgcagctgatcgaggacagacacagaaagaacaacgagaaggcccaggaggccagcgtgctgctgagagacaacctggagctgcagaacttcctgcagaactgccaggagctgaccctgtggatcaacgacaagctgctgaccagccaggacgtgagctacgacgaggccagaaacctgcacaacaagtggctgaagcaccaggccttcgtggccgagctggccagccacgagggctggctggagaacatcgacgccgagggcaagcagctgatggacgagaagccccagttcaccgccctggtgagccagaagctggaggccctgcacagactgtgggacgagctgcaggccaccaccaaggagaagacccagcacctgagcgccgccagaagcagcgacctgagactgcagacccacgccgacctgaacaagtggatcagcgccatggaggaccagctgagaagcgacgaccccggcaaggacctgaccagcgtgaacagaatgctggccaagctgaagagagtggaggaccaggtgaacgtgagaaaggaggagctgggcgagctgttcgcccaggtgcccagcatgggcgaggagggcggcgacgccgacctgagcatcgagaagagattcctggacctgctggagcccctgggcagaagaaagaagcagctggagagcagcagagccaagctgcagatcagcagagacctggaggacgagaccctgtgggtggaggagagactgcccctggcccagagcgccgactacggcaccaacctgcagaccgtgcagctgttcatgaagaagaaccagaccctgcagaacgagatcctgggccacacccccagagtggaggacgtgctgcagagaggccagcagctggtggaggccgccgagatcgactgccaggacctggaggagagactgggccacctgcagagcagctgggacagactgagagaggccgccgccggcagactgcagagactgagagacgccaacgaggcccagcagtactacctggacgccgacgaggccgaggcctggatcggcgagcaggagctgtacgtgatcagcgacgagatccccaaggacgaggagggcgccatcgtgatgctgaagagacacctgagacagcagagagccgtggaggactacggcagaaacatcaagcagctggccagcagagcccagggcctgctgagcgccggccaccccgagggcgagcagatcatcagactgcagggccaggtggacaagcactacgccggcctgaaggacgtggccgaggagagaaagagaaagctggagaacatgtaccacctgttccagctgaagagagagaccgacgacctggagcagtggatcagcgagaaggagctggtggccagcagccccgagatgggccaggacttcgaccacgtgaccctgctgagagacaagttcagagacttcgccagagagaccggcgccatcggccaggagagagtggacaacgtgaacgccttcatcgagagactgatcgacgccggccacagcgaggccgccaccatcgccgagtggaaggacggcctgaacgagatgtgggccgacctgctggagctgatcgacaccagaatgcagctgctggccgccagctacgacctgcacagatacttctacaccggcgccgagatcctgggcctgatcgacgagaagcacagagagctgcccgaggacgtgggcctggacgccagcaccgccgagagcttccacagagtgcacaccgccttcgagagagagctgcacctgctgggcgtgcaggtgcagcagttccaggacgtggccaccagactgcagaccgcctacgccggcgagaaggccgaggccatccagaacaaggagcaggaggtgagcgccgcctggcaggccctgctggacgcctgcgccggcagaagaacccagctggtggacaccgccgacaagttcagattcttcagcatggccagagacctgctgagctggatggagagcatcatcagacagatcgagacccaggagagacccagagacgtgagcagcgtggagctgctgatgaagtaccaccagggcatcaacgccgagatcgagaccagaagcaagaacttcagcgcctgcctggagctgggcgagagcctgctgcagagacagcaccaggccagcgaggagatcagagagaagctgcagcaggtgatgagcagaagaaaggagatgaacgagaagtgggaggccagatgggagagactgagaatgctgctggaggtgtgccagttcagcagagacgccagcgtggccgaggcctggctgatcgcccaggagccctacctggccagcggcgacttcggccacaccgtggacagcgtggagaagctgatcaagagacacgaggccttcgagaagagcaccgccagctgggccgagagattcgccgccctggagaagcccaccaccctggagctgaaggagagacagatcgccgagagacccgccgaggagaccggcccccaggaggaggagggcgagaccgccggcgaggcccccgtgagccaccacgccgccaccgagagaaccagccccggcgaggaggagggcacctggccccagaacctgcagcagccccccccccccggccagcacaaggacggccagaagagcaccggcgacgagagacccaccaccgagcccctgttcaaggtgctggacacccccctgagcgagggcgacgagcccgccaccctgcccgcccccagagaccacggccagagcgtgcagatggagggctacctgggcagaaagcacgacctggagggccccaacaagaaggccagcaacagcaagggcgaggagggcgaggagagaagagagaccgaggaggaggacgaggaggaggaggagaccgagagcgtggccgtggagatgcagcagcacgccagccacgtgagctggaacaacctgtactgcgtgctgagaaacagcgagctgaccttctacaaggacgccaagaacctggccctgggcatgccctaccacggcgaggagcccctggccctgagacacgccatctgcgagatcgccgccaactacaagaagaagaagcacgtgttcaagctgagactgagcaacggcagcgagtggctgttccacggcaaggacgaggaggagatgctgagctggctgcagggcgtgagcaccgccatcaacgagagccagagcatcagagtgaaggcccagagcctgcccctgcccagcctgagcggccccgacgccagcctgggcaagaaggacaaggagaagagattcagcttcttccccaagaagaagtag

SEQ ID NO: 28085 - DNA, 6321 bp, Artificial Sequence
  derived and/or modified sequence
atgaccagcgccaccgagttcgagaacgtgggcaaccagcccccctacagcagaatcaacgccagatgggacgcccccgacgacgagctggacaacgacaacagcagcgccagactgttcgagagaagcagaatcaaggccctggccgacgagagagaggtggtgcagaagaagaccttcaccaagtgggtgaacagccacctggccagagtgagctgcagaatcaccgacctgtacaaggacctgagagacggcagaatgctgatcaagctgctggaggtgctgagcggcgagatgctgcccaagcccaccaagggcaagatgagaatccactgcctggagaacgtggacaaggccctgcagttcctgaaggagcagagagtgcacctggagaacatgggcagccacgacatcgtggacggcaaccacagactggtgctgggcctgatctggaccatcatcctgagattccagatccaggacatcgtggtgcagacccaggagggcagagagaccagaagcgccaaggacgccctgctgctgtggtgccagatgaagaccgccggctacccccacgtgaacgtgaccaacttcaccagcagctggaaggacggcctggccttcaacgccctgatccacaagcacagacccgacctgatcgacttcgacaagctgaaggacagcaacgccagacacaacctggagcacgccttcaacgtggccgagagacagctgggcatcatccccctgctggaccccgaggacgtgttcaccgagaaccccgacgagaagagcatcatcacctacgtggtggccttctaccactacttcagcaagatgaaggtgctggccgtggagggcaagagagtgggcaaggtgatcgaccacgccatcgagaccgagaagatgatcgagaagtacagcggcctggccagcgacctgctgacctggatcgagcagaccatcaccgtgctgaacagcagaaagttcgccaacagcctgaccggcgtgcagcagcagctgcaggccttcagcacctacagaaccgtggagaagccccccaagttccaggagaagggcaacctggaggtgctgctgttcaccatccagagcagaatgagagccaacaaccagaaggtgtacaccccccacgacggcaagctggtgagcgacatcaacagagcctgggagagcctggaggaggccgagtacagaagagagctggccctgagaaacgagctgatcagacaggagaagctggagcagctggccagaagattcgacagaaaggccgccatgagagagacctggctgagcgagaaccagagactggtggcccaggacaacttcggctacgacctggccgccgtggaggccgccaagaagaagcacgaggccatcgagaccgacaccgccgcctacgaggagagagtgagagccctggaggacctggcccaggagctggagaaggagaactaccacgaccagaagagaatcaccgccagaaaggacaacatcctgagactgtggagctacctgcaggagctgctgcagagcagaagacagagactggagaccaccctggccctgcagaagctgttccaggacatgctgcacagcatcgactggatggacgagatcaaggcccacctgctgagcgccgagttcggcaagcacctgctggaggtggaggacctgctgcagaagcacaagctgatggaggccgacatcgccatccagggcgacaaggtgaaggccatcaccgccgccaccctgaagttcaccgagggcaagggctaccagccctgcgacccccaggtgatccaggacagaatcagccacctggagcagtgcttcgaggagctgagcaacatggccgccggcagaaaggcccagctggagcagagcaagagactgtggaagttcttctgggagatggacgaggccgagagctggatcaaggagaaggagcagatctacagcagcctggactacggcaaggacctgaccagcgtgctgatcctgcagagaaagcacaaggccttcgaggacgagctgagaggcctggacgcccacctggagcagatcttccaggaggcccacggcatggtggccagaaagcagttcggccacccccagatcgaggccagaatcaaggaggtgagcgcccagtgggaccagctgaaggacctggccgccttctgcaagaagaacctgcaggacgccgagaacttcttccagttccagggcgacgccgacgacctgaaggcctggctgcaggacgcccacagactgctgagcggcgaggacgtgggccaggacgagggcgccaccagagccctgggcaagaagcacaaggacttcctggaggagctggaggagagcagaggcgtgatggagcacctggagcagcaggcccagggcttccccgaggagttcagagacagccccgacgtgacccacagactgcaggccctgagagagctgtaccagcaggtggtggcccaggccgacctgagacagcagagactgcaggaggccctggacctgtacaccgtgttcggcgagaccgacgcctgcgagctgtggatgggcgagaaggagaagtggctggccgagatggagatgcccgacaccctggaggacctggaggtggtgcagcacagattcgacatcctggaccaggagatgaagaccctgatgacccagatcgacggcgtgaacctggccgccaacagcctggtggagagcggccaccccagaagcagagaggtgaagcagtaccaggaccacctgaacaccagatggcaggccttccagaccctggtgagcgagagaagagaggccgtggacagcgccctgagagtgcacaactactgcgtggactgcgaggagaccagcaagtggatcaccgacaagaccaaggtggtggagagcaccaaggacctgggcagagacctggccggcatcatcgccatccagagaaagctgagcggcctggagagagacgtggccgccatccaggccagagtggacgccctggagagagagagccagcagctgatggacagccaccccgagcagaaggaggacatcggccagagacagaagcacctggaggagctgtggcagggcctgcagcagagcctgcagggccaggaggacctgctgggcgaggtgagccagctgcaggccttcctgcaggacctggacgacttccaggcctggctgagcatcacccagaaggccgtggccagcgaggacatgcccgagagcctgcccgaggccgagcagctgctgcagcagcacgccggcatcaaggacgagatcgacggccaccaggacagctaccagagagtgaaggagagcggcgagaaggtgatccagggccagaccgaccccgagtacctgctgctgggccagagactggagggcctggacaccggctggaacgccctgggcagaatgtgggagagcagaagccacaccctggcccagtgcctgggcttccaggagttccagaaggacgccaagcaggccgaggccatcctgagcaaccaggagtacaccctggcccacctggagccccccgacagcctggaggccgccgaggccggcatcagaaagttcgaggacttcctgggcagcatggagaacaacagagacaaggtgctgagccccgtggacagcggcaacaagctggtggccgagggcaacctgtacagcgacaagatcaaggagaaggtgcagctgatcgaggacagacacagaaagaacaacgagaaggcccaggaggccagcgtgctgctgagagacaacctggagctgcagaacttcctgcagaactgccaggagctgaccctgtggatcaacgacaagctgctgaccagccaggacgtgagctacgacgaggccagaaacctgcacaacaagtggctgaagcaccaggccttcgtggccgagctggccagccacgagggctggctggagaacatcgacgccgagggcaagcagctgatggacgagaagccccagttcaccgccctggtgagccagaagctggaggccctgcacagactgtgggacgagctgcaggccaccaccaaggagaagacccagcacctgagcgccgccagaagcagcgacctgagactgcagacccacgccgacctgaacaagtggatcagcgccatggaggaccagctgagaagcgacgaccccggcaaggacctgaccagcgtgaacagaatgctggccaagctgaagagagtggaggaccaggtgaacgtgagaaaggaggagctgggcgagctgttcgcccaggtgcccagcatgggcgaggagggcggcgacgccgacctgagcatcgagaagagattcctggacctgctggagcccctgggcagaagaaagaagcagctggagagcagcagagccaagctgcagatcagcagagacctggaggacgagaccctgtgggtggaggagagactgcccctggcccagagcgccgactacggcaccaacctgcagaccgtgcagctgttcatgaagaagaaccagaccctgcagaacgagatcctgggccacacccccagagtggaggacgtgctgcagagaggccagcagctggtggaggccgccgagatcgactgccaggacctggaggagagactgggccacctgcagagcagctgggacagactgagagaggccgccgccggcagactgcagagactgagagacgccaacgaggcccagcagtactacctggacgccgacgaggccgaggcctggatcggcgagcaggagctgtacgtgatcagcgacgagatccccaaggacgaggagggcgccatcgtgatgctgaagagacacctgagacagcagagagccgtggaggactacggcagaaacatcaagcagctggccagcagagcccagggcctgctgagcgccggccaccccgagggcgagcagatcatcagactgcagggccaggtggacaagcactacgccggcctgaaggacgtggccgaggagagaaagagaaagctggagaacatgtaccacctgttccagctgaagagagagaccgacgacctggagcagtggatcagcgagaaggagctggtggccagcagccccgagatgggccaggacttcgaccacgtgaccctgctgagagacaagttcagagacttcgccagagagaccggcgccatcggccaggagagagtggacaacgtgaacgccttcatcgagagactgatcgacgccggccacagcgaggccgccaccatcgccgagtggaaggacggcctgaacgagatgtgggccgacctgctggagctgatcgacaccagaatgcagctgctggccgccagctacgacctgcacagatacttctacaccggcgccgagatcctgggcctgatcgacgagaagcacagagagctgcccgaggacgtgggcctggacgccagcaccgccgagagcttccacagagtgcacaccgccttcgagagagagctgcacctgctgggcgtgcaggtgcagcagttccaggacgtggccaccagactgcagaccgcctacgccggcgagaaggccgaggccatccagaacaaggagcaggaggtgagcgccgcctggcaggccctgctggacgcctgcgccggcagaagaacccagctggtggacaccgccgacaagttcagattcttcagcatggccagagacctgctgagctggatggagagcatcatcagacagatcgagacccaggagagacccagagacgtgagcagcgtggagctgctgatgaagtaccaccagggcatcaacgccgagatcgagaccagaagcaagaacttcagcgcctgcctggagctgggcgagagcctgctgcagagacagcaccaggccagcgaggagatcagagagaagctgcagcaggtgatgagcagaagaaaggagatgaacgagaagtgggaggccagatgggagagactgagaatgctgctggaggtgtgccagttcagcagagacgccagcgtggccgaggcctggctgatcgcccaggagccctacctggccagcggcgacttcggccacaccgtggacagcgtggagaagctgatcaagagacacgaggccttcgagaagagcaccgccagctgggccgagagattcgccgccctggagaagcccaccaccgccagcagaggcggcagaagagacagcagaggcggcagcagcttccccccctgcggccacagagagaacgtgcccggccagagcctggtgagcttcgtgtag

SEQ ID NO: 28086 - DNA, 6987 bp, Artificial Sequence
  derived and/or modified sequence
atgaccagcgccaccgagttcgagaacgtgggcaaccagcccccctacagcagaatcaacgccagatgggacgcccccgacgacgagctggacaacgacaacagcagcgccagactgttcgagagaagcagaatcaaggccctggccgacgagagagaggtggtgcagaagaagaccttcaccaagtgggtgaacagccacctggccagagtgagctgcagaatcaccgacctgtacaaggacctgagagacggcagaatgctgatcaagctgctggaggtgctgagcggcgagatgctgcccaagcccaccaagggcaagatgagaatccactgcctggagaacgtggacaaggccctgcagttcctgaaggagcagagagtgcacctggagaacatgggcagccacgacatcgtggacggcaaccacagactggtgctgggcctgatctggaccatcatcctgagattccagatccaggacatcgtggtgcagacccaggagggcagagagaccagaagcgccaaggacgccctgctgctgtggtgccagatgaagaccgccggctacccccacgtgaacgtgaccaacttcaccagcagctggaaggacggcctggccttcaacgccctgatccacaagcacagacccgacctgatcgacttcgacaagctgaaggacagcaacgccagacacaacctggagcacgccttcaacgtggccgagagacagctgggcatcatccccctgctggaccccgaggacgtgttcaccgagaaccccgacgagaagagcatcatcacctacgtggtggccttctaccactacttcagcaagatgaaggtgctggccgtggagggcaagagagtgggcaaggtgatcgaccacgccatcgagaccgagaagatgatcgagaagtacagcggcctggccagcgacctgctgacctggatcgagcagaccatcaccgtgctgaacagcagaaagttcgccaacagcctgaccggcgtgcagcagcagctgcaggccttcagcacctacagaaccgtggagaagccccccaagttccaggagaagggcaacctggaggtgctgctgttcaccatccagagcagaatgagagccaacaaccagaaggtgtacaccccccacgacggcaagctggtgagcgacatcaacagagcctgggagagcctggaggaggccgagtacagaagagagctggccctgagaaacgagctgatcagacaggagaagctggagcagctggccagaagattcgacagaaaggccgccatgagagagacctggctgagcgagaaccagagactggtggcccaggacaacttcggctacgacctggccgccgtggaggccgccaagaagaagcacgaggccatcgagaccgacaccgccgcctacgaggagagagtgagagccctggaggacctggcccaggagctggagaaggagaactaccacgaccagaagagaatcaccgccagaaaggacaacatcctgagactgtggagctacctgcaggagctgctgcagagcagaagacagagactggagaccaccctggccctgcagaagctgttccaggacatgctgcacagcatcgactggatggacgagatcaaggcccacctgctgagcgccgagttcggcaagcacctgctggaggtggaggacctgctgcagaagcacaagctgatggaggccgacatcgccatccagggcgacaaggtgaaggccatcaccgccgccaccctgaagttcaccgagggcaagggctaccagccctgcgacccccaggtgatccaggacagaatcagccacctggagcagtgcttcgaggagctgagcaacatggccgccggcagaaaggcccagctggagcagagcaagagactgtggaagttcttctgggagatggacgaggccgagagctggatcaaggagaaggagcagatctacagcagcctggactacggcaaggacctgaccagcgtgctgatcctgcagagaaagcacaaggccttcgaggacgagctgagaggcctggacgcccacctggagcagatcttccaggaggcccacggcatggtggccagaaagcagttcggccacccccagatcgaggccagaatcaaggaggtgagcgcccagtgggaccagctgaaggacctggccgccttctgcaagaagaacctgcaggacgccgagaacttcttccagttccagggcgacgccgacgacctgaaggcctggctgcaggacgcccacagactgctgagcggcgaggacgtgggccaggacgagggcgccaccagagccctgggcaagaagcacaaggacttcctggaggagctggaggagagcagaggcgtgatggagcacctggagcagcaggcccagggcttccccgaggagttcagagacagccccgacgtgacccacagactgcaggccctgagagagctgtaccagcaggtggtggcccaggccgacctgagacagcagagactgcaggaggccctggacctgtacaccgtgttcggcgagaccgacgcctgcgagctgtggatgggcgagaaggagaagtggctggccgagatggagatgcccgacaccctggaggacctggaggtggtgcagcacagattcgacatcctggaccaggagatgaagaccctgatgacccagatcgacggcgtgaacctggccgccaacagcctggtggagagcggccaccccagaagcagagaggtgaagcagtaccaggaccacctgaacaccagatggcaggccttccagaccctggtgagcgagagaagagaggccgtggacagcgccctgagagtgcacaactactgcgtggactgcgaggagaccagcaagtggatcaccgacaagaccaaggtggtggagagcaccaaggacctgggcagagacctggccggcatcatcgccatccagagaaagctgagcggcctggagagagacgtggccgccatccaggccagagtggacgccctggagagagagagccagcagctgatggacagccaccccgagcagaaggaggacatcggccagagacagaagcacctggaggagctgtggcagggcctgcagcagagcctgcagggccaggaggacctgctgggcgaggtgagccagctgcaggccttcctgcaggacctggacgacttccaggcctggctgagcatcacccagaaggccgtggccagcgaggacatgcccgagagcctgcccgaggccgagcagctgctgcagcagcacgccggcatcaaggacgagatcgacggccaccaggacagctaccagagagtgaaggagagcggcgagaaggtgatccagggccagaccgaccccgagtacctgctgctgggccagagactggagggcctggacaccggctggaacgccctgggcagaatgtgggagagcagaagccacaccctggcccagtgcctgggcttccaggagttccagaaggacgccaagcaggccgaggccatcctgagcaaccaggagtacaccctggcccacctggagccccccgacagcctggaggccgccgaggccggcatcagaaagttcgaggacttcctgggcagcatggagaacaacagagacaaggtgctgagccccgtggacagcggcaacaagctggtggccgagggcaacctgtacagcgacaagatcaaggagaaggtgcagctgatcgaggacagacacagaaagaacaacgagaaggcccaggaggccagcgtgctgctgagagacaacctggagctgcagaacttcctgcagaactgccaggagctgaccctgtggatcaacgacaagctgctgaccagccaggacgtgagctacgacgaggccagaaacctgcacaacaagtggctgaagcaccaggccttcgtggccgagctggccagccacgagggctggctggagaacatcgacgccgagggcaagcagctgatggacgagaagccccagttcaccgccctggtgagccagaagctggaggccctgcacagactgtgggacgagctgcaggccaccaccaaggagaagacccagcacctgagcgccgccagaagcagcgacctgagactgcagacccacgccgacctgaacaagtggatcagcgccatggaggaccagctgagaagcgacgaccccggcaaggacctgaccagcgtgaacagaatgctggccaagctgaagagagtggaggaccaggtgaacgtgagaaaggaggagctgggcgagctgttcgcccaggtgcccagcatgggcgaggagggcggcgacgccgacctgagcatcgagaagagattcctggacctgctggagcccctgggcagaagaaagaagcagctggagagcagcagagccaagctgcagatcagcagagacctggaggacgagaccctgtgggtggaggagagactgcccctggcccagagcgccgactacggcaccaacctgcagaccgtgcagctgttcatgaagaagaaccagaccctgcagaacgagatcctgggccacacccccagagtggaggacgtgctgcagagaggccagcagctggtggaggccgccgagatcgactgccaggacctggaggagagactgggccacctgcagagcagctgggacagactgagagaggccgccgccggcagactgcagagactgagagacgccaacgaggcccagcagtactacctggacgccgacgaggccgaggcctggatcggcgagcaggagctgtacgtgatcagcgacgagatccccaaggacgaggagggcgccatcgtgatgctgaagagacacctgagacagcagagagccgtggaggactacggcagaaacatcaagcagctggccagcagagcccagggcctgctgagcgccggccaccccgagggcgagcagatcatcagactgcagggccaggtggacaagcactacgccggcctgaaggacgtggccgaggagagaaagagaaagctggagaacatgtaccacctgttccagctgaagagagagaccgacgacctggagcagtggatcagcgagaaggagctggtggccagcagccccgagatgggccaggacttcgaccacgtgaccctgctgagagacaagttcagagacttcgccagagagaccggcgccatcggccaggagagagtggacaacgtgaacgccttcatcgagagactgatcgacgccggccacagcgaggccgccaccatcgccgagtggaaggacggcctgaacgagatgtgggccgacctgctggagctgatcgacaccagaatgcagctgctggccgccagctacgacctgcacagatacttctacaccggcgccgagatcctgggcctgatcgacgagaagcacagagagctgcccgaggacgtgggcctggacgccagcaccgccgagagcttccacagagtgcacaccgccttcgagagagagctgcacctgctgggcgtgcaggtgcagcagttccaggacgtggccaccagactgcagaccgcctacgccggcgagaaggccgaggccatccagaacaaggagcaggaggtgagcgccgcctggcaggccctgctggacgcctgcgccggcagaagaacccagctggtggacaccgccgacaagttcagattcttcagcatggccagagacctgctgagctggatggagagcatcatcagacagatcgagacccaggagagacccagagacgtgagcagcgtggagctgctgatgaagtaccaccagggcatcaacgccgagatcgagaccagaagcaagaacttcagcgcctgcctggagctgggcgagagcctgctgcagagacagcaccaggccagcgaggagatcagagagaagctgcagcaggtgatgagcagaagaaaggagatgaacgagaagtgggaggccagatgggagagactgagaatgctgctggaggtgtgccagttcagcagagacgccagcgtggccgaggcctggctgatcgcccaggagccctacctggccagcggcgacttcggccacaccgtggacagcgtggagaagctgatcaagagacacgaggccttcgagaagagcaccgccagctgggccgagagattcgccgccctggagaagcccaccaccctggagctgaaggagagacagatcgccgagagacccgccgaggagaccggcccccaggaggaggagggcgagaccgccggcgaggcccccgtgagccaccacgccgccaccgagagaaccagccccggcgaggaggagggcacctggccccagaacctgcagcagccccccccccccggccagcacaaggacggccagaagagcaccggcgacgagagacccaccaccgagcccctgttcaaggtgctggacacccccctgagcgagggcgacgagcccgccaccctgcccgcccccagagaccacggccagagcgtgcagatggagggctacctgggcagaaagcacgacctggagggccccaacaagaaggccagcaacagaagctggaacaacctgtactgcgtgctgagaaacagcgagctgaccttctacaaggacgccaagaacctggccctgggcatgccctaccacggcgaggagcccctggccctgagacacgccatctgcgagatcgccgccaactacaagaagaagaagcacgtgttcaagctgagactgagcaacggcagcgagtggctgttccacggcaaggacgaggaggagatgctgagctggctgcagggcgtgagcaccgccatcaacgagagccagagcatcagagtgaaggcccagagcctgcccctgcccagcctgagcggccccgacgccagcctgggcaagaaggacaaggagaagagattcagcttcttccccaagaagaagtag

SEQ ID NO: 28087 - DNA, 6999 bp, Artificial Sequence
  derived and/or modified sequence
gagcccgccgacatgaccagcgccaccgagttcgagaacgtgggcaaccagcccccctacagcagaatcaacgccagatgggacgcccccgacgacgagctggacaacgacaacagcagcgccagactgttcgagagaagcagaatcaaggccctggccgacgagagagaggtggtgcagaagaagaccttcaccaagtgggtgaacagccacctggccagagtgagctgcagaatcaccgacctgtacaaggacctgagagacggcagaatgctgatcaagctgctggaggtgctgagcggcgagatgctgcccaagcccaccaagggcaagatgagaatccactgcctggagaacgtggacaaggccctgcagttcctgaaggagcagagagtgcacctggagaacatgggcagccacgacatcgtggacggcaaccacagactggtgctgggcctgatctggaccatcatcctgagattccagatccaggacatcgtggtgcagacccaggagggcagagagaccagaagcgccaaggacgccctgctgctgtggtgccagatgaagaccgccggctacccccacgtgaacgtgaccaacttcaccagcagctggaaggacggcctggccttcaacgccctgatccacaagcacagacccgacctgatcgacttcgacaagctgaaggacagcaacgccagacacaacctggagcacgccttcaacgtggccgagagacagctgggcatcatccccctgctggaccccgaggacgtgttcaccgagaaccccgacgagaagagcatcatcacctacgtggtggccttctaccactacttcagcaagatgaaggtgctggccgtggagggcaagagagtgggcaaggtgatcgaccacgccatcgagaccgagaagatgatcgagaagtacagcggcctggccagcgacctgctgacctggatcgagcagaccatcaccgtgctgaacagcagaaagttcgccaacagcctgaccggcgtgcagcagcagctgcaggccttcagcacctacagaaccgtggagaagccccccaagttccaggagaagggcaacctggaggtgctgctgttcaccatccagagcagaatgagagccaacaaccagaaggtgtacaccccccacgacggcaagctggtgagcgacatcaacagagcctgggagagcctggaggaggccgagtacagaagagagctggccctgagaaacgagctgatcagacaggagaagctggagcagctggccagaagattcgacagaaaggccgccatgagagagacctggctgagcgagaaccagagactggtggcccaggacaacttcggctacgacctggccgccgtggaggccgccaagaagaagcacgaggccatcgagaccgacaccgccgcctacgaggagagagtgagagccctggaggacctggcccaggagctggagaaggagaactaccacgaccagaagagaatcaccgccagaaaggacaacatcctgagactgtggagctacctgcaggagctgctgcagagcagaagacagagactggagaccaccctggccctgcagaagctgttccaggacatgctgcacagcatcgactggatggacgagatcaaggcccacctgctgagcgccgagttcggcaagcacctgctggaggtggaggacctgctgcagaagcacaagctgatggaggccgacatcgccatccagggcgacaaggtgaaggccatcaccgccgccaccctgaagttcaccgagggcaagggctaccagccctgcgacccccaggtgatccaggacagaatcagccacctggagcagtgcttcgaggagctgagcaacatggccgccggcagaaaggcccagctggagcagagcaagagactgtggaagttcttctgggagatggacgaggccgagagctggatcaaggagaaggagcagatctacagcagcctggactacggcaaggacctgaccagcgtgctgatcctgcagagaaagcacaaggccttcgaggacgagctgagaggcctggacgcccacctggagcagatcttccaggaggcccacggcatggtggccagaaagcagttcggccacccccagatcgaggccagaatcaaggaggtgagcgcccagtgggaccagctgaaggacctggccgccttctgcaagaagaacctgcaggacgccgagaacttcttccagttccagggcgacgccgacgacctgaaggcctggctgcaggacgcccacagactgctgagcggcgaggacgtgggccaggacgagggcgccaccagagccctgggcaagaagcacaaggacttcctggaggagctggaggagagcagaggcgtgatggagcacctggagcagcaggcccagggcttccccgaggagttcagagacagccccgacgtgacccacagactgcaggccctgagagagctgtaccagcaggtggtggcccaggccgacctgagacagcagagactgcaggaggccctggacctgtacaccgtgttcggcgagaccgacgcctgcgagctgtggatgggcgagaaggagaagtggctggccgagatggagatgcccgacaccctggaggacctggaggtggtgcagcacagattcgacatcctggaccaggagatgaagaccctgatgacccagatcgacggcgtgaacctggccgccaacagcctggtggagagcggccaccccagaagcagagaggtgaagcagtaccaggaccacctgaacaccagatggcaggccttccagaccctggtgagcgagagaagagaggccgtggacagcgccctgagagtgcacaactactgcgtggactgcgaggagaccagcaagtggatcaccgacaagaccaaggtggtggagagcaccaaggacctgggcagagacctggccggcatcatcgccatccagagaaagctgagcggcctggagagagacgtggccgccatccaggccagagtggacgccctggagagagagagccagcagctgatggacagccaccccgagcagaaggaggacatcggccagagacagaagcacctggaggagctgtggcagggcctgcagcagagcctgcagggccaggaggacctgctgggcgaggtgagccagctgcaggccttcctgcaggacctggacgacttccaggcctggctgagcatcacccagaaggccgtggccagcgaggacatgcccgagagcctgcccgaggccgagcagctgctgcagcagcacgccggcatcaaggacgagatcgacggccaccaggacagctaccagagagtgaaggagagcggcgagaaggtgatccagggccagaccgaccccgagtacctgctgctgggccagagactggagggcctggacaccggctggaacgccctgggcagaatgtgggagagcagaagccacaccctggcccagtgcctgggcttccaggagttccagaaggacgccaagcaggccgaggccatcctgagcaaccaggagtacaccctggcccacctggagccccccgacagcctggaggccgccgaggccggcatcagaaagttcgaggacttcctgggcagcatggagaacaacagagacaaggtgctgagccccgtggacagcggcaacaagctggtggccgagggcaacctgtacagcgacaagatcaaggagaaggtgcagctgatcgaggacagacacagaaagaacaacgagaaggcccaggaggccagcgtgctgctgagagacaacctggagctgcagaacttcctgcagaactgccaggagctgaccctgtggatcaacgacaagctgctgaccagccaggacgtgagctacgacgaggccagaaacctgcacaacaagtggctgaagcaccaggccttcgtggccgagctggccagccacgagggctggctggagaacatcgacgccgagggcaagcagctgatggacgagaagccccagttcaccgccctggtgagccagaagctggaggccctgcacagactgtgggacgagctgcaggccaccaccaaggagaagacccagcacctgagcgccgccagaagcagcgacctgagactgcagacccacgccgacctgaacaagtggatcagcgccatggaggaccagctgagaagcgacgaccccggcaaggacctgaccagcgtgaacagaatgctggccaagctgaagagagtggaggaccaggtgaacgtgagaaaggaggagctgggcgagctgttcgcccaggtgcccagcatgggcgaggagggcggcgacgccgacctgagcatcgagaagagattcctggacctgctggagcccctgggcagaagaaagaagcagctggagagcagcagagccaagctgcagatcagcagagacctggaggacgagaccctgtgggtggaggagagactgcccctggcccagagcgccgactacggcaccaacctgcagaccgtgcagctgttcatgaagaagaaccagaccctgcagaacgagatcctgggccacacccccagagtggaggacgtgctgcagagaggccagcagctggtggaggccgccgagatcgactgccaggacctggaggagagactgggccacctgcagagcagctgggacagactgagagaggccgccgccggcagactgcagagactgagagacgccaacgaggcccagcagtactacctggacgccgacgaggccgaggcctggatcggcgagcaggagctgtacgtgatcagcgacgagatccccaaggacgaggagggcgccatcgtgatgctgaagagacacctgagacagcagagagccgtggaggactacggcagaaacatcaagcagctggccagcagagcccagggcctgctgagcgccggccaccccgagggcgagcagatcatcagactgcagggccaggtggacaagcactacgccggcctgaaggacgtggccgaggagagaaagagaaagctggagaacatgtaccacctgttccagctgaagagagagaccgacgacctggagcagtggatcagcgagaaggagctggtggccagcagccccgagatgggccaggacttcgaccacgtgaccctgctgagagacaagttcagagacttcgccagagagaccggcgccatcggccaggagagagtggacaacgtgaacgccttcatcgagagactgatcgacgccggccacagcgaggccgccaccatcgccgagtggaaggacggcctgaacgagatgtgggccgacctgctggagctgatcgacaccagaatgcagctgctggccgccagctacgacctgcacagatacttctacaccggcgccgagatcctgggcctgatcgacgagaagcacagagagctgcccgaggacgtgggcctggacgccagcaccgccgagagcttccacagagtgcacaccgccttcgagagagagctgcacctgctgggcgtgcaggtgcagcagttccaggacgtggccaccagactgcagaccgcctacgccggcgagaaggccgaggccatccagaacaaggagcaggaggtgagcgccgcctggcaggccctgctggacgcctgcgccggcagaagaacccagctggtggacaccgccgacaagttcagattcttcagcatggccagagacctgctgagctggatggagagcatcatcagacagatcgagacccaggagagacccagagacgtgagcagcgtggagctgctgatgaagtaccaccagggcatcaacgccgagatcgagaccagaagcaagaacttcagcgcctgcctggagctgggcgagagcctgctgcagagacagcaccaggccagcgaggagatcagagagaagctgcagcaggtgatgagcagaagaaaggagatgaacgagaagtgggaggccagatgggagagactgagaatgctgctggaggtgtgccagttcagcagagacgccagcgtggccgaggcctggctgatcgcccaggagccctacctggccagcggcgacttcggccacaccgtggacagcgtggagaagctgatcaagagacacgaggccttcgagaagagcaccgccagctgggccgagagattcgccgccctggagaagcccaccaccctggagctgaaggagagacagatcgccgagagacccgccgaggagaccggcccccaggaggaggagggcgagaccgccggcgaggcccccgtgagccaccacgccgccaccgagagaaccagccccggcgaggaggagggcacctggccccagaacctgcagcagccccccccccccggccagcacaaggacggccagaagagcaccggcgacgagagacccaccaccgagcccctgttcaaggtgctggacacccccctgagcgagggcgacgagcccgccaccctgcccgcccccagagaccacggccagagcgtgcagatggagggctacctgggcagaaagcacgacctggagggccccaacaagaaggccagcaacagaagctggaacaacctgtactgcgtgctgagaaacagcgagctgaccttctacaaggacgccaagaacctggccctgggcatgccctaccacggcgaggagcccctggccctgagacacgccatctgcgagatcgccgccaactacaagaagaagaagcacgtgttcaagctgagactgagcaacggcagcgagtggctgttccacggcaaggacgaggaggagatgctgagctggctgcagggcgtgagcaccgccatcaacgagagccagagcatcagagtgaaggcccagagcctgcccctgcccagcctgagcggccccgacgccagcctgggcaagaaggacaaggagaagagattcagcttcttccccaagaagaagtag

SEQ ID NO: 28088 - DNA, 3444 bp, Artificial Sequence
  derived and/or modified sequence
atggaaaacaatcgggacaaagtactctcaccagtggattctgggaacaagcttgtggcagaggggaatctgtattccgacaaaatcaaggaaaaggtgcagttaatagaggaccggcacagaaaaaacaatgagaaggcccaggaagcctcggtgttgcttagagataatctcgagcttcagaacttccttcagaactgccaggagctgactctatggatcaatgacaagctgctgacaagccaagatgtatcatacgacgaggccagaaatctccacaacaaatggttgaagcaccaggctttcgtggctgaactcgcatcccatgaaggttggctggagaatatcgacgccgaaggtaagcagctgatggacgaaaagccacagtttacagctctggtatcacagaagctcgaggcattgcaccgtttatgggatgagcttcaggccacaaccaaggagaaaactcagcacctttcagcggccaggtcatctgatctgcgacttcagacgcatgcagacctgaacaaatggatctcggccatggaagaccagcttaggagcgacgatcccggtaaagatctgaccagcgtgaatagaatgctggccaagctcaagcgggtggaagatcaggtgaacgtgcgaaaagaggaactgggggagttattcgcgcaagtaccgagtatgggtgaggaaggcggagacgcagacctatccatcgagaagcgatttcttgacttgctggaaccattgggaaggagaaagaaacagctagagagctctcgtgccaaattacagatctctagggatctcgaggacgaaactttgtgggtagaagaaagattgcctctggctcaatctgccgactacggtactaacttgcagactgtacaactctttatgaagaagaaccagaccctgcagaacgaaatcctggggcatactccgcgagttgaagacgtcttgcagaggggccagcagctggtggaagccgccgaaattgactgccaggatctggaggagagactcggccaccttcagtcgtcctgggacaggctacgagaggccgcggcaggacgcctacaacgcttaagagacgccaacgaagcccagcagtattatcttgacgccgacgaagccgaagcctggattggtgaacaggagctgtacgtcataagtgacgagatccccaaggacgaggaaggcgccatcgtgatgctcaagcgccacctgcgccagcagcgtgccgtcgaagactacgggagaaatattaaacaattggctagtagagctcagggcctcctgtcagctggccatcctgaaggcgagcagatcatacggctacaggggcaggttgacaaacattatgcagggcttaaggacgttgcagaagaaaggaagcgaaaactggagaacatgtaccacttgtttcagctgaagcgggaaacagatgacctagagcagtggatcagcgagaaagaactggtggcctccagtccagaaatgggccaagatttcgatcacgtcacccttctgcgcgacaagtttagggattttgctcgagagacaggcgcaattggccaagaacgcgtggataatgtgaacgcattcattgagaggcttatcgacgccggacattccgaagcagctaccatcgccgagtggaaagacggtctcaacgaaatgtgggctgatctccttgaattaattgacacccgcatgcagctcctggccgccagctacgatttgcatcgatacttctacaccggcgctgagattctcggcctgatcgacgagaaacatagagagctgcctgaggatgtcggcctggacgcatcaacagcagagagtttccacagggtccataccgctttcgagagagaattacatcttctgggggtccaggttcaacaatttcaggacgttgccactaggctccagactgcctatgctggcgagaaggccgaggccatccagaacaaggagcaagaggtgagtgcagcctggcaagccttgctggatgcttgcgcagggagaaggacacagcttgtagatacggcagacaaattcagatttttcagcatggccagagacttactttcttggatggagagcattatccggcagattgagacacaggagcgaccccgggatgtgagctcagtggaacttctaatgaagtatcatcagggaattaacgctgagattgagacccggagcaagaatttcagtgcttgtctagagcttggggagagtttgttacaaaggcagcatcaggcaagcgaggaaataagggagaagttgcagcaggtgatgtctcgaagaaaagagatgaacgaaaagtgggaggctaggtgggaaaggctgaggatgctcctggaggtatgccaattctcacgggacgctagtgttgctgaggcatggcttatagcccaggagccctacctagccagtggcgacttcgggcataccgtggacagcgtggagaagctgatcaaacgccacgaagccttcgagaagtcgactgctagctgggccgaacgtttcgccgcacttgagaaaccaaccaccctggagcttaaagaacgccagatagccgagagacccgccgaggagacaggtccacaagaagaagaaggggaaactgccggcgaagcacccgtgagccaccacgccgcaacagagcgtacatctccgggcgaggaagaaggtacatggccccagaacctccaacagccccctccaccaggacagcacaaagatggtcaaaagtctacgggcgacgagagacccactactgagccactgttcaaagtgctggatacccctctctccgagggcgacgaacctgctacattgccagcgccccgggatcacgggcagtctgtacagatggagggttatctgggccgcaaacatgatctcgagggtccaaacaaaaaagcatccaatagtaagggtgaggagggcgaggaaaggcgggagacggaggaggaggatgaagaagaagaggagacagagtccgtggccgtggagatgcaacagcacgcatctcacgtctcttggaacaatctgtactgtgtgttgaggaactcagagttgaccttctataaagacgcaaagaacctcgctcttggaatgccttatcatggagaggaaccactcgccctccgacatgcaatatgcgagattgccgccaattacaaaaaaaaaaagcacgtgttcaaacttcgactgagcaacgggagtgaatggctttttcacgggaaagacgaggaggagatgctctcatggctccagggcgtcagcaccgctattaatgagtcacagagtatacgggttaaagcccagtcactcccgttgccaagtctctctggacccgatgcctcacttgggaaaaaggacaaggagaaacgattttctttctttccaaagaagaaatag

SEQ ID NO: 28089 - DNA, 6321 bp, Artificial Sequence
  derived and/or modified sequence
atgacttcagcaacagagttcgagaacgtgggcaaccaaccaccatactcaagaattaatgcccgctgggatgcgcccgacgacgaacttgacaatgataactccagcgcccgattgttcgaacggtctcggattaaagctcttgcggatgagcgggaggtggttcagaagaagacttttacgaaatgggtcaatagtcacttggcgagagtctcctgtaggattacagacttgtacaaggacttacgcgatggtcggatgcttattaagcttcttgaggttctctctggggaaatgctgccaaagcctactaaaggcaagatgaggatccactgtctggagaacgttgacaaagccctacagtttctgaaggaacaacgagttcatctggaaaacatggggtcccacgatattgtggatggaaatcataggcttgttctgggtttgatttggacaattattctgcgatttcaaatacaagatatagtcgttcaaacacaagagggcagggaaacccggtcggctaaggatgctttactgctttggtgtcagatgaagacagccggttacccacacgtgaacgtaacaaacttcacaagcagttggaaggatggcctggccttcaatgcactgatccataaacatagacctgacctaatagacttcgataagctcaaagacagcaatgcgagacacaacctcgagcatgccttcaatgtggctgaacgccaactcggtattataccgctcctcgaccctgaggacgtgtttacagagaatcctgatgaaaaaagtattattacttatgttgtggcattctaccactatttctccaaaatgaaagtgctggctgtagagggcaaacgggtagggaaggtgatcgaccatgcaatcgagactgaaaaaatgatagagaaatattcaggattagcatccgaccttctgacctggatcgagcagaccattacggttctgaattctcgtaagttcgccaatagtttaaccggcgtgcaacagcagttgcaggctttttccacctacagaacagtagagaagccgccaaagttccaagagaaggggaacctggaagtgcttctgttcaccattcagtcccgaatgcgtgcaaacaatcagaaagtatatactcctcacgatggcaagttagtcagcgacatcaatcgcgcatgggaatctctggaggaggcggaatacagaagagaactggcattgcggaatgaattgattcggcaagagaaactcgagcagcttgccagaagattcgacaggaaagccgctatgcgtgagacgtggctgagcgagaatcagcgtcttgtagcccaagacaatttcggctatgacctggccgctgttgaagcagccaagaagaaacatgaggcgatcgaaacagacaccgctgcatacgaggaacgcgtgcgagctctcgaggatcttgcgcaggaactggaaaaggaaaattatcatgaccagaagcgcatcactgctaggaaagacaacatcctgcgcctgtggtcctacttgcaagagctcctacagtctcgccggcaaaggctggagacgaccttagcactacagaagctgtttcaagacatgctgcactccatcgactggatggatgaaatcaaggcacacctcttatccgccgaatttgggaaacacttgctcgaggtggaggacctgctccagaaacacaagctgatggaagccgatattgcaatacagggagacaaagtgaaagccatcaccgctgcaactctgaaattcacggaagggaaaggataccagccatgtgaccctcaggtgatacaagacagaatctcacacctcgagcagtgttttgaggagctcagcaatatggccgctggccggaaagcacagctcgagcagtcgaaaagactttggaagttcttctgggagatggacgaggcagagtcatggatcaaggaaaaagaacaaatttactcttctctcgactatgggaaagatctgactagcgtgctgatcttgcaaaggaaacacaaggccttcgaagatgagttacgaggcttggatgcccatctagagcagatctttcaagaggctcacggtatggtggctcggaagcagtttggacaccctcagatcgaggcccgcattaaggaagtttccgcacagtgggaccaactgaaagatctggccgctttttgcaaaaagaaccttcaggacgctgagaacttttttcaatttcagggggacgccgatgatctgaaggcatggctgcaggacgcacacaggctgctgtctggcgaagatgtgggtcaagacgagggcgccacgcgcgccctgggcaagaaacacaaagatttcctggaggagctggaagaaagtcgtggagtaatggagcatttggaacagcaagcacagggtttccctgaggaattcagagacagtcccgatgtgacacataggctgcaggcgctccgcgagctttaccagcaggtcgtagcacaggccgatctgagacaacagcgtctgcaggaagctcttgatctgtatactgtcttcggtgaaactgatgcatgtgagctgtggatgggagaaaaagagaaatggctcgccgaaatggaaatgccagacacactagaagatctggaagtcgtacagcacaggttcgacatcctggaccaggagatgaaaactttaatgacgcagattgacggagtgaatctcgcggccaatagcctggtggagtccggccaccctaggtctagagaagtgaaacaataccaggatcaccttaacactcggtggcaggcgttccagaccctcgtcagcgagcggagagaggccgtggattccgcgctgagggtccataattactgtgtcgactgcgaggagacatccaagtggattacagataagaccaaagtggtggagtcaaccaaggacctggggagggatctcgctggaattattgccattcaaaggaagttgtctgggctggagcgcgacgtcgccgctatccaagcaagggttgatgcacttgagagggagtcccagcagcttatggactcccaccccgagcaaaaggaggacataggacagagacaaaagcacttggaggaattgtggcagggcctgcaacagtccctgcaaggacaggaggatctcctcggggaggtctcacaactgcaggcctttttacaggatcttgacgacttccaggcctggctgagcatcacgcaaaaagccgtcgcttcagaggacatgccggaatcattaccggaggctgaacaacttctgcagcaacacgccggcatcaaggatgagattgacgggcatcaggactcctaccagcgggtgaaggagagcggggagaaagtcatccagggacagacggaccccgagtacctgttacttggacagagactggagggtctagacacagggtggaatgccctcggacggatgtgggagagtagaagccacactctggctcagtgtttaggattccaggaattccagaaggatgccaaacaggccgaagccatcctcagcaatcaggaatataccctggctcacttggagccacctgacagcctggaggccgcagaagctgggatccgaaaattcgaggacttcctaggaagcatggaaaacaatcgagacaaggttctttctcccgttgattctggaaacaaactagtggcagagggaaacctttactcagataagattaaagaaaaagtccagctgatcgaggaccgccacagaaaaaacaatgaaaaggcacaggaagccagcgtactgctcagagataacctggaattacagaacttcctgcagaattgccaggaactaaccctgtggattaacgataagcttcttacgtctcaagacgtgagttacgacgaggcacggaacctccacaataaatggctgaaacatcaggccttcgtagcggagctggcgtcccatgaaggatggctggaaaacatcgatgcggagggtaaacagcttatggacgaaaagccccagttcaccgccttggtgtctcagaagttagaagccctccacaggttgtgggatgaactgcaagctacaacaaaagagaaaacacagcatctgagcgctgccagaagcagcgacctgaggctccagacacacgctgacctgaacaaatggatttccgcaatggaggaccagctgcggtctgatgaccccgggaaagatttaacttccgtgaacagaatgctggctaaacttaaacgggttgaggaccaggtgaacgtaagaaaggaggaacttggggagttattcgcccaagttccctccatgggcgaagaaggaggtgatgccgacctgagcatcgaaaagcgttttctcgatctcctagagcctctgggccgccgcaagaaacagctcgagtcttcaagggcaaaattacagatcagccgagatctagaagacgagacactttgggtcgaggaacgattgcccctggcccagtccgctgactatgggaccaatttgcaaactgtgcagctgttcatgaagaaaaaccagactctgcaaaatgaaatcttagggcacactccacgtgtggaggacgtcttacagcgagggcagcaattagtggaggccgcagagatagactgccaggatctcgaagagcgactaggccacctgcagtcaagctgggacagacttcgagaggccgcagctggaaggctgcagcgactccgggacgcgaacgaggcccagcaatattatctggatgcagacgaagcagaagcctggattggggaacaggaactctacgtgatttccgacgagatccctaaagacgaagaaggcgctatcgtaatgctgaaacgacacctccgccagcagcgtgcagtagaggactacgggcggaacattaaacagttggcttctcgggctcaaggacttttatctgcagggcaccccgaaggggagcagatcatccgtcttcaaggacaggtggacaagcactacgctggcctgaaggatgtggccgaagagcgaaaacgaaaacttgaaaacatgtatcatctgttccagttaaaacgggaaactgacgacctggagcaatggattagtgaaaaggaacttgtggccagttcacccgaaatggggcaggactttgaccacgttaccctgctccgcgataaatttagggatttcgcccgagaaactggcgccataggccaggagagagtagataacgtgaatgcatttatcgagaggctcatcgacgccggccattccgaggccgctacgatcgcagagtggaaagacgggcttaacgaaatgtgggccgacctgcttgagctcattgacaccagaatgcagctgctggctgcctcatacgacctgcatcggtatttctataccggtgcggaaattctggggctcatagatgaaaaacatagagagcttccggaggacgtgggcctcgatgcttctactgctgaatcgtttcatcgcgttcatactgccttcgaaagagagctacacctgttaggtgttcaggtacaacagttccaggacgtggcgacccgactccagactgcctatgcaggcgagaaagcggaggctatacagaataaggagcaggaggtctcagcagcttggcaggcccttttggacgcatgtgcaggcagacggacgcagctagtcgatactgctgacaagtttcgcttcttctccatggccagagatctgctttcctggatggagtcaatcatccgccaaatcgaaacccaagagcggccacgtgacgtgtcttccgttgagctgctcatgaagtatcaccagggcatcaatgctgagattgagacacgctccaagaactttagtgcctgtctagagctgggcgagtctctgctccagagacagcaccaggctagcgaagagatccgtgagaagttacagcaggtgatgagccggcgcaaggaaatgaatgagaagtgggaggcaaggtgggaacggctccgaatgctgctggaagtatgccagtttagtagagatgccagtgtggcggaggcttggttaattgcacaagagccatatttagcttctggggacttcggccatacagtggacagcgtcgagaagctaatcaagcggcacgaggcattcgagaaatcaaccgcatcctgggccgagcgcttcgctgctttggagaagccaaccaccgccagccgaggagggaggcgggacagccgggggggctcaagttttccgccgtgtggtcatagagagaatgttcctgggcagagtttggtgtcatttgtgtag

SEQ ID NO: 28090 - DNA, 6987 bp, Artificial Sequence
  derived and/or modified sequence
atgacctccgccacagagttcgaaaatgtgggcaatcagcctccttacagtagaatcaacgctaggtgggatgctccggatgacgaactggacaacgacaatagtagcgcaaggctcttcgagcggtcacgaattaaggcactggcagacgaacgagaggtggtgcagaaaaagacgttcacgaaatgggtcaattctcacttagctcgggttagctgcaggatcaccgacctgtacaaggatctgcgcgacggcagaatgttgatcaaattacttgaagtgttaagtggcgagatgttaccaaaaccaactaagggcaagatgaggattcactgtctcgaaaacgtggacaaggctttacagttcctcaaggagcaacgcgtgcacctcgaaaacatggggagccatgacatcgttgatggcaaccatagactcgtgctgggcctcatctggactatcatcctccgcttccagattcaggacatagtcgttcagacccaagaaggcagggagaccagatcagccaaggacgccctgcttctatggtgccagatgaaaaccgccggatatcctcacgtgaatgttacgaattttacctcctcatggaaagacgggctggcctttaatgctctgatccacaagcatcgccctgacctgatcgattttgacaagctgaaagattctaatgctcggcataacctggagcacgccttcaacgtggccgagcgtcagcttggaattatcccactgcttgaccctgaagatgtattcactgagaaccctgatgagaagtcgattattacgtacgtggtggccttctaccactacttctcgaaaatgaaggtgttggccgtggaggggaagagggtgggaaaggttatcgaccatgcaatagaaacagagaaaatgatagaaaaatattctgggcttgcctctgatttgctgacatggatcgaacaaaccatcaccgtgctgaactctcggaagttcgccaacagccttactggagtccagcagcagttgcaggcgttcagcacttacaggactgtcgaaaaaccgcctaagtttcaggagaaaggtaatctggaagttttactgttcacaattcaatctcgcatgagagcaaacaaccaaaaagtgtacacgccgcacgacggtaagctggtctctgatattaaccgtgcctgggaaagtctggaggaggccgagtatagaagggaattagccctgaggaacgagcttatccgccaggagaaactcgagcaacttgcccgacgcttcgaccggaaggcagccatgcgggagacctggctgtcagagaaccaacggcttgttgctcaggacaactttggatacgatctcgcagccgtagaggcggccaagaagaaacacgaggctattgagacggacaccgccgcatacgaagagagagtacgcgctctagaagatctcgctcaggaactggaaaaagaaaactatcatgaccaaaagaggatcaccgcccgaaaagataatatcctgagattatggagttatctccaggagctcctgcagtccaggagacaacgactcgaaacaaccctcgctttacaaaagctcttccaggacatgttgcatagcatcgactggatggatgaaattaaggctcatcttctatctgcagaattcggaaaacacctcctggaggtcgaggaccttctccaaaagcacaagctgatggaggctgatatcgctatccaaggggacaaggtaaaagcaattacggctgccacgctgaagtttaccgaagggaagggctatcagccttgtgacccacaggtcatccaggatagaattagccacttagagcagtgctttgaggaactatcaaacatggccgccggtaggaaggcccagcttgagcagtcaaagcgtctctggaagtttttttgggaaatggatgaggccgaatcctggattaaagagaaagagcagatttactcatccctcgactatggcaaagatctgacaagcgttctaatactgcagagaaagcataaagcgttcgaagacgaactgagaggattggacgctcatctagagcagatttttcaggaggcccacggaatggtggctaggaaacagtttggacatccccagattgaagcccggattaaagaagtttccgcacaatgggaccagctcaaagatttggccgcattttgcaagaaaaacctccaagacgccgagaacttttttcagttccagggtgacgccgatgacctcaaggcctggcttcaagacgcccaccgtctgctgagcggcgaggatgttggacaggatgagggagctacgagggcgctaggaaaaaaacataaggatttccttgaggagctggaagagagcaggggggtcatggaacatctggaacagcaagcccaaggcttccctgaggaattccgcgactcacccgacgtgacccacaggctgcaagccctcagggaactgtaccaacaggttgtagctcaagcagaccttcgacagcagcgattacaggaggcgctggatctgtacacagttttcggggaaaccgatgcttgcgagttgtggatgggcgagaaagagaaatggctggccgaaatggagatgccagatacattagaggacctagaggtcgtacagcaccgttttgacatattggaccaagagatgaagacactgatgacccagatagacggcgttaatttggccgccaatagtctggtggagagcggccaccccaggagccgagaagttaagcaataccaggatcatcttaacaccaggtggcaggccttccaaaccctcgttagcgagcggcgtgaagctgttgactctgcccttcgagtgcacaactactgcgtagactgtgaggagactagcaaatggatcacagataaaaccaaagtggtcgaaagcaccaaggacctgggtcgcgacctggcagggatcattgccattcagcgcaaactatctggtctggaacgggatgtagctgccattcaggctagagttgatgcactggagcgggagagtcagcagctaatggactcacaccctgagcaaaaagaggacataggtcagcgtcagaagcacttagaggagctatggcagggtctacagcagtcccttcagggacaagaggacctcttgggtgaggtgagtcagctccaggcctttttgcaggatttagatgacttccaagcctggctctcaatcacccaaaaggctgtcgctagtgaagatatgccagagagtctcccagaggcagagcagcttctgcaacagcatgcgggcatcaaggacgagatcgacgggcaccaggatagctaccagcgggttaaggagagcggcgaaaaagtgatacaggggcaaaccgatcctgaatacctgttacttgggcagcgtctcgaagggctggacacaggatggaatgctttgggaagaatgtgggaatccaggtctcacaccctggcgcagtgtttggggtttcaggaatttcagaaagatgctaagcaggcagaggctattctcagcaatcaagagtatactctggcccacttggaaccacccgattctctcgaggccgctgaagctggcatccgcaagtttgaggatttcctcggatccatggagaataatagagataaagttctaagtccagttgacagcggcaacaagctggtggccgagggaaacctctactcggataagattaaggaaaaggtccagctaatcgaagatcgccatcggaagaacaacgaaaaggcacaggaagcaagtgtgcttcttcgggataatctggagttgcaaaacttcttacagaactgtcaagagcttactctctggatcaacgacaagctcctaacttcccaagacgtttcctatgacgaggccaggaatctccacaacaagtggttaaaacaccaagctttcgtcgcagagttagccagccacgaggggtggcttgaaaacatcgatgcggagggcaaacagctgatggatgagaaacctcagtttaccgccctggtgtctcagaagcttgaggccctgcatcgcctatgggacgaattgcaggctacaaccaaggaaaagacacagcatttgtcagcagcgcggtcgagtgacctgaggctgcagacgcacgccgacctcaataagtggatctccgcaatggaagaccagctgcggagtgacgaccccggtaaggacctgaccagcgttaaccggatgctcgctaagctgaagcgggtagaggatcaagtcaacgtcaggaaagaggagcttggtgaactttttgctcaggtgcccagcatgggggaggagggcggggatgcagaccttagtatcgaaaagagatttttggacctgctcgagccacttggtcggcgcaaaaaacagctggagagttcaagagcaaaactccagattagccgggaccttgaggatgagacactgtgggtcgaggagcgactccccctggcgcagtccgcagattacggtacaaatttacagaccgtacaattgttcatgaaaaaaaaccaaactctgcaaaacgaaatcttgggacacacgcctcgagtcgaggacgtcttacaacggggtcaacagttagtagaggcagcagaaattgactgccaggatcttgaggagagactgggccacctgcaatccagctgggatagactgcgagaagctgccgccgggcgtttacagcggctaagggacgccaacgaggctcagcagtattacctggacgccgacgaggccgaagcctggattggcgaacaggagctctacgtcatctctgacgaaattccaaaagatgaggagggggccatcgtgatgctaaagaggcatctgaggcagcagcgcgcggtggaagattacggcaggaatattaaacagctcgcctctcgcgcgcagggactgctgtctgccggtcatcccgaaggagagcagatcattagactgcagggccaagtggataagcactatgcaggcctcaaagatgtagctgaagaacgaaagcgaaaacttgaaaatatgtaccacctgttccagctcaagcgagagacggacgatctggagcagtggatatcagaaaaggagttggtagcgagttcccctgagatgggtcaggattttgatcacgttacgctgcttcgtgacaaatttagagacttcgcccgtgaaacaggagcaatagggcaggagagagttgataacgtgaacgcattcattgagcgcctaatcgacgctggacatagtgaagccgccactatcgctgaatggaaggatggactaaacgagatgtgggctgatcttctggagcttatcgacacccggatgcagttgctggccgccagctacgaccttcatcgctatttctatactggagcagaaatactgggcttgatcgatgagaagcatcgagaactcccagaagacgtgggtcttgacgcgtccaccgcagagagctttcatcgcgtgcacaccgcatttgaacgggagctgcatctgctgggcgtgcaggtacagcagtttcaggatgtggccaccaggcttcaaacagcttatgctggggaaaaagccgaagcaatccagaacaaggagcaggaggtcagtgctgcctggcaggccctcttggatgcctgtgccggtcggcggacacagctggttgacaccgccgacaagtttaggttctttagtatggcaagggacctacttagttggatggaatcaataatccggcagattgaaactcaggaacggccacgggacgtgtcttccgttgaactcttgatgaagtaccaccaagggattaacgcggagatcgagacaaggtctaaaaatttttcagcatgcctcgagcttggcgaatccctgttgcagagacaacatcaagcctcagaggagatccgggaaaagttacagcaggtaatgagtaggagaaaagagatgaacgaaaaatgggaggctagatgggaacgcctcagaatgctgctggaggtctgccagttttcacgggatgcaagcgtagcagaggcctggttaatcgcacaagagccataccttgcatcgggggatttcggccacacagtggattctgtggagaagcttattaaacgacacgaagccttcgaaaaaagcacagcctcctgggccgagcggttcgctgccctggagaagcctactactttggaattgaaagaacgccagatcgctgagcgaccagccgaggagactgggccacaggaggaggagggcgaaacagccggggaggcccctgtctcacatcacgccgctacagagcgaacctcacctggcgaggaggaggggacatggccacaaaacctgcagcagccccccccacccggccaacacaaggatggtcagaagtccacaggagacgaacgccccacgactgagccgctatttaaagttttggatacccctctttccgagggagacgagcctgcgaccctccctgcccctagggatcacggccagtctgttcagatggaaggttatctggggaggaagcacgacctggagggcccaaacaaaaaagcatcaaacagaagctggaacaatctgtattgcgtgttacgcaatagtgagctgacgttttataaggatgcgaagaatttggcactcggcatgccctatcacggcgaggaaccactcgctctacgccacgcaatctgcgaaatcgcagccaattataaaaaaaaaaagcacgtgttcaaattgagactgtccaacggctccgaatggctcttccatggaaaggacgaggaggagatgctctcctggctccagggagtgtcaacagccataaacgagtcacagtccattcgggtgaaagcgcaaagccttcctctgccttctcttagcggtcctgacgctagtctcggtaagaaggacaaggaaaaaagattcagctttttcccaaagaaaaagtag

SEQ ID NO: 28091 - DNA, 6999 bp, Artificial Sequence
  derived and/or modified sequence
gaacccgctgacatgacgtctgcaaccgaattcgagaacgtgggcaaccagcccccttactcacgaataaacgccaggtgggacgcaccagatgacgagctggacaatgataatagctcagcaaggttattcgaaaggtctaggattaaagctctggccgacgagagggaagtggttcagaaaaagacatttacaaaatgggtaaactcacacctggctagggtcagctgtaggatcacggacctctacaaggatctgagagatggtcgtatgctgataaagcttctggaagtcctctccggtgaaatgctgcctaagcccactaaaggcaaaatgcgtattcattgcctggaaaatgtagacaaagccctgcagttcctgaaagagcagcgcgtccacctggagaacatgggctcccatgacatcgtagacggaaatcacaggctggtcctgggattgatctggacaattatcctgaggttccagatccaagacatcgtcgtgcagactcaggaagggcgggaaacacgcagcgctaaggatgccttgctgctctggtgtcagatgaaaactgctggctatcctcatgtcaatgtgacgaactttaccagtagctggaaggatgggctggcctttaatgcgctgatccacaagcatcggcccgacctgattgactttgacaaactgaaggatagtaatgctagacacaacttagagcatgctttcaacgtggcagaaaggcagctgggaataataccactgctcgaccctgaagatgtgttcaccgaaaatcctgatgaaaagtccatcattacctacgtggtggccttctaccactacttttcaaaaatgaaggttctggccgtggaaggtaagcgggtgggtaaagttatcgaccacgccatagaaacggaaaagatgatagaaaaatattccggcctggcgagcgatctgctaacgtggatagagcagaccattacagtcctcaatagccggaagtttgcaaactcccttactggcgtacaacagcaactgcaggcctttagtacgtaccgtacagttgagaagccacctaaattccaggaaaaaggaaacctggaagttctcctgtttaccatccagagcagaatgcgcgcaaacaaccaaaaggtatatacccctcacgatggcaagctggtaagcgatatcaaccgcgcttgggagtcattggaagaagcagaataccgccgagaactcgctctgcgcaacgaattgatcagacaggagaagctagaacagttggcccgaagatttgaccggaaagcagcgatgagagaaacatggctgagcgaaaatcaaagacttgtggcacaggacaactttgggtatgatctcgcagcagtggaggcggcaaaaaaaaagcacgaagctatagagacagacactgccgcgtacgaggagcgggtgagggcattagaggatttggctcaggaactggagaaggagaactatcatgatcagaagagaattactgccaggaaggacaatatattgcgcctatggtcatacctacaagaactcctgcaatcgcggcgacaacggctggaaactactctagcgttacagaagctctttcaggatatgttgcatagcatagattggatggacgaaattaaagctcacctgctttccgcagagttcgggaagcatttgctggaggtggaagatctgctgcagaagcataagttgatggaagctgacattgcaatccagggtgataaggtgaaagctatcaccgcagccactctgaagttcacagaaggcaagggttatcagccatgcgatccacaggtaatacaagaccgtatctcccatctggaacagtgcttcgaggagctgagcaatatggccgcggggagaaaagcacagctggaacagtctaagcgcttatggaagttcttctgggaaatggacgaggccgaaagttggatcaaagaaaaggaacagatttacagcagcctggattatggaaaggatttgactagcgtgctgattctccagcgcaaacataaggcatttgaggatgagctccgagggttggatgctcacctagagcagatattccaggaggcacacggaatggtcgctcgcaaacaattcggtcatccccaaattgaagccaggataaaagaggtgtccgcccagtgggaccaactgaaggatctggccgctttctgcaaaaaaaacttgcaggacgctgagaattttttccagttccaaggagatgcagatgatttgaaggcatggctgcaggacgcacatagattgctgagtggagaggatgtcggccaagatgagggcgcgacacgtgccctcggcaagaagcacaaggacttcctggaggagttggaagagtcgaggggggtaatggaacacttggagcaacaggcccaggggtttccagaggaattccgagatagcccggatgtcacacacagactccaggcactccgcgagttgtaccagcaggtagtggcccaggctgatctgaggcagcaacgactacaagaagccctggatctgtatacagtattcggtgagacagatgcctgcgagttatggatgggagaaaaggagaagtggcttgccgaaatggagatgcccgatactttggaggatctggaggtggtccagcacagattcgacatcctggaccaagaaatgaaaactctgatgacccagatcgatggagtgaacctggccgctaatagccttgtggagagtgggcacccccggagccgcgaggtgaagcagtatcaggatcacctgaatactcggtggcaggcctttcagacactggtcagtgaacgccgcgaggctgtggactcggccctgagggttcacaactattgtgtcgactgcgaagagaccagcaagtggattaccgataagacgaaggtggtggagtctaccaaggacctcgggcgcgacctggctggtatcatcgctattcagcggaagctatcggggcttgaacgagacgtggccgccatccaagcgcgagtggatgcactcgaacgggaaagtcagcagctgatggatagccatccagaacagaaggaggatattggacagaggcaaaaacatctggaggagctgtggcagggcctccagcagtcactccaaggccaggaggacttactgggcgaggtgtcccagcttcaggcttttctgcaggatcttgatgacttccaggcttggctgagtatcacacagaaggctgtggcaagtgaagacatgccagaatctcttcctgaagcagaacagctgctgcagcagcacgccggtatcaaggatgaaattgatgggcaccaagacagttatcaaagagtgaaggaatcgggcgaaaaggtcatccaggggcaaaccgaccctgagtatctactgttaggacagcgcctggagggacttgacaccgggtggaacgcacttggcaggatgtgggagtctcgctcccacaccttagcccagtgtctaggcttccaggagttccagaaggacgcgaagcaggcggaggccatcctcagcaaccaggaatacactcttgcacatctggagcctcctgattccctggaggctgctgaagctggtatacggaaattcgaagacttcttagggtcaatggagaacaatcgcgataaggtgctgtcaccggttgactccggaaacaagctggtcgccgagggaaacctgtactccgacaagataaaggagaaagtgcagctgatagaggacagacatcggaaaaataatgaaaaggcacaggaggcctcagttctgttacgcgacaacttagaactgcaaaactttttgcagaattgccaggaattgaccctgtggatcaatgataaactgctaaccagtcaggacgtgagttacgacgaagctcgtaatctacataacaaatggttgaagcatcaggcattcgtggctgaactggcgagtcatgagggttggctggaaaatatagacgccgaaggtaagcaattgatggatgagaagccgcagttcactgccctggtgtcccagaagctggaggcattacaccggctttgggacgaactacaagccacgaccaaggagaaaacacagcatctaagcgccgctcggtcaagcgacctgagacttcagacccatgcggatctgaataaatggatctcagccatggaggatcaactgaggagtgatgaccccgggaaagacttgaccagtgtcaaccgcatgcttgccaaactgaagcgggtcgaagaccaagtgaatgtcaggaaagaggagctaggggagcttttcgctcaggttccaagcatgggcgaagaggggggtgatgccgatctcagcatagagaagaggttcctggatctcttagagcctctcggaagaaggaagaagcagcttgaaagcagccgtgccaagctgcagatttcccgcgatttagaagacgaaactttgtgggtggaggagcgattaccgcttgcgcagagtgctgattatgggaccaatctgcaaactgtgcagctgtttatgaaaaaaaaccagacgctccagaacgagattctggggcacacgccacgcgtggaggacgtactacagagggggcagcagttggtcgaggccgcagagattgattgccaggatcttgaggaacgattggggcatttgcagagtagctgggaccgcctgcgggaagcagcggcggggaggctgcagcggctgcgggatgccaacgaggcccagcagtattacctagatgcagatgaggcggaagcgtggattggagagcaggagctgtacgtcatttccgacgagattccaaaggatgaagaaggcgccatagtaatgttaaaacgacaccttcggcagcagcgagctgtggaggattacggccgcaatatcaagcagctggcaagtcgtgcccaggggttgctgagcgcagggcacccagagggcgagcaaatcatccgtttgcaaggtcaggtggacaagcattatgctggcttgaaggacgtggccgaggagcgtaaacgaaaactcgagaatatgtatcacctgtttcagctcaagagagagaccgatgacctggagcaatggatcagcgagaaagagctggtcgccagtagcccagagatgggccaggacttcgatcatgtaacattgcttcgagataagttccgggatttcgcccgggagactggagctatcgggcaggaacgggtagataacgtgaacgcctttatcgagagactaatcgatgctgggcactctgaagccgcaaccatcgccgagtggaaggacggacttaatgagatgtgggcggatctgcttgagctgattgatactcgcatgcagcttctggcggcatcctatgatctacataggtatttctacacgggggccgaaattcttggtcttatcgacgaaaagcaccgggaacttccagaggacgtcggcctggacgcatccacagctgaatcatttcaccgcgttcacacagctttcgaacgcgaactgcatctgctgggcgtgcaagttcaacaatttcaggatgtggcaaccagactccagactgcctatgccggggagaaggctgaagccatccagaataaagaacaagaagttagcgccgcctggcaggcattgctggacgcctgcgcgggacggcgcacccagctcgtcgatactgccgacaagtttcgatttttctccatggcccgagatcttctctcctggatggagagtattatccgccagattgagacacaggagaggcccagagacgtctcgtcggtggaactcctgatgaagtaccaccagggcatcaacgcggaaattgaaactcggtccaagaacttctccgcttgtctggagctcggggagtctttgctccagaggcagcaccaagcctccgaagagattcgagagaaattgcagcaagtgatgtctcggcgcaaggagatgaatgagaaatgggaggcaaggtgggagagactgcggatgctgctcgaggtctgccagttctccagagacgcaagcgttgctgaggcctggctcatagcccaggagccctatctggcctccggagatttcggccatactgttgacagtgtggaaaaactcataaagcgacacgaggctttcgagaagtcaactgcctcctgggcagaaagattcgctgctttggagaagcccactacccttgaactgaaggagagacaaatagcagaaagacctgctgaagagacgggacctcaggaggaagaaggcgaaactgcaggcgaagccccggtgtcacatcacgccgccaccgaacggacgagccccggggaggaagaagggacttggcctcaaaatctgcagcagcccccacctccgggccagcataaagatgggcaaaagagcacgggtgacgagaggccaaccaccgaaccactgttcaaggtgctagacaccccactctccgagggcgatgagccggcaacactgcccgctcctcgcgatcacggacaaagtgtccagatggaaggatacctcgggaggaagcatgacctcgagggccccaacaaaaaggcttcaaatcgatcgtggaacaacttatattgtgtcctgagaaactcagaactgacattttataaggacgcgaaaaaccttgcactgggaatgccataccacggcgaggaaccactggccctgcgtcatgccatctgtgagatcgcagcaaactataagaagaaaaagcatgtgttcaagctgcgcctctcaaatggtagcgagtggctctttcacggcaaggacgaagaagaaatgctcagttggctgcaaggggtgtccacggccattaatgaaagccagtctattcgtgtgaaagcccaatctctgcccctccctagcttaagcggacctgatgctagtctgggcaagaaagataaagagaagaggttcagcttcttcccgaagaagaaatag

SEQ ID NO: 28092 - DNA, 6987 bp, Artificial Sequence
  derived and/or modified sequence
atgacctctgcaacagagttcgagaacgtgggcaatcagcccccttattcgcggatcaacgcacggtgggacgcccccgacgacgagctggataacgacaactcttcggccaggctgttcgagcggtcaaggattaaagcactggcagatgagcgggaggtggtccagaaaaagactttcactaagtgggtcaattcacatctggcaagggtttcctgcaggattaccgacctgtataaggacctccgcgatgggagaatgctgataaaacttctggaggtcctttccggagaaatgctgccaaaacccaccaaggggaagatgagaattcattgtctggaaaatgttgacaaggctctgcagtttctcaaggagcagcgcgtccatttggagaacatggggagccatgacatagttgacggcaaccacaggcttgtgctgggcctcatctggaccatcatattgcgatttcaaatacaagatattgttgtccagacacaagaggggagagaaacgcggtctgcaaaggatgccctgctgctgtggtgtcagatgaaaaccgccggttaccctcacgtcaatgtgactaattttacttcgtcttggaaggacggcctcgccttcaatgcactcatacacaagcaccggcccgacctgatcgactttgacaaactgaaagactccaatgcccgacacaacctggaacacgcattcaacgtggccgaacgccagctcgggattattccgttgttggatcccgaggacgtctttacagagaaccctgacgaaaaatctatcattacatacgtggtcgccttttaccactatttctccaagatgaaggtgctggccgttgaaggtaaacgcgtaggcaaagtgattgaccacgccatcgagacagagaaaatgatcgagaagtatagcggtttggcgagcgacctcctcacctggatcgaacagaccatcaccgtcctgaactcccgcaagttcgccaatagcctcacaggggtccagcagcagctccaagccttctcaacgtaccgaacggtggagaagccgccaaagtttcaggagaagggcaacttggaggtgctgctttttactattcagtctcgaatgagggctaacaaccagaaggtatatacaccacacgacgggaaattggtctccgacatcaaccgagcatgggagtccttggaggaagcagagtacagaagggagctggcactgaggaatgagttaatccgacaggagaaactagagcaactggcaagacgctttgacagaaaagccgccatgcgcgaaacctggttatctgaaaaccaacggctggtcgctcaggacaatttcggctacgacttggctgccgttgaagccgccaagaagaaacatgaagcaattgaaactgataccgcagcttatgaagagagagtcagagctctcgaggatctcgctcaggagctggagaaagaaaactaccacgaccagaagcgcataacagctagaaaggataatattttgcggctatggtcgtacctgcaggaactcctgcagtcccgccgtcagcgccttgagaccaccctcgctctgcagaaacttttccaggatatgttacactccatagactggatggacgaaattaaggctcatctcttgtccgctgagtttgggaagcatttgctggaggtggaggacctgctgcaaaagcataagctgatggaggcagatattgcaatacagggggacaaagttaaagccattaccgccgccacactcaagttcactgagggaaaaggctaccagccttgcgacccgcaggtaattcaagatcggattagccatctcgaacaatgcttcgaagagttatctaacatggcggctgggcgcaaggcccaacttgagcagtctaagagactttggaaatttttctgggaaatggacgaagcggaatcgtggattaaggaaaaagagcagatttacagctccttagactacggcaaagacctgacatcagtactcattctgcagcgcaaacataaggcctttgaggacgaactgagaggactggatgcacacctggagcagatatttcaggaagctcacgggatggtcgccagaaaacagtttggtcacccacagattgaagctcggataaaggaggtgtccgctcagtgggaccagctaaaagacttagcagctttttgtaaaaagaacctccaggatgcagaaaatttcttccagttccaaggagacgccgacgatcttaaagcttggctgcaggatgcacaccgcctgttgagcggcgaagatgtgggccaggacgaaggagcaacaagagctctcgggaaaaagcataaagactttcttgaggaacttgaggagtctcgtggagtgatggagcatctggagcagcaggctcaaggcttccctgaagagttcagagactccccagacgttacccatagactccaagccttacgtgagctctaccagcaggtcgtggcccaggcagacctacgacagcagcgcttgcaagaggcactcgacctgtataccgtgttcggtgaaactgacgcttgcgagctctggatgggtgaaaaggagaagtggctggctgaaatggaaatgcctgacaccctggaggatttggaggtggtccaacaccgattcgacattctggatcaagaaatgaaaactctcatgacacagattgatggcgtgaacctggcggctaactccctcgtcgagtccggccatcctcgaagccgggaggtgaagcaataccaggaccacctgaacactcgatggcaggctttccaaaccctggtgagcgaacgcagggaagcggtggactctgcgttgagagtgcataattactgtgtggattgtgaggaaacttccaagtggataacagacaaaacgaaggtggtggaatctacaaaggacctaggccgagacctcgcagggattatagcaatccaaagaaagctcagcggtctcgagcgagatgtggcagcaatccaagcccgggtggatgccctggagcgggaaagccagcaactgatggatagccaccctgaacagaaggaagatatcggccagcgccaaaagcatctggaagagctctggcagggcctccagcagtctcttcaaggacaagaagatttactgggcgaggtttctcagctgcaggcgttcttgcaagacctcgacgactttcaggcctggctcagtatcacccagaaagcagtggcttctgaggacatgccagaatctcttccagaggctgaacagctgttgcagcaacatgccggcatcaaggatgagatagatggccaccaggatagctaccaacgagtgaaagagagcggggagaaagtcattcagggacagaccgatcctgagtacctcctcctcggccagcggctagaagggttggacacgggatggaatgcactgggcagaatgtgggagagccgaagtcacacgcttgctcagtgtctcggattccaggagttccagaaagacgctaagcaagccgaagccatcttgtctaatcaggagtatacactggcccatcttgagccacccgactctctggaggcagctgaagccggcatccggaaatttgaagacttcctcgggagcatggagaacaaccgtgataaggtgctgtcacctgtggactctggcaataagctcgtcgcagaaggaaatctgtattcagataagatcaaagaaaaagtgcagctaatagaggatcggcaccgcaagaataacgaaaaggcccaggaagccagcgtgctgttacgggataacttagaactacagaattttctgcagaattgccaggaactcactctctggataaacgacaaactgctgacctcacaggacgtgagttatgacgaagccaggaaccttcataataagtggttgaaacatcaggcattcgtcgctgagctggcctcgcatgaagggtggttggaaaacatcgacgctgagggcaaacagctgatggacgagaaaccacagttcaccgctctggtgtcacaaaaacttgaagcactccacagactgtgggatgaactacaggccaccacaaaagagaaaacccaacatcttagcgcagctcggtctagcgatttgaggttacagacacatgctgatcttaacaagtggatcagcgccatggaagaccaactccggtcagacgatcccggcaaagacctgaccagcgtcaaccggatgctggctaaattaaagagagtggaggaccaggtcaacgttcggaaggaggaactgggagagttatttgcgcaagtcccttctatgggggaagaagggggagacgccgacctgagtatcgagaaacgatttcttgatctgctggagcctcttgggcgccggaagaaacagcttgagtctagtcgagcaaagttgcagatttctagagacctggaagatgagactttatgggtagaagagcgtctgcccctagcccagtcagctgactacgggacaaatctgcaaaccgttcagctgttcatgaagaagaaccaaacattacagaacgaaattttgggacatacgcctagggtagaagacgtgctgcagcgtggccaacagttagttgaggccgcagaaatcgactgccaggatctggaggaacgccttggccacctccagagtagctgggacagattgcgcgaagcagccgccggtcgcctgcagcgtttacgggatgcgaacgaagcccagcagtactatctcgacgcggacgaggctgaggcttggatcggtgagcaggaactatacgttatcagcgacgaaattcccaaagatgaggagggcgcaattgtgatgttaaagaggcacctgaggcagcagcgggcagtcgaggactacggccgcaacattaaacagctcgcttctagggcccaggggctgctgtcggccggacatccagaaggtgagcagatcatcagactgcagggtcaggtggacaagcactacgctgggctcaaggatgttgcagaggaaagaaagcgcaagctagaaaacatgtaccacctctttcagctgaaaagggaaaccgatgatttagaacagtggatcagcgagaaagagctggtcgcgtcttcgcccgagatgggacaggacttcgatcacgttactctgctgagggacaagtttcgcgattttgccagagaaaccggcgcaataggacaagagagggtcgataatgtgaatgcctttatcgaacggctcattgatgcagggcactccgaagccgccactattgcagaatggaaagatggtctgaatgagatgtgggcagatttactggagctcatagatacccggatgcaactgctggccgctagctatgacctgcatcggtatttttataccggagctgagattttaggtctcattgatgagaaacatagagaactcccagaggatgttggtttagatgcatccacagcagagtccttccaccgcgtgcatacagcgttcgagcgggagttgcacctgctcggggtgcaagttcaacagtttcaggacgtggctactagactgcagaccgcttacgccggagaaaaagccgaagccatacaaaataaggagcaggaggtatccgcagcctggcaggctcttctcgacgcctgcgccggaagacgaacgcaactcgtagacacagctgacaagtttaggttcttcagcatggcccgcgacttgttaagctggatggaatccatcatcaggcaaatcgagacccaggagaggcctagagatgtctcctccgtggaactcctcatgaagtaccaccagggcattaacgcagagatcgagacccgaagtaagaacttctccgcctgtctggaattgggagagagcctactccaacgacagcaccaggcttccgaagagatacgcgagaaattacagcaggtaatgagtagacgtaaagaaatgaacgaaaaatgggaggcaaggtgggaaagactgagaatgcttctcgaagtctgtcagttcagccgggacgccagtgtggcagaagcttggcttatcgcgcaggagccatacctcgccagtggagattttggccacacagtggatagcgtggagaaactcataaagcgtcacgaggcattcgagaagagtacagctagctgggcagagagatttgcagccctggagaagcctacaaccttggagctcaaggaacgccagatcgctgaacgtcccgctgaagaaactgggcctcaagaggaggagggggagaccgccggggaggcgcctgtgtctcatcatgccgcaacagaacggacttcccctggggaggaggagggcacatggccacagaatctacaacagcctcctccaccagggcagcacaaagacggtcagaaaagtactggggacgagcgccccacaacagagcccctcttcaaggtgctcgacacccctctgagcgagggcgacgaacctgccacactgcctgctcctcgggaccatgggcaaagcgtgcagatggaaggctatttaggacgcaaacatgaccttgaggggcccaacaaaaaggcctccaatcggagttggaataatctctattgtgtgctcaggaacagtgagttgactttctataaggatgctaagaaccttgccctgggcatgccttaccacggcgaggagcccctcgcgctgcggcatgctatttgtgagatagccgccaactacaagaagaagaagcatgtatttaagctccggctctcaaacggatccgaatggctttttcacggcaaagacgaggaggagatgttgagctggctacagggcgtttcaactgccatcaacgagagccagtccatacgggtaaaggcccagtctctccctttgccctctctgtcgggtccagatgcctcccttgggaagaaagacaaggagaagaggttttctttcttccccaaaaagaagtag

SEQ ID NO: 28093 - DNA, 3444 bp, Artificial Sequence
  derived and/or modified sequence
atggagaacaacagagacaaggtgctgagccctgtggacagcggcaacaagctggtggccgagggcaacctgtacagcgacaagatcaaggagaaggtgcagctgattgaagatagacacaggaagaacaatgagaaggcccaggaggcctctgtgctgctgcgggacaacctggagctgcagaacttcctgcagaactgccaggagctgaccctgtggatcaatgacaagctgctgaccagccaggatgtgtcctatgatgaggccaggaacctgcacaacaagtggctgaagcaccaggcctttgtggccgagctggccagccatgagggctggctggagaacattgatgctgagggcaagcagctgatggatgagaagccccagttcaccgccctggtgtcccagaagctggaggccctgcaccggctgtgggatgagctgcaggccaccaccaaggagaagacccagcacctgtctgctgcccggagcagtgacctgcggctgcagacccatgctgacctgaacaagtggatcagcgccatggaggaccagctgcggagtgatgatcctgggaaggacctgacctctgtgaacaggatgctggccaagctgaagagggtggaggaccaggtgaatgtgaggaaggaggagctgggggagctgtttgcccaggtgcccagcatgggagaggagggcggagatgctgacctgagcattgagaagcgcttcctggacctgctggagcccctgggccgcaggaagaagcagctggagagcagccgggccaagctgcagatcagccgggacctggaggatgagaccctgtgggtggaggagcggctgcccctggcccagagcgctgactatggcaccaacctgcagacagtgcagctgttcatgaagaagaaccagaccctgcagaatgagatcctgggccacaccccccgggtggaggatgtgctgcagaggggccagcagctggtggaggccgctgagattgactgccaggacctggaggagcggctgggccacctgcagagctcctgggaccggctgcgggaggccgccgccggccgcctgcagaggctgagagatgccaatgaggcccagcagtactacctggatgctgatgaggccgaggcctggattggagagcaggagctgtatgtgatcagtgatgagatccccaaggatgaggagggcgccatcgtgatgctgaagaggcacctgcggcagcagagagctgtggaggactatggcaggaacatcaagcagctggccagccgggcccagggcctgctgtctgctggccaccctgagggggagcagatcatccggctgcagggccaggtggacaagcactacgccggcctgaaggatgtggccgaggagaggaagaggaagctggagaacatgtaccacctgttccagctgaagcgggagacagatgacctggagcagtggatcagcgagaaggagctggtggccagcagccctgagatgggccaggactttgaccacgtgaccctgctgcgggacaagttccgggactttgcccgggagactggagccatcggccaggagcgggtggacaacgtgaatgccttcatcgagcggctgattgatgctggccacagcgaggccgccaccatcgccgagtggaaggatggcctgaatgagatgtgggccgacctgctggagctgattgacaccaggatgcagctgctggccgccagctatgacctgcaccgctacttctacacaggagctgagatcctgggcctgattgatgagaagcaccgggagctgcctgaagatgtgggcctggatgccagcacagctgagagcttccaccgggtgcacacagcctttgagcgggagctgcacctgctgggcgtgcaggtgcagcagttccaggatgtggccacccggctgcagacagcctatgctggggagaaggccgaggccatccagaacaaggagcaggaggtgtctgctgcctggcaggccctgctggatgcctgtgccggccgccgcacccagctggtggacacagctgacaagttccgcttcttctccatggcccgggacctgctgtcctggatggagagcatcatccggcagatcgagacccaggagcggcccagagatgtgtcctctgtggagctgctgatgaagtaccaccagggcatcaatgctgagattgagaccaggagcaagaacttcagcgcctgcctggagctgggggagagcctgctgcagaggcagcaccaggccagcgaggagatccgggagaagctgcagcaggtgatgagcaggaggaaggagatgaatgagaagtgggaggcccgctgggagcggctgaggatgctgctggaggtgtgccagttcagcagagatgcctctgtggccgaggcctggctgattgcccaggagccctacctggccagcggggactttggccacacagtggacagcgtggagaagctgatcaagagacatgaggcctttgagaagagcacagcctcctgggccgagagatttgctgccctggagaagcccaccaccctggagctgaaggagcggcagattgctgagaggcctgctgaggagaccggcccccaggaggaggagggggagacagctggggaggcccctgtgagccaccacgccgccacagagaggaccagccctggagaggaggagggcacctggccccagaacctgcagcagcccccacctcctggccagcacaaggatggccagaagagcactggagatgagcggcccaccacagagcccctcttcaaggtgctggacacccccctgtctgaaggagatgagcccgccaccctgcctgccccccgggaccacggccagagcgtgcagatggagggctacctgggcaggaagcatgacctggagggccccaacaagaaggccagcaacagcaagggggaggagggggaggagcggcgggagacagaggaggaggatgaggaggaggaggagacagagagcgtggccgtggagatgcagcagcacgccagccacgtgtcctggaacaacctgtactgtgtgctgaggaacagcgagctgaccttctacaaggatgccaagaacctggccctgggcatgccctaccacggggaggagcccctggccctgcggcatgccatctgtgaaattgctgccaactacaagaagaagaagcacgtgttcaagctgcggctgagcaatggaagtgagtggctgttccacggcaaggatgaggaggagatgctgtcctggctgcagggcgtgtccacagccatcaatgaaagccagagcatccgggtgaaggcccagagcctgcccctgcccagcctgagcggcccagatgccagcctgggcaagaaggacaaggagaagcgcttctccttcttccccaagaagaagtag

SEQ ID NO: 28094 - DNA, 6321 bp, Artificial Sequence
  derived and/or modified sequence
atgaccagcgccacagaatttgaaaatgtgggcaaccagcccccctacagccgcatcaatgcccgctgggatgccccagatgatgagctggacaatgacaacagcagcgcccggctgtttgagaggagccgcatcaaggccctggctgatgagcgggaggtggtgcagaagaagaccttcaccaagtgggtgaacagccacctggcccgggtgtcctgccgcatcacagacctgtacaaggacctgagagatggccgcatgctgatcaagctgctggaggtgctgagcggggagatgctgcccaagcccaccaagggcaagatgaggatccactgcctggagaatgtggacaaggccctgcagttcctgaaggagcagagggtgcacctggagaacatgggcagccatgacatcgtggatggcaaccaccggctggtgctgggcctcatctggaccatcatcctgcgcttccagatccaggacatcgtggtgcagacccaggagggccgggagaccaggtctgccaaggatgccctgctgctgtggtgccagatgaagacagctggctacccccacgtgaatgtgaccaacttcaccagctcctggaaggatggcctggccttcaatgccctgatccacaagcacaggccagacctgattgactttgacaagctgaaggacagcaatgcccggcacaacctggagcacgccttcaacgtggccgagcggcagctgggcatcatccccctgctggaccctgaagatgtgttcacagaaaatccagatgagaagagcatcatcacctacgtggtggccttctaccactacttcagcaagatgaaggtgctggccgtggagggcaagagggtgggcaaggtgattgaccacgccatcgagacagagaagatgattgagaagtacagcggcctggccagtgacctgctgacctggattgagcagaccatcaccgtgctgaacagcaggaagtttgccaacagcctgactggagtgcagcagcagctgcaggccttcagcacctacagaacagtggagaagccacccaagttccaggagaagggcaacctggaggtgctgctcttcaccatccagagcaggatgagggccaacaaccagaaggtgtacacccctcatgatggcaagctggtgtctgacatcaacagagcctgggagagcctggaggaggccgagtacagaagagagctggccctgagaaatgagctgatccggcaggagaagctggagcagctggccaggagatttgacaggaaggccgccatgagggagacctggctgtctgagaaccagaggctggtggcccaggacaactttggctatgacctggccgctgtggaggccgccaagaagaagcatgaggccattgaaacagacacagctgcctatgaggagcgggtgcgggccctggaggacctggcccaggagctggagaaggagaactaccatgaccagaagaggatcacagccaggaaggacaacatcctgcggctgtggagctacctgcaggagctgctgcagagccggcggcagaggctggagaccaccctggccctgcagaagctgttccaggacatgctgcacagcattgactggatggatgagatcaaggcccacctgctgtctgctgagtttgggaagcacctgctggaggtggaggacctgctgcagaagcacaagctgatggaggccgacatcgccatccagggcgacaaggtgaaggccatcacagctgccaccctgaagttcacagagggcaagggctaccagccctgtgacccccaggtgatccaggaccgcatcagccacctggagcagtgctttgaggagctgagcaacatggctgctggcaggaaggcccagctggagcagagcaagaggctgtggaagttcttctgggagatggatgaagctgagagctggatcaaggagaaggagcagatctacagcagcctggactatggcaaggacctgacctctgtgctgatcctgcagaggaagcacaaggcctttgaagatgagctgcggggcctggatgcccacctggagcagatcttccaggaggcccacggcatggtggccaggaagcagtttggccacccccagatcgaggcccgcatcaaggaggtgtctgcccagtgggaccagctgaaggacctggccgccttctgcaagaagaacctgcaggatgctgagaacttcttccagttccagggagatgctgatgacctgaaggcctggctgcaggatgcccaccggctgctgtctggagaagatgtgggccaggatgagggcgccacccgggccctgggcaagaagcacaaggacttcctggaggagctggaggagagcagaggagtgatggagcacctggagcagcaggcccagggcttccctgaggagttccgggacagcccagatgtgacccaccggctgcaggccctgcgggagctgtaccagcaggtggtggcccaggccgacctgcggcagcagaggctgcaggaggccctggacctgtacacagtgtttggagaaacagatgcctgtgagctgtggatgggagagaaggagaagtggctggccgagatggagatgccagacaccctggaggacctggaggtggtgcagcacagatttgacatcctggaccaggagatgaagaccctgatgacccagattgatggagtgaacctggccgccaacagcctggtggagagcggccaccccaggagccgggaggtgaagcagtaccaggaccacctgaacacccgctggcaggccttccagaccctggtgtctgagcggcgggaggccgtggacagcgccctgcgggtgcacaactactgtgtggactgtgaggagaccagcaagtggatcacagacaagaccaaggtggtggagagcaccaaggacctgggccgggacctggccggcatcatcgccatccagaggaagctgagcggcctggagagagatgtggccgccatccaggcccgggtggatgccctggagcgggagagccagcagctgatggacagccaccctgagcagaaggaggacatcggccagaggcagaagcacctggaggagctgtggcagggcctgcagcagagcctgcagggccaggaggacctgctgggggaggtgtcccagctgcaggccttcctgcaggacctggatgacttccaggcctggctgagcatcacccagaaggctgtggccagcgaggacatgcctgagagcctgcctgaggccgagcagctgctgcagcagcacgccggcatcaaggatgaaattgatggccaccaggacagctaccagagggtgaaggagagcggggagaaggtgatccagggccagacagatcctgagtacctgctgctgggccagaggctggagggcctggacaccggctggaatgccctgggccgcatgtgggagagccgcagccacaccctggcccagtgcctgggcttccaggagttccagaaggatgccaagcaggccgaggccatcctgagcaaccaggagtacaccctggcccacctggagcccccagacagcctggaggccgctgaggccggcatcaggaagtttgaggacttcctgggctccatggagaacaacagagacaaggtgctgagccctgtggacagcggcaacaagctggtggccgagggcaacctgtacagcgacaagatcaaggagaaggtgcagctgattgaagatagacacaggaagaacaatgagaaggcccaggaggcctctgtgctgctgcgggacaacctggagctgcagaacttcctgcagaactgccaggagctgaccctgtggatcaatgacaagctgctgaccagccaggatgtgtcctatgatgaggccaggaacctgcacaacaagtggctgaagcaccaggcctttgtggccgagctggccagccatgagggctggctggagaacattgatgctgagggcaagcagctgatggatgagaagccccagttcaccgccctggtgtcccagaagctggaggccctgcaccggctgtgggatgagctgcaggccaccaccaaggagaagacccagcacctgtctgctgcccggagcagtgacctgcggctgcagacccatgctgacctgaacaagtggatcagcgccatggaggaccagctgcggagtgatgatcctgggaaggacctgacctctgtgaacaggatgctggccaagctgaagagggtggaggaccaggtgaatgtgaggaaggaggagctgggggagctgtttgcccaggtgcccagcatgggagaggagggcggagatgctgacctgagcattgagaagcgcttcctggacctgctggagcccctgggccgcaggaagaagcagctggagagcagccgggccaagctgcagatcagccgggacctggaggatgagaccctgtgggtggaggagcggctgcccctggcccagagcgctgactatggcaccaacctgcagacagtgcagctgttcatgaagaagaaccagaccctgcagaatgagatcctgggccacaccccccgggtggaggatgtgctgcagaggggccagcagctggtggaggccgctgagattgactgccaggacctggaggagcggctgggccacctgcagagctcctgggaccggctgcgggaggccgccgccggccgcctgcagaggctgagagatgccaatgaggcccagcagtactacctggatgctgatgaggccgaggcctggattggagagcaggagctgtatgtgatcagtgatgagatccccaaggatgaggagggcgccatcgtgatgctgaagaggcacctgcggcagcagagagctgtggaggactatggcaggaacatcaagcagctggccagccgggcccagggcctgctgtctgctggccaccctgagggggagcagatcatccggctgcagggccaggtggacaagcactacgccggcctgaaggatgtggccgaggagaggaagaggaagctggagaacatgtaccacctgttccagctgaagcgggagacagatgacctggagcagtggatcagcgagaaggagctggtggccagcagccctgagatgggccaggactttgaccacgtgaccctgctgcgggacaagttccgggactttgcccgggagactggagccatcggccaggagcgggtggacaacgtgaatgccttcatcgagcggctgattgatgctggccacagcgaggccgccaccatcgccgagtggaaggatggcctgaatgagatgtgggccgacctgctggagctgattgacaccaggatgcagctgctggccgccagctatgacctgcaccgctacttctacacaggagctgagatcctgggcctgattgatgagaagcaccgggagctgcctgaagatgtgggcctggatgccagcacagctgagagcttccaccgggtgcacacagcctttgagcgggagctgcacctgctgggcgtgcaggtgcagcagttccaggatgtggccacccggctgcagacagcctatgctggggagaaggccgaggccatccagaacaaggagcaggaggtgtctgctgcctggcaggccctgctggatgcctgtgccggccgccgcacccagctggtggacacagctgacaagttccgcttcttctccatggcccgggacctgctgtcctggatggagagcatcatccggcagatcgagacccaggagcggcccagagatgtgtcctctgtggagctgctgatgaagtaccaccagggcatcaatgctgagattgagaccaggagcaagaacttcagcgcctgcctggagctgggggagagcctgctgcagaggcagcaccaggccagcgaggagatccgggagaagctgcagcaggtgatgagcaggaggaaggagatgaatgagaagtgggaggcccgctgggagcggctgaggatgctgctggaggtgtgccagttcagcagagatgcctctgtggccgaggcctggctgattgcccaggagccctacctggccagcggggactttggccacacagtggacagcgtggagaagctgatcaagagacatgaggcctttgagaagagcacagcctcctgggccgagagatttgctgccctggagaagcccaccacagccagcagaggaggaagaagagacagccggggcggcagcagcttccccccctgtggccacagagaaaatgtgcccggccagagcctggtgtcctttgtgtag

SEQ ID NO: 28095 - DNA, 6987 bp, Artificial Sequence
  derived and/or modified sequence
atgaccagcgccacagaatttgaaaatgtgggcaaccagcccccctacagccgcatcaatgcccgctgggatgccccagatgatgagctggacaatgacaacagcagcgcccggctgtttgagaggagccgcatcaaggccctggctgatgagcgggaggtggtgcagaagaagaccttcaccaagtgggtgaacagccacctggcccgggtgtcctgccgcatcacagacctgtacaaggacctgagagatggccgcatgctgatcaagctgctggaggtgctgagcggggagatgctgcccaagcccaccaagggcaagatgaggatccactgcctggagaatgtggacaaggccctgcagttcctgaaggagcagagggtgcacctggagaacatgggcagccatgacatcgtggatggcaaccaccggctggtgctgggcctcatctggaccatcatcctgcgcttccagatccaggacatcgtggtgcagacccaggagggccgggagaccaggtctgccaaggatgccctgctgctgtggtgccagatgaagacagctggctacccccacgtgaatgtgaccaacttcaccagctcctggaaggatggcctggccttcaatgccctgatccacaagcacaggccagacctgattgactttgacaagctgaaggacagcaatgcccggcacaacctggagcacgccttcaacgtggccgagcggcagctgggcatcatccccctgctggaccctgaagatgtgttcacagaaaatccagatgagaagagcatcatcacctacgtggtggccttctaccactacttcagcaagatgaaggtgctggccgtggagggcaagagggtgggcaaggtgattgaccacgccatcgagacagagaagatgattgagaagtacagcggcctggccagtgacctgctgacctggattgagcagaccatcaccgtgctgaacagcaggaagtttgccaacagcctgactggagtgcagcagcagctgcaggccttcagcacctacagaacagtggagaagccacccaagttccaggagaagggcaacctggaggtgctgctcttcaccatccagagcaggatgagggccaacaaccagaaggtgtacacccctcatgatggcaagctggtgtctgacatcaacagagcctgggagagcctggaggaggccgagtacagaagagagctggccctgagaaatgagctgatccggcaggagaagctggagcagctggccaggagatttgacaggaaggccgccatgagggagacctggctgtctgagaaccagaggctggtggcccaggacaactttggctatgacctggccgctgtggaggccgccaagaagaagcatgaggccattgaaacagacacagctgcctatgaggagcgggtgcgggccctggaggacctggcccaggagctggagaaggagaactaccatgaccagaagaggatcacagccaggaaggacaacatcctgcggctgtggagctacctgcaggagctgctgcagagccggcggcagaggctggagaccaccctggccctgcagaagctgttccaggacatgctgcacagcattgactggatggatgagatcaaggcccacctgctgtctgctgagtttgggaagcacctgctggaggtggaggacctgctgcagaagcacaagctgatggaggccgacatcgccatccagggcgacaaggtgaaggccatcacagctgccaccctgaagttcacagagggcaagggctaccagccctgtgacccccaggtgatccaggaccgcatcagccacctggagcagtgctttgaggagctgagcaacatggctgctggcaggaaggcccagctggagcagagcaagaggctgtggaagttcttctgggagatggatgaagctgagagctggatcaaggagaaggagcagatctacagcagcctggactatggcaaggacctgacctctgtgctgatcctgcagaggaagcacaaggcctttgaagatgagctgcggggcctggatgcccacctggagcagatcttccaggaggcccacggcatggtggccaggaagcagtttggccacccccagatcgaggcccgcatcaaggaggtgtctgcccagtgggaccagctgaaggacctggccgccttctgcaagaagaacctgcaggatgctgagaacttcttccagttccagggagatgctgatgacctgaaggcctggctgcaggatgcccaccggctgctgtctggagaagatgtgggccaggatgagggcgccacccgggccctgggcaagaagcacaaggacttcctggaggagctggaggagagcagaggagtgatggagcacctggagcagcaggcccagggcttccctgaggagttccgggacagcccagatgtgacccaccggctgcaggccctgcgggagctgtaccagcaggtggtggcccaggccgacctgcggcagcagaggctgcaggaggccctggacctgtacacagtgtttggagaaacagatgcctgtgagctgtggatgggagagaaggagaagtggctggccgagatggagatgccagacaccctggaggacctggaggtggtgcagcacagatttgacatcctggaccaggagatgaagaccctgatgacccagattgatggagtgaacctggccgccaacagcctggtggagagcggccaccccaggagccgggaggtgaagcagtaccaggaccacctgaacacccgctggcaggccttccagaccctggtgtctgagcggcgggaggccgtggacagcgccctgcgggtgcacaactactgtgtggactgtgaggagaccagcaagtggatcacagacaagaccaaggtggtggagagcaccaaggacctgggccgggacctggccggcatcatcgccatccagaggaagctgagcggcctggagagagatgtggccgccatccaggcccgggtggatgccctggagcgggagagccagcagctgatggacagccaccctgagcagaaggaggacatcggccagaggcagaagcacctggaggagctgtggcagggcctgcagcagagcctgcagggccaggaggacctgctgggggaggtgtcccagctgcaggccttcctgcaggacctggatgacttccaggcctggctgagcatcacccagaaggctgtggccagcgaggacatgcctgagagcctgcctgaggccgagcagctgctgcagcagcacgccggcatcaaggatgaaattgatggccaccaggacagctaccagagggtgaaggagagcggggagaaggtgatccagggccagacagatcctgagtacctgctgctgggccagaggctggagggcctggacaccggctggaatgccctgggccgcatgtgggagagccgcagccacaccctggcccagtgcctgggcttccaggagttccagaaggatgccaagcaggccgaggccatcctgagcaaccaggagtacaccctggcccacctggagcccccagacagcctggaggccgctgaggccggcatcaggaagtttgaggacttcctgggctccatggagaacaacagagacaaggtgctgagccctgtggacagcggcaacaagctggtggccgagggcaacctgtacagcgacaagatcaaggagaaggtgcagctgattgaagatagacacaggaagaacaatgagaaggcccaggaggcctctgtgctgctgcgggacaacctggagctgcagaacttcctgcagaactgccaggagctgaccctgtggatcaatgacaagctgctgaccagccaggatgtgtcctatgatgaggccaggaacctgcacaacaagtggctgaagcaccaggcctttgtggccgagctggccagccatgagggctggctggagaacattgatgctgagggcaagcagctgatggatgagaagccccagttcaccgccctggtgtcccagaagctggaggccctgcaccggctgtgggatgagctgcaggccaccaccaaggagaagacccagcacctgtctgctgcccggagcagtgacctgcggctgcagacccatgctgacctgaacaagtggatcagcgccatggaggaccagctgcggagtgatgatcctgggaaggacctgacctctgtgaacaggatgctggccaagctgaagagggtggaggaccaggtgaatgtgaggaaggaggagctgggggagctgtttgcccaggtgcccagcatgggagaggagggcggagatgctgacctgagcattgagaagcgcttcctggacctgctggagcccctgggccgcaggaagaagcagctggagagcagccgggccaagctgcagatcagccgggacctggaggatgagaccctgtgggtggaggagcggctgcccctggcccagagcgctgactatggcaccaacctgcagacagtgcagctgttcatgaagaagaaccagaccctgcagaatgagatcctgggccacaccccccgggtggaggatgtgctgcagaggggccagcagctggtggaggccgctgagattgactgccaggacctggaggagcggctgggccacctgcagagctcctgggaccggctgcgggaggccgccgccggccgcctgcagaggctgagagatgccaatgaggcccagcagtactacctggatgctgatgaggccgaggcctggattggagagcaggagctgtatgtgatcagtgatgagatccccaaggatgaggagggcgccatcgtgatgctgaagaggcacctgcggcagcagagagctgtggaggactatggcaggaacatcaagcagctggccagccgggcccagggcctgctgtctgctggccaccctgagggggagcagatcatccggctgcagggccaggtggacaagcactacgccggcctgaaggatgtggccgaggagaggaagaggaagctggagaacatgtaccacctgttccagctgaagcgggagacagatgacctggagcagtggatcagcgagaaggagctggtggccagcagccctgagatgggccaggactttgaccacgtgaccctgctgcgggacaagttccgggactttgcccgggagactggagccatcggccaggagcgggtggacaacgtgaatgccttcatcgagcggctgattgatgctggccacagcgaggccgccaccatcgccgagtggaaggatggcctgaatgagatgtgggccgacctgctggagctgattgacaccaggatgcagctgctggccgccagctatgacctgcaccgctacttctacacaggagctgagatcctgggcctgattgatgagaagcaccgggagctgcctgaagatgtgggcctggatgccagcacagctgagagcttccaccgggtgcacacagcctttgagcgggagctgcacctgctgggcgtgcaggtgcagcagttccaggatgtggccacccggctgcagacagcctatgctggggagaaggccgaggccatccagaacaaggagcaggaggtgtctgctgcctggcaggccctgctggatgcctgtgccggccgccgcacccagctggtggacacagctgacaagttccgcttcttctccatggcccgggacctgctgtcctggatggagagcatcatccggcagatcgagacccaggagcggcccagagatgtgtcctctgtggagctgctgatgaagtaccaccagggcatcaatgctgagattgagaccaggagcaagaacttcagcgcctgcctggagctgggggagagcctgctgcagaggcagcaccaggccagcgaggagatccgggagaagctgcagcaggtgatgagcaggaggaaggagatgaatgagaagtgggaggcccgctgggagcggctgaggatgctgctggaggtgtgccagttcagcagagatgcctctgtggccgaggcctggctgattgcccaggagccctacctggccagcggggactttggccacacagtggacagcgtggagaagctgatcaagagacatgaggcctttgagaagagcacagcctcctgggccgagagatttgctgccctggagaagcccaccaccctggagctgaaggagcggcagattgctgagaggcctgctgaggagaccggcccccaggaggaggagggggagacagctggggaggcccctgtgagccaccacgccgccacagagaggaccagccctggagaggaggagggcacctggccccagaacctgcagcagcccccacctcctggccagcacaaggatggccagaagagcactggagatgagcggcccaccacagagcccctcttcaaggtgctggacacccccctgtctgaaggagatgagcccgccaccctgcctgccccccgggaccacggccagagcgtgcagatggagggctacctgggcaggaagcatgacctggagggccccaacaagaaggccagcaacagatcctggaacaacctgtactgtgtgctgagaaattctgagctgaccttctacaaggatgccaagaacctggccctgggcatgccctaccatggagaggagcccctggccctgcggcatgccatctgtgaaattgctgccaactacaagaagaagaagcacgtgttcaagctgcggctgagcaatggcagcgagtggctgttccacggcaaggatgaggaggagatgctgtcctggctgcagggcgtgtccacagccatcaatgaaagccagagcatccgggtgaaggcccagagcctgcccctgcccagcctgagcggcccagatgccagcctgggcaagaaggacaaggagaagcgcttctccttcttccccaagaagaagtag

SEQ ID NO: 28096 - DNA, 6999 bp, Artificial Sequence
  derived and/or modified sequence
gagcctgctgacatgaccagcgccacagaatttgaaaatgtgggcaaccagcccccctacagccgcatcaatgcccgctgggatgccccagatgatgagctggacaatgacaacagcagcgcccggctgtttgagaggagccgcatcaaggccctggctgatgagcgggaggtggtgcagaagaagaccttcaccaagtgggtgaacagccacctggcccgggtgtcctgccgcatcacagacctgtacaaggacctgagagatggccgcatgctgatcaagctgctggaggtgctgagcggggagatgctgcccaagcccaccaagggcaagatgaggatccactgcctggagaatgtggacaaggccctgcagttcctgaaggagcagagggtgcacctggagaacatgggcagccatgacatcgtggatggcaaccaccggctggtgctgggcctcatctggaccatcatcctgcgcttccagatccaggacatcgtggtgcagacccaggagggccgggagaccaggtctgccaaggatgccctgctgctgtggtgccagatgaagacagctggctacccccacgtgaatgtgaccaacttcaccagctcctggaaggatggcctggccttcaatgccctgatccacaagcacaggccagacctgattgactttgacaagctgaaggacagcaatgcccggcacaacctggagcacgccttcaacgtggccgagcggcagctgggcatcatccccctgctggaccctgaagatgtgttcacagaaaatccagatgagaagagcatcatcacctacgtggtggccttctaccactacttcagcaagatgaaggtgctggccgtggagggcaagagggtgggcaaggtgattgaccacgccatcgagacagagaagatgattgagaagtacagcggcctggccagtgacctgctgacctggattgagcagaccatcaccgtgctgaacagcaggaagtttgccaacagcctgactggagtgcagcagcagctgcaggccttcagcacctacagaacagtggagaagccacccaagttccaggagaagggcaacctggaggtgctgctcttcaccatccagagcaggatgagggccaacaaccagaaggtgtacacccctcatgatggcaagctggtgtctgacatcaacagagcctgggagagcctggaggaggccgagtacagaagagagctggccctgagaaatgagctgatccggcaggagaagctggagcagctggccaggagatttgacaggaaggccgccatgagggagacctggctgtctgagaaccagaggctggtggcccaggacaactttggctatgacctggccgctgtggaggccgccaagaagaagcatgaggccattgaaacagacacagctgcctatgaggagcgggtgcgggccctggaggacctggcccaggagctggagaaggagaactaccatgaccagaagaggatcacagccaggaaggacaacatcctgcggctgtggagctacctgcaggagctgctgcagagccggcggcagaggctggagaccaccctggccctgcagaagctgttccaggacatgctgcacagcattgactggatggatgagatcaaggcccacctgctgtctgctgagtttgggaagcacctgctggaggtggaggacctgctgcagaagcacaagctgatggaggccgacatcgccatccagggcgacaaggtgaaggccatcacagctgccaccctgaagttcacagagggcaagggctaccagccctgtgacccccaggtgatccaggaccgcatcagccacctggagcagtgctttgaggagctgagcaacatggctgctggcaggaaggcccagctggagcagagcaagaggctgtggaagttcttctgggagatggatgaagctgagagctggatcaaggagaaggagcagatctacagcagcctggactatggcaaggacctgacctctgtgctgatcctgcagaggaagcacaaggcctttgaagatgagctgcggggcctggatgcccacctggagcagatcttccaggaggcccacggcatggtggccaggaagcagtttggccacccccagatcgaggcccgcatcaaggaggtgtctgcccagtgggaccagctgaaggacctggccgccttctgcaagaagaacctgcaggatgctgagaacttcttccagttccagggagatgctgatgacctgaaggcctggctgcaggatgcccaccggctgctgtctggagaagatgtgggccaggatgagggcgccacccgggccctgggcaagaagcacaaggacttcctggaggagctggaggagagcagaggagtgatggagcacctggagcagcaggcccagggcttccctgaggagttccgggacagcccagatgtgacccaccggctgcaggccctgcgggagctgtaccagcaggtggtggcccaggccgacctgcggcagcagaggctgcaggaggccctggacctgtacacagtgtttggagaaacagatgcctgtgagctgtggatgggagagaaggagaagtggctggccgagatggagatgccagacaccctggaggacctggaggtggtgcagcacagatttgacatcctggaccaggagatgaagaccctgatgacccagattgatggagtgaacctggccgccaacagcctggtggagagcggccaccccaggagccgggaggtgaagcagtaccaggaccacctgaacacccgctggcaggccttccagaccctggtgtctgagcggcgggaggccgtggacagcgccctgcgggtgcacaactactgtgtggactgtgaggagaccagcaagtggatcacagacaagaccaaggtggtggagagcaccaaggacctgggccgggacctggccggcatcatcgccatccagaggaagctgagcggcctggagagagatgtggccgccatccaggcccgggtggatgccctggagcgggagagccagcagctgatggacagccaccctgagcagaaggaggacatcggccagaggcagaagcacctggaggagctgtggcagggcctgcagcagagcctgcagggccaggaggacctgctgggggaggtgtcccagctgcaggccttcctgcaggacctggatgacttccaggcctggctgagcatcacccagaaggctgtggccagcgaggacatgcctgagagcctgcctgaggccgagcagctgctgcagcagcacgccggcatcaaggatgaaattgatggccaccaggacagctaccagagggtgaaggagagcggggagaaggtgatccagggccagacagatcctgagtacctgctgctgggccagaggctggagggcctggacaccggctggaatgccctgggccgcatgtgggagagccgcagccacaccctggcccagtgcctgggcttccaggagttccagaaggatgccaagcaggccgaggccatcctgagcaaccaggagtacaccctggcccacctggagcccccagacagcctggaggccgctgaggccggcatcaggaagtttgaggacttcctgggctccatggagaacaacagagacaaggtgctgagccctgtggacagcggcaacaagctggtggccgagggcaacctgtacagcgacaagatcaaggagaaggtgcagctgattgaagatagacacaggaagaacaatgagaaggcccaggaggcctctgtgctgctgcgggacaacctggagctgcagaacttcctgcagaactgccaggagctgaccctgtggatcaatgacaagctgctgaccagccaggatgtgtcctatgatgaggccaggaacctgcacaacaagtggctgaagcaccaggcctttgtggccgagctggccagccatgagggctggctggagaacattgatgctgagggcaagcagctgatggatgagaagccccagttcaccgccctggtgtcccagaagctggaggccctgcaccggctgtgggatgagctgcaggccaccaccaaggagaagacccagcacctgtctgctgcccggagcagtgacctgcggctgcagacccatgctgacctgaacaagtggatcagcgccatggaggaccagctgcggagtgatgatcctgggaaggacctgacctctgtgaacaggatgctggccaagctgaagagggtggaggaccaggtgaatgtgaggaaggaggagctgggggagctgtttgcccaggtgcccagcatgggagaggagggcggagatgctgacctgagcattgagaagcgcttcctggacctgctggagcccctgggccgcaggaagaagcagctggagagcagccgggccaagctgcagatcagccgggacctggaggatgagaccctgtgggtggaggagcggctgcccctggcccagagcgctgactatggcaccaacctgcagacagtgcagctgttcatgaagaagaaccagaccctgcagaatgagatcctgggccacaccccccgggtggaggatgtgctgcagaggggccagcagctggtggaggccgctgagattgactgccaggacctggaggagcggctgggccacctgcagagctcctgggaccggctgcgggaggccgccgccggccgcctgcagaggctgagagatgccaatgaggcccagcagtactacctggatgctgatgaggccgaggcctggattggagagcaggagctgtatgtgatcagtgatgagatccccaaggatgaggagggcgccatcgtgatgctgaagaggcacctgcggcagcagagagctgtggaggactatggcaggaacatcaagcagctggccagccgggcccagggcctgctgtctgctggccaccctgagggggagcagatcatccggctgcagggccaggtggacaagcactacgccggcctgaaggatgtggccgaggagaggaagaggaagctggagaacatgtaccacctgttccagctgaagcgggagacagatgacctggagcagtggatcagcgagaaggagctggtggccagcagccctgagatgggccaggactttgaccacgtgaccctgctgcgggacaagttccgggactttgcccgggagactggagccatcggccaggagcgggtggacaacgtgaatgccttcatcgagcggctgattgatgctggccacagcgaggccgccaccatcgccgagtggaaggatggcctgaatgagatgtgggccgacctgctggagctgattgacaccaggatgcagctgctggccgccagctatgacctgcaccgctacttctacacaggagctgagatcctgggcctgattgatgagaagcaccgggagctgcctgaagatgtgggcctggatgccagcacagctgagagcttccaccgggtgcacacagcctttgagcgggagctgcacctgctgggcgtgcaggtgcagcagttccaggatgtggccacccggctgcagacagcctatgctggggagaaggccgaggccatccagaacaaggagcaggaggtgtctgctgcctggcaggccctgctggatgcctgtgccggccgccgcacccagctggtggacacagctgacaagttccgcttcttctccatggcccgggacctgctgtcctggatggagagcatcatccggcagatcgagacccaggagcggcccagagatgtgtcctctgtggagctgctgatgaagtaccaccagggcatcaatgctgagattgagaccaggagcaagaacttcagcgcctgcctggagctgggggagagcctgctgcagaggcagcaccaggccagcgaggagatccgggagaagctgcagcaggtgatgagcaggaggaaggagatgaatgagaagtgggaggcccgctgggagcggctgaggatgctgctggaggtgtgccagttcagcagagatgcctctgtggccgaggcctggctgattgcccaggagccctacctggccagcggggactttggccacacagtggacagcgtggagaagctgatcaagagacatgaggcctttgagaagagcacagcctcctgggccgagagatttgctgccctggagaagcccaccaccctggagctgaaggagcggcagattgctgagaggcctgctgaggagaccggcccccaggaggaggagggggagacagctggggaggcccctgtgagccaccacgccgccacagagaggaccagccctggagaggaggagggcacctggccccagaacctgcagcagcccccacctcctggccagcacaaggatggccagaagagcactggagatgagcggcccaccacagagcccctcttcaaggtgctggacacccccctgtctgaaggagatgagcccgccaccctgcctgccccccgggaccacggccagagcgtgcagatggagggctacctgggcaggaagcatgacctggagggccccaacaagaaggccagcaacagatcctggaacaacctgtactgtgtgctgagaaattctgagctgaccttctacaaggatgccaagaacctggccctgggcatgccctaccatggagaggagcccctggccctgcggcatgccatctgtgaaattgctgccaactacaagaagaagaagcacgtgttcaagctgcggctgagcaatggcagcgagtggctgttccacggcaaggatgaggaggagatgctgtcctggctgcagggcgtgtccacagccatcaatgaaagccagagcatccgggtgaaggcccagagcctgcccctgcccagcctgagcggcccagatgccagcctgggcaagaaggacaaggagaagcgcttctccttcttccccaagaagaagtag

SEQ ID NO: 28097 - DNA, 3444 bp, Artificial Sequence
  derived and/or modified sequence
atggagaacaaccgggacaaggtgctgagccccgtggacagcggcaacaaattagtcgcagagggcaacctatactctgataagattaaggagaaggtacagctcatagaggatcgccacagaaaaaataatgagaaggctcaggaggcgtcagtgctgctgcgggataacctcgaactccagaactttctgcagaattgtcaagagcttactttgtggatcaacgacaaattgcttacttctcaggatgttagttacgacgaggctcggaacctgcacaacaagtggctgaaacatcaagcttttgttgccgagctggcctcccacgaaggttggctcgagaatattgatgccgaaggaaaacaacttatggatgagaagcctcagttcaccgctctagtttctcaaaaactggaggctttgcaccgactgtgggacgagctccaggccaccactaaagagaagacccaacacctgtccgcagcaagatcctcagaccttcggctgcagacccacgccgaccttaataaatggatttcggccatggaagaccagcttagaagcgacgacccgggaaaagacctcaccagcgtgaaccgcatgctcgctaagctcaagcgcgtggaagaccaagttaatgttcgtaaagaggaattgggggagctgttcgctcaggtgccatcgatgggcgaagagggtggcgatgcagaccttagtatcgagaagaggtttcttgatctgttagaacctttagggcgccgtaagaagcagttggaatcatcccgtgctaaactgcaaatatcaagagacttagaggatgaaacgttatgggtagaggagcggttacccctggctcaatccgccgactatggaactaatctccaaaccgtgcaactatttatgaagaagaatcagacactgcagaacgagattttgggccacacgcccagggtggaggacgttttgcagcggggtcaacagctcgtggaagcggccgaaatcgattgccaggacctggaagagagactggggcacctgcagtcttcgtgggaccgcctaagggaagccgcggcagggaggctccaacgactgcgtgatgccaacgaagcccagcagtattatttagatgctgacgaagcagaagcctggatcggcgaacaggagctttacgtgatcagtgacgaaattcctaaggacgaggaaggcgcaattgtgatgttaaagaggcacttacgacagcagagggcagtggaagattatggaaggaacattaaacaacttgccagtcgggcccagggcctgctgtccgccgggcacccagaaggggagcaaatcattcggctacagggacaagttgataagcactacgccggactgaaagatgtagcggaggaacgtaagcgcaaattggaaaatatgtaccacctcttccagctcaagcgcgagacagacgatctggagcaatggatatctgagaaggaactcgttgccagcagccctgaaatgggccaagattttgatcatgtcacccttttgagagataaatttagagattttgcaagggaaaccggcgccatcgggcaagagagagtggataacgtgaacgcatttattgaaagacttattgatgcaggacatagcgaggccgcaacaattgccgaatggaaggatggcttgaatgaaatgtgggcagacctcctggaactgatagatacccggatgcagttactcgcagcgagctatgacctgcaccggtatttttatacaggcgccgaaatcctgggccttattgacgagaagcacagggaactgcctgaggacgtgggacttgatgccagcacagctgagtctttccatagggtgcatacagcatttgagcgggaattgcacctgcttggagtccaggttcagcagtttcaagatgtggccacccgcctgcagaccgcttacgcaggggagaaggccgaggctatacagaacaaagagcaagaggtgagcgctgcttggcaggctcttctcgacgcctgtgccggtcggcgcacacagctggttgacaccgccgacaaatttcgtttcttctcaatggccagagacttgctcagctggatggaaagtattatccggcaaattgagactcaggaacggccccgggacgtctcctcagtcgagctgcttatgaagtaccaccagggcataaacgccgagatcgagacaaggagtaaaaacttcagtgcttgtttggaactcggtgaatctctgctgcagagacagcatcaggcttccgaggaaattcgcgagaaactgcaacaggtaatgtccaggcggaaagagatgaacgagaaatgggaagcccgttgggaacgcttaagaatgcttcttgaagtctgccaattcagcagagacgcaagtgttgctgaggcatggttgatcgcacaggaaccttatctcgcaagcggagattttggacacacggttgactccgttgagaagctgattaaacgacacgaggcctttgagaagagcaccgcctcgtgggcggaacgtttcgccgctctggagaagcccaccacccttgagttgaaagaaaggcagatcgcagaacgtccagccgaagagaccgggccgcaggaagaagagggtgagactgccggggaagcaccggtctcacatcacgcagcgacagaaaggacatcgcctggagaggaggaaggcacctggccgcaaaacctgcagcaaccgccaccacccggccagcacaaagatggacaaaaatcaactggcgacgaaagacccactacagaacctttgtttaaggtcctagacacacccttgtctgagggtgatgagcccgctactttgccggcgccccgggatcacggtcaatctgttcagatggaaggctacctgggacgtaagcatgacctggaggggcctaacaaaaaggcttccaactccaaaggagaggaaggtgaggagcgtcgtgagaccgaagaagaggacgaagaagaagaggagacagagtcagtcgccgtggaaatgcaacagcacgcaagccacgtgtcctggaataatctgtactgtgttctgcgcaattccgagcttaccttttacaaggatgcaaagaacctcgcactgggcatgccatatcacggggaagagccgctggctctccgacacgcaatttgcgaaatcgctgcaaattataagaagaagaagcacgtgttcaagttacggctctccaatggatccgagtggctattccatgggaaagatgaggaagaaatgctgtcctggctccaaggagtaagcacagccattaacgaaagccaatccatcagggtcaaggctcagagcctccctctcccttctctctctggcccagacgcatctttaggcaagaaagataaggaaaaacgcttcagctttttcccaaaaaagaagtag

SEQ ID NO: 28098 - DNA, 6321 bp, Artificial Sequence
  derived and/or modified sequence
atgaccagcgccaccgagttcgagaacgtgggcaaccagcccccctattctaggatcaatgccagatgggatgccccggacgacgaactggacaacgacaactcttctgcccggctgtttgaacgaagtaggataaaagctctggccgacgagagagaagtggtgcagaaaaagacgttcactaagtgggttaattcccacctcgcacgtgtctcatgtcggattaccgatctttacaaagacttgcgagacgggcggatgctaatcaaattacttgaggtgctttctggagaaatgctgcctaagccaaccaaaggcaaaatgagaatccactgcttggaaaatgtcgacaaggctcttcaattcctgaaagagcaacgcgtacacttggagaacatgggctcccacgacatcgtggacggcaaccaccgccttgtattgggactcatttggactatcatcttgcgtttccagatccaggacatcgtcgtgcaaacccaagaggggagggagacccgatctgctaaggacgcactgctgctgtggtgccagatgaaaacggccggttatccgcacgtaaacgtgaccaattttacgtcttcctggaaagatggcttggccttcaatgcgttgatccacaaacaccgccctgatctgatcgactttgacaagctcaaggatagcaatgctagacataacctcgaacacgccttcaatgtagccgaacggcagcttgggatcatcccgttgctggatcccgaagacgtctttacagagaatcctgacgaaaagagcataatcacgtatgtggtcgcattttatcactatttcagcaagatgaaggtactggccgtggaaggaaagcgtgtcggcaaagtgatcgaccatgcaatcgagaccgagaagatgatcgagaagtactccggtttggccagcgatctgttgacctggattgaacagaccattacagtgctgaacagcaggaagtttgccaattctctgacaggcgtacagcagcagcttcaggcattcagtacctatcggaccgttgaaaagcctcctaagttccaggagaagggaaatttggaggttctcctttttaccattcaatcacgcatgagggcgaataatcagaaagtgtatacgccacacgacggcaaacttgtgtcagatatcaatagggcatgggaatccctcgaggaggccgagtaccggcgagaactggctttgagaaatgaactgattaggcaggaaaaactcgagcagttggctaggaggttcgaccgtaaggcggccatgcgggaaacttggctctccgaaaatcagcgactcgtggcccaggataattttggctacgacctagccgctgttgaggcagccaagaagaaacacgaggctatagaaaccgacactgccgcatacgaggagagagttagagcccttgaggacctcgcccaggaattggaaaaagaaaactaccacgaccagaagcgtatcaccgctcgtaaggacaacattctgcgtttgtggagctaccttcaggaactcctgcaatcccggcgccaaagactggaaacgacactagctttgcagaaactcttccaagacatgcttcattctatagattggatggatgagataaaggctcatctgctgtcagccgagttcggcaagcacttactggaggttgaagacctgctccagaagcacaagctgatggaggccgacatcgctattcagggagacaaggtcaaagccattacggcggccacactcaagtttaccgaggggaagggataccagccctgtgatccccaggtgattcaagatcggattagccacctggagcagtgctttgaggaactgagcaacatggctgcgggccgcaaggcacagctggagcagagcaaacgactgtggaaattcttctgggaaatggatgaggctgaatcctggattaaggaaaaggaacagatctacagtagccttgattacgggaaggacctcacctctgtgctaatccttcagagaaaacataaagcatttgaggatgaactcaggggtctcgatgcccatttggagcagatctttcaggaggcacacgggatggtggcaagaaaacagttcgggcatccccagattgaagcccggattaaggaagtttccgcacagtgggaccaactcaaagacctggctgccttctgcaagaagaacctccaggacgccgaaaacttctttcagtttcagggtgatgcagacgacttaaaggcctggctacaggacgctcacaggctcctctctggtgaagatgtcggccaggacgaaggtgccactagagcattaggcaaaaagcacaaggactttctcgaggaactagaagaatctaggggtgtgatggaacatctggagcagcaggcacaaggatttcccgaagaatttcgcgattcccctgatgtcacccacaggcttcaagcactgcgcgaactgtatcagcaggtagtggcgcaggccgacctccgccagcagagattgcaggaagccttggatctttatactgtgtttggggaaacggacgcctgcgaactgtggatgggagagaaagaaaaatggctggctgagatggaaatgcctgacactcttgaggacctggaggtagtccagcaccggttcgacatactggaccaagaaatgaagacactgatgactcaaattgacggagtgaacttggcagccaacagtcttgtcgagagcggccaccctcgctctagagaggtgaaacagtaccaggaccatctgaatacacggtggcaggctttccagacactcgtgtcagagaggcgagaagctgtcgacagcgccctgcgcgtgcacaactattgcgtggactgcgaggagacctctaagtggatcactgataaaaccaaagtggtcgaaagcacaaaagatctaggtcgcgacctggctggaattattgccatccagagaaagctgtccggcctggaacgggatgtagcagcaatacaagcaagagtggacgccctcgaaagagagtcccagcaattaatggattcccacccggaacagaaggaagacattggtcagcgacagaagcatctagaggagctatggcagggcctgcagcagagcctgcaaggacaggaagatctcctcggtgaggtttcacagctgcaggcctttttacaggatctggatgatttccaggcatggctttctataacccagaaggcggttgctagtgaagacatgcccgagtccctgcccgaggctgaacaacttctgcagcagcatgccgggattaaggatgagatcgatggccaccaggactcttaccagcgagtcaaggagtccggtgagaaagtaatccaaggccagactgacccagagtatctgcttttgggccagaggctggagggactcgatactggctggaatgctttggggcgtatgtgggagagccgctcccatacattagcccagtgtcttgggtttcaggagttccagaaagacgccaagcaagctgaagctatcctgtcgaaccaggagtacacattggcacacctcgaacctcccgattcattagaagcagccgaggccggaatccgtaagtttgaggactttctcgggtcaatggaaaataacagggacaaggtcctgagccctgtggacagcggcaataaactcgtggccgagggtaacctgtattcagataagatcaaggagaaggtccagctgattgaagataggcatcggaaaaacaatgaaaaagcacaggaggcaagtgtccttttacgcgataacctggagctgcagaacttcttgcagaattgccaagaactaacactctggataaacgataagctactgacctcccaagacgtgtcctatgatgaggcccgtaatctacacaataagtggcttaaacaccaggcttttgtggccgaactggcttcacatgagggctggttagaaaatattgatgccgagggaaaacagctgatggacgaaaagcctcagtttactgccttagtgtcgcagaaacttgaagccctgcaccgcctctgggacgaattgcaggctacaaccaaagaaaagacccagcatctttccgccgctcgctcttccgacctccggttgcagactcatgcagacttaaacaaatggatttctgcaatggaagatcagctgcgatctgacgacccaggtaaagacctaacttccgtcaaccgtatgctggccaagctcaagcgggtagaggaccaggtgaacgtcaggaaagaagagttaggggagctcttcgctcaggtcccctctatgggagaggaggggggcgatgccgacctgtccattgagaaaagattcctggatcttctcgaacccttgggcaggcggaagaagcaactggaatcgagccgcgccaagctccagatttccagagatctggaagacgaaaccttgtgggttgaggagaggcttcccctcgcacagtcagccgattatggaactaacctccagacggttcagctgttcatgaagaagaatcagactctacagaatgagatactgggtcatacccctcgggtggaagacgtgctgcagcggggccaacagctggtagaggcggcagagatcgactgccaggacctggaggaacgcctggggcatctgcagagctcgtgggacagattaagggaggccgccgcggggcggttgcagcgactgcgcgatgctaatgaggctcaacagtattatttggacgcggacgaagcagaggcatggattggtgagcaggagctttatgtgattagcgatgagatacccaaagatgaggagggggccatcgtaatgttaaaacggcatctaagacagcaacgggccgtcgaggattatggcagaaatattaagcagctcgcctcccgagcacagggtcttttgtccgccggccaccctgaaggtgagcagattatcagacttcagggccaggtggataagcattatgctgggctgaaagacgttgccgaggagcggaaaagaaaattagagaatatgtaccatctgttccaattaaagcgcgagaccgatgacttagagcagtggatcagcgagaaggaactagtggcaagcagccctgagatggggcaggacttcgaccatgtgaccctgttgcgggacaagtttagggacttcgctcgagaaactggggcaattggccaggagagggtcgataacgttaatgcttttatcgaaaggctgatcgatgccggccattcggaggcggccaccatcgccgaatggaaggatggattaaacgaaatgtgggcagacctgttggagttgatcgacacacgaatgcagttactggctgcgagttacgaccttcacaggtacttctacacaggtgccgagattttagggctgatcgacgaaaaacatagagagctgcctgaagatgtcggtttggacgctagcacagcggagtcctttcaccgggttcacacagctttcgagagggagcttcaccttcttggcgttcaggttcagcaattccaagatgtggctactaggctgcagaccgcttacgctggggaaaaggccgaggccatccagaataaggagcaggaagtgagcgcggcttggcaagctctactcgacgcctgtgccggccgtcggacgcagttagtcgataccgctgacaagtttaggttcttctcgatggcacgggatctcctcagctggatggagtccattatacgtcagattgagactcaggagaggccgagagacgtttcatccgtggagcttctgatgaaataccaccaaggcataaacgccgagatcgaaaccagatctaagaatttctctgcctgcttggaactgggggaatccttgctgcaaaggcagcaccaagcgtccgaggagattagagagaaattacagcaggtgatgagtcgcagaaaagagatgaacgagaagtgggaggcccggtgggagcgactccggatgctgctggaagtgtgtcagttcagccgcgacgcctctgttgcagaggcgtggctgatcgcccaggagccctacttggcatccggtgattttggtcataccgttgattcagtggaaaagttgattaagcgtcacgaggccttcgaaaagtccacagccagctgggccgagcgcttcgccgccctcgagaagccaactaccgcttctagaggagggcgccgcgattcccgggggggatccagctttcccccctgcggccatcgcgagaacgtgcctggtcagtccttagtgtcctttgtgtag

SEQ ID NO: 28099 - DNA, 6987 bp, Artificial Sequence
  derived and/or modified sequence
atgaccagcgccaccgagttcgagaacgtgggcaaccagcccccctacagtcgcattaacgcccgctgggacgcaccagatgatgagcttgataatgacaattcctctgcaaggctctttgagaggtcccgaatcaaggcgctggccgatgagcgggaagtcgtgcagaagaagacgttcacaaaatgggtaaactctcacctggcccgggtttcatgtcggatcactgacttgtacaaagatcttcgtgacggacgcatgctcatcaaactcctggaggtgctttcaggggaaatgttacctaagccaactaagggcaaaatgcgaattcactgtctggaaaatgtcgataaggcactgcaatttcttaaagaacagagggtgcatctggaaaatatgggaagccacgacatcgtggacggtaaccaccgtctggtgctcggactcatttggactatcatcctgcgtttccaaatccaggacattgtcgtgcaaacccaggagggtagggaaaccaggtcggccaaggatgccctgctcctttggtgtcagatgaaaactgctggctacccccacgttaacgtgaccaacttcacgagttcttggaaagacgggctcgccttcaatgctctcattcacaagcatcgtccggacctgattgatttcgataaactgaaagattctaacgcaaggcataaccttgagcacgccttcaatgtggcagaacgccagctaggcatcatccccttactggacccagaggacgtcttcacggaaaatcctgacgagaaatccattataacctacgttgtggccttttaccattatttttccaagatgaaggtgctagccgtcgagggcaagcgcgtaggaaaagttatagaccatgctatcgagactgagaaaatgatagaaaaatactctggactggcatctgatcttctgacatggattgagcagacaattaccgtgctgaactcccgcaaatttgccaactccttgacaggcgtccaacagcagctgcaggcctttagcacgtaccgtacggtggaaaaaccacccaagttccaggaaaagggaaatctggaggtgctcttgtttaccatccagagcagaatgcgcgccaacaatcagaaggtgtataccccccacgacgggaagctagtttctgatataaatagagcttgggagagcttagaagaagccgagtaccggcgagagcttgcccttcggaacgagctgatccggcaggaaaaacttgagcagctagcccgcaggtttgacagaaaagcggccatgagagaaacctggctgtcggagaatcagcgattggtcgcccaggacaacttcgggtatgatctcgctgcagtggaagctgcaaagaagaaacacgaggctatcgagacagatacagccgcatatgaggagcgtgtgcgtgcactagaggacctcgcccaggagttggaaaaggaaaattatcatgatcaaaaaaggatcaccgcgcggaaggataacatcctgagactctggagctacctccaagagctgctgcagagccgacggcagcggctcgagactacactcgccctgcagaaactctttcaggacatgctccattccatcgattggatggacgagatcaaagctcatcttttatccgccgagttcgggaagcacctgctggaagtcgaggatctcctacagaagcataaattaatggaggccgacattgccatacagggggataaagttaaggcaattacagccgcaaccctgaaatttactgagggtaagggctatcaaccttgcgatccacaggtcatccaggaccgcatctctcacctagaacagtgcttcgaggagctgtcaaatatggccgctgggcgaaaggcccagctggagcagtcgaagagactctggaagttcttctgggagatggacgaagccgagtcttggattaaagagaaggagcaaatctattcgtctcttgattatggaaaagacctaacttccgtacttatactgcagcggaaacacaaagcatttgaagacgagctgcgcggtcttgacgcacacttggagcagatcttccaggaggcccatgggatggtggccagaaagcaattcggccacccacagatcgaggccagaattaaagaggtgtctgcccagtgggatcagttaaaggatctggcagccttttgtaaaaagaatctccaggacgccgagaatttttttcagttccagggtgatgctgatgatcttaaggcatggctccaagacgcacacagattgctttctggggaggatgtcggccaagacgaaggggcgacccgggcactggggaagaagcacaaggactttctcgaggagctggaagagtccagaggggttatggaacaccttgagcaacaagctcagggattcccggaagagtttagggactcccccgatgtgacacacagactgcaggccctacgggagctgtaccagcaggtggtggcacaagcagatctgaggcagcagcggttgcaagaggccctcgacttgtacaccgtgttcggggagaccgatgcctgcgagctgtggatgggtgagaaggaaaagtggctggctgagatggagatgccagacactctggaagatctggaggtcgttcagcacaggttcgacattctagaccaggagatgaaaaccttgatgacacagatcgatggcgtgaatcttgctgctaactcattggtagaatccggccacccgagaagtcgcgaggttaaacaatatcaggaccatcttaatacccgatggcaggcgttccagacactggtgagtgagaggagggaggctgtggactcagccctgcgagtgcacaattactgtgtggactgcgaagaaacaagcaagtggattactgacaaaacaaaggtggtggaatcgaccaaggatctcgggagggatctggctggcataattgccatccagcggaaactgtcagggcttgagagggatgtagccgcaatccaggcccgcgtcgacgctcttgagcgcgagtctcagcagctgatggactctcatcctgagcaaaaggaggatatcggacagaggcagaagcacctggaagagctctggcagggcctgcaacagtcactgcagggtcaggaggacctccttggtgaagtgagtcagcttcaagcttttctccaggaccttgatgatttccaggcctggctgtcaatcacacagaaggctgtcgcaagcgaggacatgccagaatcactccccgaggccgagcagctccttcaacagcatgccgggatcaaggacgagatcgacggacatcaggactcataccagcgcgtgaaagaaagcggtgagaaggtcatccagggacagaccgatcccgaatacctgctcttagggcagcggctagagggccttgacacaggctggaacgccctcggacgtatgtgggagagtaggtcacatacactagctcagtgtcttggtttccaagagttccaaaaagatgccaaacaggccgaggccatattatccaatcaggagtatactcttgctcatcttgagcctcccgattcactggaagccgccgaggctgggatacgaaagtttgaggatttcttgggttccatggagaacaaccgggataaggtacttagccctgtcgattcagggaataagctggtggcagaaggtaacctgtactctgataagatcaaggagaaggtgcagctcattgaggacaggcatcgcaaaaacaatgaaaaggcacaagaagctagcgttctcctacgggataacctggagcttcagaactttcttcaaaattgccaagagctgaccttgtggattaacgacaagttgttaacatcgcaggacgtttcctatgacgaagccagaaacctgcacaacaagtggcttaagcaccaggccttcgtggctgaacttgcttctcacgaggggtggttggagaatatagacgccgaagggaaacagctaatggacgaaaaaccacagtttaccgcactggtgtcccagaagttagaggctctgcataggctgtgggatgaattgcaggctactactaaagaaaaaactcagcacttgtctgccgccagaagctcagaccttagactgcaaacccatgcagaccttaacaagtggattagtgcaatggaagaccagctccggtccgacgatcccgggaaagacttgacctcggtgaaccggatgttggcgaagctgaagagagtcgaagatcaggtgaacgtccgcaaagaagagctgggggagcttttcgcccaggtgccgtcaatgggagaggagggcggcgacgcagacttatcaattgagaaaaggttcctggacctgcttgagcccttgggccgaagaaagaaacagttggagtcctcacgggcaaagctacagatctccagggatctggaggacgagaccctgtgggtggaggagcgactgccactcgcccagagcgccgactatggaacgaacctgcagaccgttcagctgttcatgaagaaaaaccagactcttcaaaacgagatcctgggacatacaccccgggtggaggacgtcctgcagcgaggtcagcaactggtggaggccgccgagattgactgccaggatctggaagagcgccttggacatctgcagtcctcttgggatcgcctccgggaagccgccgccggccgactgcagcgtctgcgggatgcgaacgaggcccagcagtattacctggacgccgacgaggcagaggcctggatcggagaacaggaattatacgtgatatcagacgagattcctaaggacgaagagggcgctattgtcatgctgaagcggcacctgaggcagcagagggctgtggaagactatgggcggaatatcaagcagcttgcatctagagctcaagggttgctttccgccggtcacccagagggagagcagatcattaggcttcagggacaggtagataagcattacgcagggctgaaagatgtagccgaagagagaaagagaaagttagagaatatgtaccatctgtttcaactcaagagagaaactgacgatttggagcagtggatttccgaaaaggagctagtggctagctcgcccgagatggggcaggacttcgaccacgtcacactgctgcgcgataagtttcgggactttgccagagagaccggggcgatagggcaggaacgcgtagataacgtgaatgccttcatcgagcggctcattgatgcgggccattctgaggccgcgactattgccgagtggaaagacggtttgaacgagatgtgggccgatctgctggaacttattgacactcgcatgcaactgttggctgctagctacgacctgcatagatacttctatactggtgctgaaattctgggactgatcgacgagaagcaccgcgagctgcctgaggacgttgggttagacgcttcaaccgctgaatcattccatcgcgttcacaccgctttcgaacgcgagctgcaccttttgggggtccaagtccagcaatttcaggacgtggcgacccgattgcagactgcctacgccggagagaaagcagaggctattcagaataaggagcaagaggtctcagccgcctggcaggccttattggacgcgtgcgccggcaggcgcacacaactcgtggatacggcagacaagttcaggttttttagcatggcacgcgatctgctcagctggatggaatccatcataagacagattgagacccaggagcgcccaagggatgttagttccgtggagctgctgatgaagtaccatcagggaatcaacgcagaaattgaaaccagatcaaagaatttcagcgcctgcctcgagctaggagaatccctgcttcagcggcagcaccaggcatcagaagagatccgtgaaaagctgcagcaggtcatgtctcgtagaaaggagatgaatgaaaaatgggaggccaggtgggagaggctcagaatgctgctggaggtgtgccagttctcgcgcgacgcgagcgtcgctgaggcttggttaatcgctcaagaaccgtacttagccagtggcgatttcggccacacagttgacagtgtggaaaagcttatcaagcgccacgaggctttcgaaaaaagcacagcttcatgggcagagcgcttcgcagctctcgaaaagccgactaccctcgagctcaaggagaggcagattgccgagcgtcccgcggaagaaacaggccctcaggaggaagagggagaaaccgctggggaggcccctgtatctcaccacgcagctacagaacgaactagccctggtgaagaggagggcacatggcctcagaatctccagcaaccaccacctcccggccaacataaggatggtcaaaaatcaaccggggacgagcgaccaacaacagaaccgctattcaaggtcctggacacacccctgtcagaaggcgatgagccagccacgctgcctgcgccaagagaccacggtcagtctgtacagatggagggttacctgggtcgcaagcacgatctggaaggccccaataaaaaagccagtaacagaagttggaacaatctttattgtgttttgcggaacagcgagcttacattctataaggacgctaaaaatcttgccttaggtatgccataccatggcgaagaaccactggcactgcgccacgcaatttgtgagatagcagctaactataagaagaagaaacatgtgttcaagttgaggctgtccaatggatctgaatggctctttcatggtaaagacgaggaggaaatgctctcgtggttgcagggtgtaagcacagcaatcaatgaatcccagtcaattcgggttaaggcccagagcctgcctctccccagtctctctggaccggacgctagtctcggcaagaaggacaaagaaaagagattctcattttttccaaaaaagaaatag

SEQ ID NO: 28100 - DNA, 6999 bp, Artificial Sequence
  derived and/or modified sequence
gagcccgccgacatgaccagcgccaccgagttcgagaacgtgggcaaccagcccccttattcacggatcaatgccagatgggatgctcccgacgacgagctcgacaatgacaacagctcagctcggcttttcgagcggtcacgaatcaaggcacttgctgacgaaagggaggtggtccagaaaaagactttcactaaatgggtgaactcacacttggccagagtctcctgccggattactgatctttacaaggacctgcgggatggtcgaatgttgattaagcttctggaagtgctgagcggtgaaatgctgcccaaaccaaccaaagggaaaatgcgcatccattgcctggaaaatgtggataaggcactccagtttctgaaagaacaacgcgtgcacctggaaaatatgggatcccacgatatagtggatggaaaccaccgtcttgtgctaggactcatctggaccatcattctgcgcttccagatacaggatatcgttgttcaaacacaggagggtcgtgagacacgcagtgccaaggacgcccttctgctgtggtgccagatgaagaccgcgggttaccctcatgttaacgtgacaaatttcacttctagttggaaagatggtctggcgttcaacgccttgattcataaacaccgccctgacctcatcgatttcgataaactcaaagactctaacgcacgccacaacctggagcatgcctttaacgtggccgaaaggcagctggggatcatccctctgttggacccagaagacgtatttacggagaatcctgatgagaagagtatcataacctacgtcgtggccttttaccactacttcagcaagatgaaggtactggctgttgagggcaagagagtgggaaaggtcatagatcatgctatcgaaactgagaagatgatcgaaaagtattccggactcgcttcagatttgctgacttggattgagcaaacgatcacagtgcttaacagcagaaagttcgccaactctctcaccggagtgcagcagcagctgcaggcattctccacctatcgaacggtggagaagccacccaaatttcaagaaaagggaaacttggaagtactgctgttcaccatccagtctagaatgagagcaaacaatcagaaagtgtacacaccacacgacgggaagctcgtgtctgatattaacagggcctgggagagcttggaagaagcggaatacaggcgggagctggcattaagaaacgagctcataagacaagaaaaactggagcagctggcacggaggttcgacaggaaagccgccatgcgagagacatggctgtcagagaaccagcgactcgtggcccaggataacttcggctatgacttagctgctgtggaggctgcgaaaaaaaaacatgaggccattgagacagatacagcggcatacgaggagcgggtccgagcactagaagacctagcccaggagctggagaaggagaactaccacgaccaaaagaggatcactgcccgcaaggataacattctgagactctggagctacttacaggagctgctgcaaagtcggcgccagagacttgagacgactctagcactccagaagctgtttcaagacatgctgcattctatcgattggatggatgagattaaagctcacctcctgtccgccgagttcggaaagcatctgcttgaagtggaggaccttttgcagaagcacaagctgatggaggcggatattgcaatacaaggggacaaagtaaaggcgattactgcggcaaccctgaagtttactgagggtaaggggtaccaaccctgtgacccacaggtcatacaggatcggatctctcatctcgaacagtgtttcgaggaactgagtaatatggcagccggccgcaaggctcaattggagcagagcaaacgcttatggaagtttttctgggaaatggacgaggccgaaagttggattaaagaaaaagaacagatatattcatcgctcgactatggcaaagacctgacctccgtgttgattcttcagcggaaacacaaggcctttgaggatgagcttcgcgggcttgacgcacatttagaacaaatctttcaggaagctcacggcatggtcgcgagaaagcagttcggacacccacaaatcgaggctaggatcaaagaagtatccgcccaatgggaccagcttaaggacctggccgctttctgcaagaagaacctccaggacgcggagaatttctttcagttccagggggacgccgatgatttaaaggcgtggctgcaggatgcccatagattactttcaggcgaggacgtggggcaagacgagggcgctactagagcgttgggcaagaaacacaaggacttcctggaagagctggaggaatctcgaggggtcatggaacacctggagcagcaagcccagggcttccccgaggaatttcgtgatagccccgacgtgactcatcggttgcaggctctccgtgaactgtaccaacaagtggtggcgcaggcggacctgcgtcagcagcgtttgcaggaggccttagatctttacactgtgttcggggaaacagatgcctgtgagttatggatgggcgaaaaggagaagtggctggccgaaatggagatgccagacactctggaagacctggaagtggttcagcaccgattcgacatccttgaccaggaaatgaagactttaatgacacagatcgacggcgtgaacctggcagcaaattccctggtggagtctggccacccgcgcagccgagaggtgaaacaataccaagaccacctcaatacccggtggcaagccttccagacattagtaagtgaaagacgggaggcggtcgacagtgccctgcgggtgcataattattgcgtcgactgcgaggagacctcaaaatggattacggataaaactaaggtggttgaatccaccaaggacctcggtagagacctggctgggatcatcgctatacagagaaaactgtccggcctggaacgcgatgttgcagcaattcaggcaagagttgatgctctggagcgagagtctcaacaactcatggatagccacccagaacaaaaggaggatattgggcagagacagaagcatcttgaggaattatggcagggcctgcaacagagtctccaagggcaggaagacttattaggagaggtgtcccagctgcaggcattcctccaggatttggatgacttccaggcctggctcagtatcactcaaaaggccgtggcctctgaagatatgcccgaaagcttgcccgaagcagagcaactcctccaacagcatgctggaatcaaagacgagatcgacggacatcaggattcttaccagcgcgttaaggagagcggagagaaggtcattcagggccagaccgatcctgaatatctcttactcggccagagactggaggggctcgacacggggtggaacgccctcggccgaatgtgggagtcgcggtctcacactctggcacagtgcctaggctttcaggagtttcagaaggacgccaagcaggccgaagccatcttgagcaatcaggaatacaccctggcacatctggaacctcccgatagtctggaggcggcagaggcagggatccggaagttcgaggatttcctcgggtcaatggagaacaaccgggataaggttctgtctcccgtggactccggcaacaagttggtcgccgaggggaacctgtactcagataagattaaagaaaaggtgcaactgattgaagaccgacacagaaaaaacaacgagaaggctcaggaagcgtcagttctgctgcgagacaacctcgagctacagaattttctgcagaattgtcaagagctcacattgtggataaacgacaaactgcttactagtcaggatgtctcgtacgatgaggccagaaacctccacaataagtggctgaagcatcaagcatttgtcgcagagctcgcttcacacgagggatggctggagaacatcgatgcggaggggaagcagctgatggatgaaaagcctcagttcactgccttggtcagccagaaactggaagccttgcataggctgtgggacgaactccaggccacaactaaagaaaagacccagcacctcagcgcagctagatcaagtgatctgaggttgcagacccatgccgatttgaataaatggatcagcgccatggaagatcaacttcgaagcgacgatccagggaaggatctcaccagcgtcaaccgcatgctcgctaagcttaagcgagtggaggatcaagtcaacgtacggaaggaggaactcggggaactcttcgcgcaggttccatccatgggcgaggaagggggagacgctgatcttagcattgaaaaacgtttcctggacttgctggaacccttgggtcggcgaaaaaagcagctggagagctcaagggccaagctgcaaatcagcagagaccttgaggatgaaacgctctgggtggaggaacgcctcccgctggcacagagtgccgactatggcacgaatctccagaccgtacagctcttcatgaaaaagaaccagaccctccagaatgagattcttggacacacacctagagtggaggatgtcctgcagaggggccagcagctggtggaggccgccgaaattgactgtcaggacttagaggagcggctgggtcatttgcagtcttcatgggatcgtctcagggaggccgccgccggccggcttcagcgcctccgcgacgcaaacgaagcacagcagtactatctcgacgccgacgaagctgaagcttggattggtgagcaggaattgtacgtgattagtgacgaaatccccaaggatgaggagggcgccatagtgatgctgaagcggcacctgcggcagcaaagagcggtggaggattacggaaggaacatcaaacagctggcatcgcgtgcacagggacttctctcggccgggcaccctgaaggagagcagatcataagactgcagggacaagtcgataagcattacgcaggcctgaaagatgtggctgaggaaagaaagcggaagctagaaaatatgtaccacctcttccagctcaaaagggagactgacgacttagagcagtggatttctgaaaaagaactggtggcctctagtcccgaaatgggccaggacttcgatcacgttacattgttaagggataagttccgggacttcgcgcgagaaactggggcaatcggccaagagcgagttgataacgtcaacgcctttatcgagaggttgatcgacgctgggcacagcgaagccgccacaattgccgagtggaaggacggcttgaatgagatgtgggcagatctgttggagttgatcgacacgcggatgcagctcctggcagccagttatgacttgcatcgctacttctacacgggcgcagagatcctaggcctaattgatgagaagcaccgtgagctccccgaagacgtgggcctcgacgcctcaaccgccgagagctttcaccgcgtgcacaccgcatttgagcgtgagctgcacctgcttggcgtacaggtacaacagttccaggacgtggctacacgacttcagaccgcatacgctggtgaaaaggcagaagcgattcagaataaggagcaggaggtttccgctgcttggcaagctttgctagatgcctgtgccggccgccgaacacagctggtcgacactgccgacaaattcaggtttttttcgatggcgagggacctcctctcttggatggagagcatcatccgccaaattgaaacccaggaacggccaagggacgtttcaagtgtcgagctgctgatgaaatatcatcagggcatcaatgccgagatcgagactaggtcaaagaacttcagcgcctgcctggagctcggcgaatctctgctccagagacagcaccaggccagcgaggaaatccgagaaaagctacagcaggtcatgtctaggagaaaagaaatgaacgaaaagtgggaagctagatgggagcgcttaaggatgcttctcgaggtgtgccagttttcccgcgatgcatcagtcgccgaagcctggctcatcgctcaagagccatacctggcctcaggagatttcggccacacagttgattccgtggaaaaattgatcaagaggcacgaagcctttgagaaaagcactgcatcctgggcggagcgatttgctgcactggagaaaccaaccaccctggaactgaaagagcggcagattgcagagcggccagccgaagagacaggtcctcaggaggaagaaggggagacagctggagaagccccggtgtcacaccatgctgccactgagcggaccagccctggcgaagaggagggaacatggccacaaaacctgcagcagcctccgccccccgggcagcacaaagacgggcagaaatcaaccggcgacgagagacccaccacagagcccctatttaaggttttggataccccattgtcggagggagatgaaccggctacactccctgcgccacgagaccatggtcagtccgtgcaaatggagggctatttgggcagaaagcacgacctcgagggccctaacaaaaaggccagcaatcgctcctggaataatctctactgcgtgctgcgcaacagcgaactgacattttataaggatgcaaaaaatctggcactgggcatgccctaccatggagaagaaccattagctcttagacatgccatttgcgagatcgccgctaactataaaaagaaaaagcatgttttcaaactgcgcctctctaacgggagcgagtggttgtttcatggcaaggacgaggaggagatgctgagttggctgcagggcgtttccaccgctattaacgagagccagtcgatacgggtgaaagcgcagtctctccctctgccctcattgagtgggccagacgcaagtctgggtaagaaggacaaggagaaacggttttcatttttccccaagaaaaagtag

SEQ ID NO: 28101 - DNA, 6987 bp, Artificial Sequence
  derived and/or modified sequence
atgaccagcgccaccgagttcgagaacgtgggcaaccagcccccctatagtagaatcaacgcccgctgggatgccccggatgacgagctggacaatgacaattcctccgcccgtctttttgaacgttctcgaatcaaagccctggctgatgagcgggaggtggtgcagaagaaaacttttacaaagtgggtaaatagccatttggctagggtttcttgcagaatcactgacctgtacaaagacctgcgagacgggcgaatgcttatcaagcttctagaggtcctgagcggcgaaatgttgcccaaacccacaaaaggcaaaatgagaatccattgtctggagaatgttgataaagcgttacagttccttaaagagcagcgggtgcacttggagaatatggggagtcacgatattgtcgatggcaatcacagactggttctgggactgatctggactataatcctgcgcttccagatccaggatattgtggttcaaacccaggaggggcgagaaaccagaagtgctaaggatgcactcctgctgtggtgccagatgaagactgccggctatccccacgtcaacgtgacgaacttcacaagctcctggaaggatggactggcttttaacgccttgatccacaaacacagacccgatctcatcgacttcgataaactgaaggactctaatgcacgacacaatctggagcatgctttcaacgtggctgagcgccagctcggcatcatccccctgcttgatccggaagacgtgtttacagagaatcctgatgaaaaatctatcatcacatatgtggttgcattctatcattacttttctaaaatgaaagtgcttgcagttgaaggcaagagggtgggaaaagtgatcgaccatgccattgaaaccgaaaagatgatcgaaaagtattccggcctcgccagtgatttgcttacatggattgaacaaaccatcactgttctaaattcccgcaagttcgccaacagcctgacaggggtccagcagcagctccaggcattcagcacctatcgaacagtggagaaaccccctaagttccaggagaagggcaacctggaagttctcctgtttacaatccagtctcggatgagggccaataaccagaaagtatacaccccacatgacggtaagctggtgtccgatatcaaccgcgcttgggaatctctggaggaggctgagtacagacgtgagttggcactgcggaacgagttaatcaggcaggaaaagctggaacagctcgcacggaggttcgatcggaaggccgctatgagggagacatggctttccgagaaccagaggttagtggcccaagataacttcgggtatgacttagcagccgtggaggcagcaaagaagaaacatgaagcaatcgagactgataccgccgcttacgaggagagggtgagggctctggaggacctggcccaggagctggagaaagagaattaccatgatcagaaacgcattaccgcccgaaaggacaatatcctgcgactgtggtcatatctgcaagagctcctgcagagtcgccgccaacgccttgaaacaacattggctctacaaaaactgtttcaggacatgctgcatagcattgattggatggacgaaatcaaagcccatctcctctccgcagaatttggaaagcacctcctcgaggtggaggatttactgcagaagcacaagctaatggaagcagatatagccatacagggagacaaagtcaaggccatcacagcagcgactcttaaatttacagaaggaaaaggttaccagccctgcgatccacaggtgatacaagatcggatctcccatctcgagcagtgcttcgaggagctcagtaacatggctgctgggaggaaagctcaactagaacagagtaaacggctgtggaagtttttttgggaaatggacgaggccgaatcctggatcaaggagaaggagcagatctattcctcccttgactacgggaaggacctcacctccgtgctcattctgcagcgcaaacataaggcgttcgaggacgaactacgcggcctggacgcccacttagaacagatcttccaagaggcacacggcatggtggccagaaagcaattcgggcacccccagattgaggcacgtatcaaggaagtgagcgcacagtgggaccagttaaaggatctcgccgccttttgcaagaaaaatttgcaggatgccgaaaatttctttcagttccagggcgatgccgatgatttgaaggcttggctacaggatgcgcatagactgttgagcggtgaggatgtgggacaggatgaaggcgccactcgggctctgggtaaaaaacacaaggatttccttgaagagctggaagaatcccggggtgtgatggaacatctggagcagcaggcacaagggttccccgaagaattcagggattcccctgatgttacacatagattacaggccctgcgcgagctttatcagcaggtcgtcgcgcaggccgaccttcgacagcagcgcctccaggaagccctggatctctataccgtcttcggtgagacagacgcgtgcgaactgtggatgggtgagaaagagaagtggctcgccgagatggaaatgccggatactctggaagatcttgaggttgtgcagcatagattcgatattctagatcaggagatgaaaacattaatgactcagatcgacggcgtgaacctggccgccaacagcctggtggagagcggccatccccgttctagggaggttaagcaatatcaggaccacctcaacaccagatggcaggctttccagacactcgtgtccgagagaagagaggccgtggacagtgccctacgggtgcacaactattgtgttgactgcgaggaaacgtccaaatggataacagataaaaccaaagttgtcgaatctacaaaggatcttgggcgggacctagccggcataatcgccatacaacgtaagctgtccggattggaacgggatgtcgcggccatccaagcgcgggtggacgcactggaacgggagtcccagcagctgatggactctcacccggaacagaaggaggacatcggacaaaggcaaaagcaccttgaggagttgtggcaaggcctgcagcagtctcttcagggacaggaagatctgctcggagaagtgagccagcttcaggctttcttgcaggacctagatgatttccaggcttggctctctataactcagaaagccgtcgcctccgaggacatgcccgagagcctgcccgaggcggagcagctgctgcagcaacacgcaggaattaaagatgagatagatggacaccaggactcctaccaaagagtgaaggaaagcggtgagaaggtcatccagggccaaactgatccagagtacttactcctcggccagaggttagagggcttggatacagggtggaacgccttagggcgtatgtgggaatcccggtcacacacccttgctcagtgcctgggattccaagaatttcagaaggatgccaaacaggccgaggccatattaagcaatcaggaatacacactggcgcacctggaacctcccgacagcttagaagcagcagaagccgggatacggaaattcgaagatttcctggggagcatggaaaacaacagggataaagtactgtctccggtggactcgggcaacaagctggttgccgagggaaatctctattctgacaaaataaaggaaaaggtgcagcttatcgaagaccggcatagaaagaacaatgaaaaagctcaggaagcaagtgtccttctccgtgataacctcgaactgcaaaactttctgcaaaactgccaagagctgaccttgtggattaatgataagctcttgacctcacaggacgtgtcttatgatgaggccagaaatctgcataataagtggctgaagcatcaggcttttgttgccgagctggcgtctcacgaaggatggctggaaaacatagatgccgagggaaagcagctcatggacgagaaaccccagttcacagctctagtttctcagaaattagaagctctgcataggctgtgggacgaattgcaggcgacaacgaaggagaaaacccagcatctgagtgctgctaggagcagcgatctccgtttgcagacgcatgccgacctgaacaagtggatttccgctatggaggatcagctgcgatctgatgacccggggaaagacctgacctctgtcaacagaatgctggcaaagctcaaacgtgtcgaagatcaggttaacgtcaggaaggaggagctgggcgaactgtttgctcaggttccaagcatgggtgaggaaggaggtgatgctgacctgagcatagagaagcggttcttggatctgctggagcccttgggaagaagaaaaaagcagctcgagtcttcccgcgctaagctgcagatctccagagaccttgaggacgaaacactatgggtggaggagaggctgccactggctcaaagcgccgactacggcaccaatctccagacagtgcagctcttcatgaagaagaaccaaactcttcagaacgagattcttgggcacactccacgagtggaagacgtattacagcgcgggcagcagctggtagaggctgctgaaattgattgtcaggatctggaggagagattaggacatcttcagtccagttgggacagactgcgggaggctgctgccgggaggttgcagcggttacgcgatgctaatgaagcacagcagtactacttagatgcggacgaagcggaagcctggattggcgaacaggaactgtacgtgatcagcgacgaaatcccgaaggacgaagaaggtgcaatcgtcatgctcaagcgccacctacggcagcagcgtgcagtggaggactacgggcgcaacattaagcaattggcctctagggcacagggtcttctgagcgccggccatccagaaggagaacagatcatcagattacagggccaagttgataaacactacgccggacttaaggacgtcgcagaagagcggaaacgtaagcttgaaaatatgtaccatttattccagttaaagagggagacggacgacctcgagcagtggatatcggagaaggaacttgtggcatccagtcccgaaatgggccaagacttcgaccatgttacactgctgagagacaagtttcgggattttgcacgcgagacaggggcaattggccaggaaagggtagacaatgttaacgcctttattgagcgcctaattgacgctgggcactcagaagcggccacaattgctgaatggaaggacggcctcaacgagatgtgggcagacctattggagctgatcgacaccagaatgcagttgcttgccgctagctatgaccttcataggtacttttatactggtgccgagatcctcgggcttattgacgagaagcatcgggagttgccagaagatgttgggctggacgctagcacagcagaaagtttccatagagtgcatactgctttcgaacgggaattgcatctgttaggagtgcaggtgcaacagttccaggatgtcgccactagattgcaaaccgcatacgctggcgagaaggcagaggctatccagaataaggagcaagaggtttcagcagcctggcaggccctgttagacgcgtgtgccggtagacgaacccagctggtggacactgcggacaagtttcgctttttctccatggccagagacctgctgagctggatggaaagcatcatcaggcagattgagacgcaggaacgccctcgcgatgtttccagtgtggaactgttaatgaagtatcaccaaggcatcaatgctgaaatagagacaagatcaaagaatttcagtgcctgcctggaactgggggagtctcttctgcagcgccaacaccaggcctcagaagagatccgggaaaagctgcagcaagtcatgagccgtaggaaggagatgaatgagaagtgggaggcacgatgggaaaggctgcggatgttgttagaggtatgccagttctctcgagacgccagcgtggccgaggcctggcttattgcccaggaaccgtacctggcgtcgggagactttgggcacacagtcgactccgtcgaaaagctgattaagcgacacgaagcattcgagaagagcaccgctagttgggccgagagatttgctgcgttggaaaagcccaccaccctcgagctcaaagaaaggcaaatcgctgagaggcctgcagaggaaacaggccctcaagaggaggagggcgaaacggcgggagaagctcctgtctcacatcacgcggccacagagcggaccagtcccggcgaggaagagggaacttggccccagaatctacaacagcctcctccccccggtcagcataaggacgggcagaagtctactggggacgagaggccaactaccgagccattgttcaaggttctggacacaccactgtccgagggggatgaacctgccactctgccggccccccgggaccacggtcagtccgtccagatggaggggtatttagggagaaagcacgatttagaagggcctaataaaaaggcatcaaacaggtcgtggaacaacctgtattgtgtcttaagaaattccgagctaactttctacaaagacgcaaaaaacctggctctgggtatgccctaccacggggaagagcctttagcactgcggcatgccatctgtgagatcgccgctaattacaagaagaagaagcatgtgttcaaactcagacttagcaacggctcagagtggctgttccacgggaaagacgaagaggagatgctctcttggttgcagggcgtgagcaccgccattaacgaatctcaatctatccgcgttaaggcccagtcactccctctcccctcactgtccggaccagatgcctctctcggaaagaaggataaagagaagagattttcttttttccctaaaaagaaatag

SEQ ID NO: 28102 - DNA, 3444 bp, Artificial Sequence
  derived and/or modified sequence
atggagaacaaccgcgataaagtcctctcccctgtggactctggaaacaaactcgtggccgaggggaatctgtactctgataaaataaaggaaaaggttcagttgatcgaggaccggcatcgaaaaaataatgagaaagcgcaggaagcatctgtcctgctgcgagataacctcgaactgcaaaactttctccagaattgtcaagaactcaccttatggatcaatgacaaactgctcacttctcaggatgttagctacgacgaggccaggaatctccataacaagtggctgaagcaccaagctttcgtggctgagctcgcgtctcacgagggttggcttgagaacatcgacgctgaaggcaagcagctcatggacgaaaaaccacagtttaccgcactcgtgtctcagaagctcgaagcactgcaccggctgtgggatgaacttcaggcgaccaccaaagaaaaaactcagcatctgtcagctgctagatcatctgatctccgactccagacccatgccgatttaaataaatggattagtgcgatggaagaccaactgcgctccgatgatcccggaaaagacctaacctctgtcaatcggatgctcgccaaactgaaacgagtcgaggatcaggtgaacgtgcggaaagaggagctgggtgagctctttgctcaagtcccgtctatgggcgaagaggggggagatgccgacctgtccatagagaaacgcttcctggacctgctggagccgctgggtagaagaaagaaacagctcgagtcctccagggcgaagttgcaaatcagcagagacctggaggacgagaccctctgggttgaagaaaggctgcccctggcccagagcgccgattacggcacaaacctgcagaccgtgcagctctttatgaagaagaaccaaacactccagaatgagattctgggccacacccctcgggtggaggatgtgctccagcgaggtcagcaactggtggaagccgcagaaatcgattgtcaggacctcgaagaaaggctaggtcatcttcagagctcttgggatcgactgcgagaggctgcggctggtcgattacagcggctgagagacgccaatgaagcacagcagtactatctcgatgctgatgaagcagaggcatggatcggcgagcaggagctttacgtgatcagtgacgaaatccctaaggatgaagagggggctattgtaatgctgaagcgacatctccgccagcaacgggctgtcgaagattacggccgaaatataaagcagcttgcatcacgggcacagggactgctgtccgccggacaccctgagggagaacaaattattcgcttgcaaggtcaggtggataagcactatgccggattgaaggacgtggccgaggagcgaaaacgaaaactcgagaacatgtaccatctgtttcagctcaagcgcgaaactgacgacctggagcagtggatttccgaaaaagagttggtggcttcttccccggaaatgggccaggattttgaccatgtaacgttgctccgtgacaagttccgggattttgcacgggaaactggggcaatcggacaggagcgtgttgacaacgttaacgctttcatagagaggctaattgatgcgggacatagcgaggctgccactattgccgagtggaaggacggcctcaatgaaatgtgggcagatctgctcgagctgatagacactaggatgcagcttctggccgcttcgtacgacctacatagatacttctacacaggagcagagattcttgggttaatcgatgagaaacatagagaactaccggaggatgtggggttggacgcctcaacagccgagtccttccaccgcgtgcacactgcatttgagcgcgaactgcacttattgggagttcaggtccaacagtttcaggacgtggccacccggctccagaccgcctatgctggtgaaaaggcggaagccattcagaacaaagaacaggaggtgtccgctgcctggcaagctcttctcgacgcctgcgccggaagacggacacagctcgtggataccgctgataagttccgctttttctctatggctcgtgaccttctcagctggatggaaagcattatcaggcagattgagacccaggagcggccaagagacgtgtcatccgtggaactccttatgaaataccatcagggtatcaacgccgagatcgaaacccggagcaagaatttttcagcttgcttagaactgggggagtcactcctgcagcgccagcaccaggcatcagaggagataagggaaaagctgcagcaggtcatgagccgcagaaaggaaatgaatgaaaagtgggaagctcgatgggaacgcctgaggatgttgctggaggtgtgccagttctcaagagatgcatctgtggccgaggcctggcttatcgctcaggaaccctacttagctagtggggactttggacacacggtggactctgtcgaaaagctgatcaaacgccacgaggctttcgaaaaatccacagcctcctgggcggaaagatttgccgctctggagaaaccaactacattggaactgaaggaaaggcagatagccgagcggccagctgaagaaacaggaccccaggaagaagagggcgagacggcgggtgaagctcctgtatcccatcacgccgcaacggaacgtacaagcccgggtgaagaagaagggacatggccacagaatttgcagcagcctccaccccctggtcaacataaggacggtcagaagtcgaccggggacgaaagacctaccaccgaaccgctctttaaggtgcttgatacccccctgtctgaaggagatgaacctgctacgctgccggctcctcgcgatcacggtcagtctgttcaaatggaaggatacttaggcagaaagcacgatcttgaagggccaaataaaaaggccagcaattccaagggagaagaaggagaggagagaagagagaccgaagaggaggatgaggaagaagaggaaactgagagcgtggcggtagaaatgcagcagcacgcaagccatgtgtcatggaacaatttgtactgcgttcttaggaatagcgaactcacgttctataaagacgccaaaaacttagccttaggaatgccttatcatggtgaagagcccctggcattgcggcacgcaatatgcgagattgcggcaaattacaagaagaagaaacacgtttttaaacttaggctgagtaatggaagcgagtggctcttccacgggaaagatgaagaggagatgttatcttggttgcaaggggtgtccactgcaattaatgagagtcagtctattcgcgttaaagcgcagtctttaccactgccatcattatctggacccgacgcctccttagggaaaaaggacaaagagaaacgctttagtttctttccaaaaaagaaatag

SEQ ID NO: 28103 - DNA, 6320 bp, Artificial Sequence
  derived and/or modified sequence
atgacatcagccactgagtttgagaacgtcggaaaccagcctccatatagtcggatcaacgctagatgggatgcacccgacgatgaattagataatgacaattctagtgccagactctttgaaaggtctaggatcaaagccctcgcagacgaacgtgaggttgtgcaaaagaaaacatttaccaaatgggtgaactcgcatctggcacgtgtgagctgccgcattacagatctgtacaaggatctgcgcgacgggcgtatgctgataaagctgctggaggtattaagtggagagatgctccctaagcctactaagggaaagatgcggattcactgtctggagaatgtggataaggcattgcagttcttgaaagaacagcgagtgcatctggagaatatgggctctcacgacattgtggatggcaaccacagactggtccttggtctgatctggacaatcattcttcggttccaaattcaggatatcgtggtacaaactcaggaaggtagggaaacaaggtcagccaaggacgccctcctgctgtggtgtcaaatgaagacggcaggttatccccacgtaaatgtcaccaattttacaagctcttggaaggacggcctcgcatttaacgctctgatacacaaacatcgccctgaccttatcgatttcgataaactgaaagacagcaatgcgcgacacaacttagagcacgcctttaacgtcgccgaacgccagttaggcattattccgctgttggaccctgaggatgtctttactgaaaatccagatgagaaatcaattatcacatacgttgtggccttctaccactacttctcaaagatgaaggtcctcgcggtggaaggcaaacgtgtaggaaaggtgattgaccacgctatcgaaaccgaaaaaatgatcgaaaaatatagcgggctggcctctgaccttttgacgtggattgagcagaccatcaccgtgctgaattcgcggaagtttgccaatagcctgacgggcgttcaacaacagttgcaggcatttagcacttaccgtacagtcgagaaacccccaaagttccaggagaagggcaatctcgaagtcttgctgtttacaatccagtctaggatgcgcgcaaataatcaaaaggtttatacgccacatgatgggaagctcgtctcggacataaaccgggcttgggagagtctggaggaggccgaatacaggcgggagttggccttaagaaatgagcttatccggcaggaaaagctcgagcaacttgctaggcgcttcgataggaaagcagccatgagagaaacgtggttaagtgaaaaccagagactggtagcacaggataactttggctacgatcttgccgcagtcgaagcggctaagaagaaacatgaagccatagaaactgacaccgctgcttatgaagagcgcgtgcgcgcactggaggacctagcccaagagcttgaaaaagagaactatcacgaccaaaagagaataacagccaggaaggacaacattctccgcctgtggtcttacttgcaggagctgcttcaaagccgcagacagcgtttggaaaccacactggccctccaaaagctcttccaggacatgcttcattctatcgactggatggatgagattaaagcccacttactgtctgccgagtttggaaaacacttgctggaagtggaggacttgctgcagaagcacaagcttatggaagcagatatcgcaatccagggggacaaggtcaaggcgatcaccgcagccacgctgaagttcactgagggaaaggggtatcagccctgcgatccccaggttatccaggaccgcattagccaccttgaacagtgttttgaggaactttcaaacatggcagcaggtcgcaaggctcagctggagcaatcaaaacgactttggaagtttttttgggaaatggacgaggccgagtcgtggattaaggaaaaggagcaaatctattcaagcctggactacggaaaggacttgaccagtgttctcatcctgcagcggaaacataaggcttttgaggacgagctgcgaggcctggacgcccacctggagcagatttttcaagaagcgcacggtatggtagccagaaaacaattcggacacccccagatcgaggctaggatcaaggaggtgagtgctcagtgggaccagttgaaggacttggccgcattttgtaaaaagaacctgcaggacgcagagaattttttccagttccaaggggatgcagacgacttgaaggcctggttgcaagatgctcatcgacttctatccggagaagacgtgggccaggatgagggggcaacaagagcattgggaaaaaaacacaaggactttctggaggaactggaggagagccgtggcgtgatggagcatctggagcagcaggcccagggctttcctgaagagtttcgcgatagtcccgatgtcacgcaccggctccaggccttaagggagctgtatcaacaggtcgtcgcccaggcagatctccggcagcagcgtctgcaagaagcactcgacctgtacacagtatttggggagacagatgcatgcgagttgtggatgggggaaaaggagaaatggttagcggagatggaaatgcctgataccctggaagatctggaggttgttcaacacagatttgatattctcgatcaggagatgaaaacactgatgactcaaatagatggagtcaacctggccgcaaatagcctcgtcgaatcaggccaccccaggtcacgagaagttaagcaataccaagaccacttgaacacacggtggcaggccttccagaccctggtgtctgagagaagggaggctgtggactccgctctccgcgtgcacaattattgcgtcgattgcgaagagacatcaaagtggattacagacaaaacaaaagtggtggaatctacgaaagatctgggcagggacctggccggtattatcgccatccagaggaaactcagtggtctcgaacgcgatgtggctgccattcaggcgagagtcgacgcgcttgaaagagagtcccagcaattgatggattctcacccggagcaaaaggaagacatcgggcaacgccagaagcatctggaagagctctggcaaggcttgcagcaatctttgcaggggcaggaagatttactgggggaagtgtcacaattgcaggcctttctgcaggatctcgacgatttccaggcctggctcagcattacccaaaaagcagttgcatcagaggatatgcccgaatccttgccagaagctgagcagcttctgcagcagcatgccggtattaaagatgaaatcgacggacaccaggattcctatcagcgggtgaaggagagtggcgagaaggtgattcaggggcaaacggatccggaatacctgctgctggggcagcgcctggaaggcctggatacaggatggaatgctctcggcagaatgtgggaaagtagaagccacactctggcacaatgcctgggattccaggagttccaaaaagacgcaaagcaggcggaggctatcttgtcaaaccaggagtacaccctggcccacctagaacctccagacagcctggaggctgcagaggctggaatacggaaattcgaggattttttaggcagtatggaaaacaaccgggataaggtgttatcgccggtggattctggcaataagctggttgctgaaggcaacctgtatagcgataaaatcaaagagaaggttcagctgatcgaagaccgccataggaaaaacaatgagaaagcacaggaagccagcgtgctgctcagagataatctggaactgcagaatttcttacagaattgccaagagcttactctttggatcaacgataagctgctcacatcccaggacgtttcctacgacgaagcgcgaaacctccataacaaatggctgaaacaccaggcatttgttgccgaactcgcttcacacgaaggatggctcgaaaacatcgatgctgagggtaaacagctgatggatgaaaagccccagtttacggccttagtgtcccagaaactcgaggcactgcaccggctttgggacgaacttcaggccaccaccaaagaaaaaacgcagcacttatcagccgcaaggtcgtcagatctcaggctccagacccatgcggaccttaacaagtggatctctgcaatggaggatcagctgcgatctgatgacccgggaaaggatcttacatccgtaaatcggatgctggcaaaactgaagcgagtcgaagatcaggtcaacgtgcgtaaggaggagctgggagagctttttgctcaggtgccttcaatgggggaggaaggcggagatgcagatctctccatcgaaaaaagattcctcgacctgctggaaccgctaggaaggaggaagaaacagttggagagtagtagggcaaaattacagatcagcagggacctggaggatgaaacgctgtgggtcgaagaacggttgcccctcgcccagagcgccgattacgggactaacctgcagaccgtgcagctctttatgaaaaagaatcagactctgcagaacgagattttgggccacactccgcgagtcgaggacgtgctgcaacggggacagcaattagttgaagcagccgagatagactgtcaggacctggaagagcgcttgggccatcttcagtcttcatgggatcgccttcgggaagcggcagctggcaggttacagcgccttagagatgctaatgaggctcaacagtactatttggatgccgacgaggccgaagcgtggataggggaacaagagttgtatgtcatcagcgacgaaattcctaaagacgaagaaggggcaatcgttatgctgaagcgacacttgcgccagcaaagagcggtcgaagactatggccgaaatatcaagcaattagccagtcgtgctcaaggcctcctatccgcagggcaccccgagggggaacagatcattagactccagggacaggtggacaagcactacgcgggactgaaggacgtggccgaggaacggaaacggaagctagaaaacatgtaccatctattccagctgaaacgggaaacggatgatctggagcagtggattagtgagaaagagcttgtggcgtcctcccctgaaatgggtcaagactttgaccacgtgaccctcctccgtgataaatttagggactttgcaagggagacaggcgctatcggccaggaacgggtagacaatgttaatgctttcatagagagattgatcgacgccggtcatagcgaagccgctacaatcgccgagtggaaagacgggctgaacgagatgtgggccgaccttctcgaactgattgacaccaggatgcaactcctggcagcttcttatgatctacatcggtatttctataccggcgcagaaattttgggattgatcgacgaaaagcaccgagagctgcctgaagacgtggggttagatgcttccaccgctgagtcatttcatcgggtgcatactgctttcgagcgggagcttcacttactgggagtacaagtgcagcagtttcaggatgttgccacgaggttgcagactgcttacgctggtgaaaaagcggaagcaatccaaaacaaggaacaggaggtaagcgcagcttggcaagcactgctcgacgcctgcgctggacgacgaacccagctggtagacacagccgacaagtttagattctttagcatggccagagacttgttatcctggatggagagcattattcgacagatcgagacacaggaacgacctagagacgtatctagcgtcgagctgctgatgaaataccaccaaggcatcaacgcggagatcgaaactaggtcaaaaaatttctcagcctgtctggagcttggtgaatcattgcttcagcgccagcaccaagcttccgaagagatccgggagaaattgcagcaggtcatgtccaggcgaaaggagatgaatgaaaagtgggaagctagatgggaaagactgcggatgctgttggaagtgtgtcaattctcccgtgatgcctcggttgctgaggcctggctaatcgcccaggaaccatatctggcctcaggtgacttcgggcacacggtcgatagtgttgaaaagctgattaagagacatgaagctttcgagaaaagtactgcctcatgggcggagaggtttgcagcacttgaaaaaccgacaactgccagtcggggaggaagacgcgacagtagaggcggttcgtcctttccaccctgtggccaccgtgaaaatgtaccaggccagtctttggtctcttttgttta

SEQ ID NO: 28104 - DNA, 6986 bp, Artificial Sequence
  derived and/or modified sequence
atgacctctgccaccgaattcgaaaacgtgggcaatcaaccaccatatagccgcatcaatgcacgttgggacgcacccgatgacgagttggataacgacaatagctcagctaggctgttcgagcgaagcagaatcaaggcactagcagatgaacgcgaggtcgtgcagaaaaaaacttttactaaatgggttaatagtcatctcgcaagggtttcatgcagaattaccgatctgtacaaagaccttagagacggcaggatgctgattaagctcctagaggtactgtccggcgaaatgctgcctaaacctacgaagggcaaaatgaggattcactgcctggagaacgttgacaaggcactccagtttcttaaagagcagagagtccatctcgaaaacatgggcagtcatgacattgtagatggcaaccacaggttagtgctgggccttatctggacaatcatcttgcgatttcagatccaggatatagttgtgcaaacgcaagagggacgggaaacgaggagtgctaaggacgccctgctattgtggtgccagatgaaaactgccggttatcctcatgtgaacgtgactaacttcacgagctcatggaaggacgggttagcctttaatgcccttattcataagcaccgccctgatttgatcgactttgacaaactgaaagatagcaacgcgagacataacttagaacacgctttcaatgtggctgagaggcagctgggtattatacctctgctcgatcctgaggatgtctttaccgagaaccccgatgagaagtccattataacatacgtcgtagctttttaccactacttctctaaaatgaaggtcttggcagtggagggcaagagagtgggcaaagtgattgatcacgccatagaaaccgaaaaaatgatcgagaaatactcggggctggctagcgatctgctgacttggattgaacagacaatcaccgttctgaacagccgtaaattcgctaattcactgaccggcgtgcagcagcagctgcaggcgttctcaacttaccgaacagtggagaagcctcctaagttccaggagaagggaaatctggaagtgttgctgttcaccatccagagccgtatgagggctaataaccagaaggtctatactcctcacgacgggaaactagtgtctgatatcaaccgggcatgggaaagcctggaagaagcggagtatagaagagaactcgccttgcggaacgagttgattcggcaggagaagcttgaacagctcgcccgtcggtttgatcgcaaggcagctatgagagagacttggctgtccgagaatcagagactagttgcacaagataactttggttacgacctcgcagccgttgaggccgcaaaaaagaagcacgaagctattgaaacagacacagcagcgtacgaggagcgagtcagagctctagaggacttagcccaggaactggagaaggagaattatcacgaccagaagaggatcacagcacgtaaggataatatcttacggctgtggtcatatctccaagagcttctgcagtcccggagacaacgcctggaaacaacactagctctgcagaagttgttccaggatatgctccatagtatcgactggatggatgaaatcaaagcccacttactttccgctgagttcggtaaacacctgctcgaggtggaggatttgctgcagaagcacaaactgatggaggcggatattgctatacagggagacaaggttaaggctattacagcagccaccctgaagtttacggagggaaaggggtaccagccctgtgatccccaggtgattcaggatcggattagccatctggagcagtgtttcgaggaactctctaatatggcagcagggaggaaggctcagctggaacagagtaagagactttggaagtttttttgggaaatggatgaagctgagagttggataaaagaaaaagagcaaatctacagcagcctcgattacggaaaagacctgacttctgttttgatcctccagagaaaacacaaagcttttgaagatgagttacgtggcctcgatgctcatttggagcagattttccaggaggcacatggcatggtggctcgtaaacaattcgggcatccccaaatcgaggccaggattaaggaagtgagcgcgcagtgggatcaactgaaagacctagccgctttctgtaaaaaaaacttacaggacgcggaaaacttttttcaattccagggggacgccgacgatctgaaagcttggttacaggacgcacatcggctgctctccggcgaggatgtgggccaggacgagggagcgacccgcgcactgggcaagaaacataaggatttcttggaggaactggaggagtcccgtggagtgatggagcatctggaacagcaggcccagggctttccagaagaattccgggattctcctgacgtcactcaccgtctccaggcgctccgtgagctttatcagcaggtagtagcgcaggccgatttgagacagcagcgtctgcaggaggcgctggatctttacacagtgtttggggagaccgatgcctgcgagctatggatgggcgagaaagagaaatggctggccgagatggaaatgccagacaccctggaggacttagaggtcgtccagcatagatttgatattttagatcaggagatgaagaccctgatgacccagatagacggagtgaatctggcagcgaattctttagttgaaagcggccaccctagatcacgggaggtgaagcagtatcaggaccacctaaatacccgatggcaggcatttcagaccttagtaagcgagcggcgagaggccgttgattctgctctgcgcgtgcacaattattgtgtcgactgcgaggaaacctctaagtggataactgataaaaccaaagtagttgaatcaacgaaagacctgggacgcgaccttgccggtataattgccatacagaggaaactctccgggctggaacgggacgtggcagcaatccaggccagggtggatgctctcgagcgggaatctcagcagttaatggacagtcaccccgagcagaaagaagatatcggccagcggcagaagcacctcgaggagctgtggcaaggactccaacaatcattacaggggcaggaggacctgctaggagaagtgagccagctccaggcattcctgcaggatctggacgacttccaggcatggctgtcaatcacacagaaggcagtcgcctcagaggatatgcccgaaagcctgccagaggcggaacagctacttcagcagcacgcaggcatcaaagatgaaatcgacgggcatcaagatagctatcagagagttaaggagtccggcgaaaaggtcattcagggccagaccgatcctgaatatctgctcttgggtcaacgcctcgaagggctcgacacaggctggaatgctcttggccgtatgtgggagtcgcgtagccatacattggcacaatgtctcggatttcaggaattccagaaagacgctaagcaggcagaggctatcctgtccaaccaggaatacacactcgcgcacctcgaaccaccagatagcctggaagccgcagaggcaggtatccgtaagttcgaggatttcttaggttccatggagaacaaccgggataaagtgctctctcccgtcgattcagggaataagctggtggccgagggaaacctgtatagcgacaagatcaaggagaaggtccagctcatagaggaccggcatagaaagaacaacgagaaggcccaggaggcttcagtgctgctgagggacaatctagaactgcagaattttctccagaactgtcaagaactgactttgtggatcaacgataagctcctcacaagtcaggacgtatcctatgatgaggccagaaatctgcacaacaagtggttgaagcatcaggcattcgtcgccgaactcgcttcacacgaggggtggctggagaatatcgatgccgagggcaaacagctcatggacgagaaaccccagttcacagcgctggtgtctcagaaactggaagctctgcacaggctttgggatgagctgcaagcgactactaaagagaagacacaacatttgagcgccgcacgctcctcggacctgaggctgcagacccacgcagacctcaacaaatggattagtgcaatggaggatcagctccgtagtgatgatccagggaaggacctgaccagcgtgaatagaatgctggcaaagctgaaaagagtcgaggatcaggtcaacgtgcgaaaagaagagttgggcgagctgttcgcacaggtgcccagcatgggcgaggaggggggagacgccgacctttctatcgaaaaacgatttctggacttgctcgagcccctgggcagacgcaaaaaacagctagagtctagccgcgctaagctgcagatcagtagagacctcgaggatgaaacattatgggttgaggagcgccttcccttagcccagtccgcagactacggaacaaacttacagacagtgcagctctttatgaagaaaaatcagaccttacagaatgaaatactaggccatactccgcgagttgaggacgttctccaaagaggacagcaactagttgaggcagcagagatcgattgtcaagatttggaagaacgcctggggcatctccaaagcagttgggataggctccgcgaagcagcggcagggcgacttcaacggctgcgcgatgccaacgaggctcagcagtactatctggacgctgacgaggctgaggcttggattggggaacaggagctgtatgtcatcagtgatgagatccccaaagatgaggagggagccatagtcatgctgaagcggcaccttagacaacagagagcggtggaggattatgggagaaacatcaagcagctggcttcaagggcccaggggcttttgtctgccggacaccctgaaggggagcaaattatcagactgcaaggacaggtggataagcactatgccggtctgaaggacgtggccgaggagagaaagcgcaagctggaaaacatgtaccatctgttccagcttaagcgcgaaactgacgacctggaacagtggatctctgagaaggagcttgtggcttcatctccagaaatgggacaggatttcgaccatgtgacactgttgcgcgacaagtttagggatttcgccagggaaaccggggctatcggccaggaaagagtggataatgtcaatgccttcatcgaacggcttatcgatgccggacatagtgaggctgcaactattgctgagtggaaggatgggctgaacgagatgtgggcagatctgctggaattaatcgacacacgcatgcaactattggccgctagctatgacctgcatcggtacttctacaccggcgctgagatcctgggtctgattgacgagaagcatcgcgaactgccagaggatgtaggtctggacgccagtaccgcagagtcctttcacagagtgcacactgctttcgagagggagctccatctgctgggagtacaggtccagcaattccaggatgtcgccactcgcctgcagacagcatacgctggcgagaaagctgaagcgatccagaataaagaacaggaggtctcggccgcatggcaggcacttcttgacgcctgcgcaggccgaaggacacagctggtggatacagctgataaattccgtttcttctccatggctagagacctgctcagctggatggagtccattataagacagatcgagacccaggagaggccacgggacgtgtcctccgtggagctgctgatgaagtatcaccagggcataaacgccgagatcgaaacacggagcaaaaatttttccgcatgcttggagctcggtgaaagtctcctgcagaggcagcaccaggcttccgaggagattcgggaaaagctccagcaggtgatgtctaggcgaaaggagatgaacgagaaatgggaagccagatgggagcggctgagaatgctgctggaagtatgtcaattcagtcgcgacgcctccgtggcagaggcatggctgatcgcacaggagccatatctggctagcggggactttggacacaccgtggattctgtggagaaactgattaaacggcacgaggcgttcgagaagtccaccgcttcttgggccgagagatttgcggcactggaaaaaccaaccacactggagctgaaggagaggcagattgccgaaagaccagccgaggagactggcccacaggaagaggaaggcgagaccgctggtgaagctcctgtgagtcatcacgccgcaaccgagaggacttccccaggagaagaggagggaacctggccacagaacctccaacagcccccaccccctggacagcataaagatggccagaagagcacgggagatgagcggccaacaactgaaccactgtttaaagtactggacacaccattatccgaaggcgacgagcctgccaccctgcctgctcctagagaccacgggcagagcgtgcagatggagggctatctgggcagaaagcatgatttagaaggacccaataaaaaagcaagtaaccggtcatggaataacttgtattgtgtattgaggaattccgaactgacattctacaaggacgctaagaacctagccctcgggatgccgtaccatggcgaagaacccctcgccttaagacacgctatatgtgaaattgccgctaactacaagaaaaaaaaacacgtctttaagcttaggctgtccaacggcagcgagtggctatttcacggtaaagacgaagaagaaatgctgtcctggcttcagggcgtgagtaccgccatcaatgagtcgcaaagcataagagttaaggcgcagagtttaccactaccatccctcagtggcccagacgcctctcttggcaaaaaagataaggaaaaaaggttctcttttttccccaaaaaaaaata

SEQ ID NO: 28105 - DNA, 6998 bp, Artificial Sequence
  derived and/or modified sequence
gaaccagccgacatgaccagcgcaaccgaatttgagaacgttgggaatcagcctccgtactcaagaattaatgctagatgggatgctcctgatgacgaactggacaatgacaactcatccgcacgcttgttcgagcgctcaagaatcaaagctctggcggatgaaagggaagtagttcagaaaaagacctttaccaagtgggtgaattcccacctggcacgagtgtcttgtagaataactgatctgtataaagacctgagagatggtagaatgctgatcaaactgctggaggtactgagtggggaaatgcttcccaaaccaacaaagggaaaaatgcggatacactgcctcgagaatgtggacaaggcgttacaattcctaaaggagcaacgcgtgcacttggagaatatgggttcacacgatatagtggatggaaatcatcgactggtcttgggtttgatctggactattattctgagattccagatccaggatatcgttgtgcagacccaggagggacgcgagactaggtccgcaaaggatgccttgctcctgtggtgtcagatgaagaccgcgggatatcctcacgtgaatgtgacaaatttcacaagctcatggaaagatggactggcctttaacgccttgattcacaagcatcgaccggaccttatagatttcgacaaactcaaagattctaacgctagacacaacctggagcacgctttcaatgtggccgagaggcagctggggattatccctctactggatccagaggacgtgtttaccgagaaccctgacgagaagagtattatcacttacgtcgttgctttctatcattacttttcaaaaatgaaggttctggccgtggaagggaagcgggttggaaaagtgatcgatcacgccattgaaaccgagaagatgatcgagaagtactctggcctggccagcgacctgctgacctggattgagcagactatcactgtcctcaacagtaggaaatttgctaattcactgaccggcgttcagcagcagcttcaggccttttcaacatataggacagtcgagaagccacccaaattccaggagaaaggaaatctggaagtcctcctgttcaccattcagagtcgcatgcgggctaataaccaaaaggtgtatacgcctcacgacggcaagcttgtctctgacattaaccgggcatgggaaagcctggaagaggcagagtaccgtcgcgagttagcgcttaggaatgagctcatcagacaagaaaagctggagcaattggccaggaggttcgatagaaaggccgcaatgagggagacgtggttatctgagaatcagcggttagtggcccaggataatttcggatacgacctagccgctgtcgaggctgcaaaaaaaaagcatgaggcaatcgagactgatacagccgcttatgaagaacgtgtcagagccctggaggatttggctcaggagctggagaaggaaaattaccacgatcaaaagagaattactgcgagaaaggacaatattcttcggttatggagctatctgcaggagctcctgcaatcaagacggcagcgcctcgaaactaccctcgctttgcagaagctgtttcaggacatgctgcacagcatcgattggatggatgagattaaggctcaccttctgtctgctgaattcggcaaacatctgctggaagttgaagatctgcttcaaaaacataagcttatggaggcagacattgcgatccagggggataaagtgaaggcgattactgcggctactctcaaattcaccgaaggtaaaggttaccagccctgtgatccccaggtcattcaggaccgcatttcccatctggagcagtgcttcgaggagctgtcaaacatggccgctggcagaaaggcacaactggagcagagtaagagactgtggaaattcttttgggaaatggacgaggcagaaagttggataaaagaaaaagagcagatttattctagcttggactacgggaaggatctgactagtgttctgatcctccagcgaaagcataaggcgttcgaggacgagttacggggactagacgcccacctggagcagattttccaggaggcccatggaatggtagccaggaaacagttcgggcatccccaaatagaggcgcgaataaaggaagtgtccgctcagtgggaccagctgaaggacctggctgctttctgtaagaagaacctgcaggacgccgaaaacttctttcagtttcagggcgatgccgacgaccttaaggcttggttgcaggacgcacatcgcttactgagcggagaggatgtgggacaggatgaaggggctacacgcgcactcggcaaaaaacataaggatttcctggaggaattggaagaaagtcgaggggttatggaacacctcgagcagcaggcacaaggattccccgaggagtttcgggactcgcctgatgtgacccatcggctccaggcccttcgcgagctgtatcagcaggtggtagcacaggccgacctgcggcagcagagacttcaggaggcgttggacctttataccgtgtttggcgagaccgacgcatgcgagctatggatgggcgaaaaagagaagtggctggcggagatggagatgcccgacacactggaagatctcgaagtggtccagcaccgctttgatatcctggatcaggaaatgaagactcttatgactcagatagacggcgttaaccttgcagcaaactctctcgtagagagcggacatcccaggtccagggaggtgaaacagtaccaggaccatttaaacacacgctggcaagcattccaaactttagtcagcgaaagaagggaggccgtggactctgccctgagagtgcacaattactgcgtagattgtgaggagacttcaaagtggattactgacaagactaaagtagtggaaagtaccaaagatctggggagggacctggccggaataattgcaatccagcggaagctgagcgggctggagcgagacgtggcagcgatccaggcccgtgtggacgcgctggagcgtgagtcgcagcagctcatggactctcatcccgagcagaaggaggatatcggtcagcgacaaaagcacctagaagaactgtggcaggggctacagcaatccctgcagggccaggaggacctgctgggtgaggtctcgcagttgcaagcatttctgcaggacctggacgatttccaagcttggctcagcatcacacaaaaggctgttgcatcagaggacatgcccgaatctttaccggaggcggagcagttgctccagcagcacgccggaatcaaagatgagatagatggccatcaggattcctaccaacgtgtgaaagagtcaggtgagaaagtcattcaggggcagacagatcccgagtatctgttactgggccagagactggaaggactggatacaggctggaacgctcttggcagaatgtgggaaagcagatctcacacgttggctcagtgcctgggattccaagagtttcagaaggatgccaaacaagccgaagcaattttaagtaatcaggagtatacactcgcacatctggagcccccagatagcctggaggctgccgaggccggtattcggaagttcgaagacttcctcgggtctatggagaacaatagggacaaggtgctctctccagtggatagcggcaataagctggtggctgaagggaacctctacagtgataagataaaggagaaagttcagctgatcgaagatcgtcaccgcaaaaacaacgagaaagcccaggaggccagtgtactcctgcgtgataatctggagttacaaaattttttgcagaattgccaggaactgacattgtggatcaacgacaaactgctgaccagccaggacgtctcctacgatgaggcacgaaatctccacaacaaatggctgaaacatcaggctttcgtggcggaattagcttcccacgagggctggctcgaaaacatcgacgctgaagggaaacagctgatggacgagaaaccccagtttacggcacttgtgtcccagaagctcgaggcgctgcaccgactgtgggacgagctgcaggccaccactaaggagaaaacccagcatctgagcgcggctagatcatctgaccttaggttgcagactcatgctgatctgaataagtggatcagcgccatggaggaccagctgcgttctgacgacccaggcaaggacctgacctcagtgaatagaatgcttgccaaactgaagcgggtcgaagaccaggtaaatgttcggaaagaggagctgggggaacttttcgcgcaggtcccatcaatgggcgaggaagggggagatgctgatctatccattgagaagcgatttttggacctccttgagcccttgggtaggcgcaaaaagcaactggagagttctcgcgctaagctgcagatcagcagagatctggaggacgagacactttgggtagaggaacgcctgccactcgctcagagcgccgattatggaactaacttgcagacagtgcagttgtttatgaaaaagaaccaaactctgcagaatgaaattcttggacacacaccacgcgtggaggatgttcttcagcgaggacagcaactggttgaagccgcagaaattgactgtcaggatcttgaggagagactaggccacctgcagagctcttgggaccgtcttcgggaggcagcagcgggacggctgcaaagattgcgagatgcaaacgaggctcagcaatactatctcgacgccgatgaggctgaggcctggatcggagaacaggagctgtacgttatttccgacgagattccgaaggacgaggaaggcgcaattgtaatgttaaagaggcatctacggcagcagcgtgccgtcgaagactatggcagaaacatcaagcagttagctagccgggctcaggggcttctttccgctggccatcctgaaggggagcaaattataagactccagggccaagtcgacaagcactacgctgggctcaaggacgtggcagaggaaagaaaacggaagctggagaacatgtatcacttattccagctgaagagggaaaccgatgacctagagcagtggattagcgagaaagaactggtggcgtcttccccggagatgggccaggactttgatcacgttacgctgctgagagacaagttcagagatttcgctcgggagaccggtgcgattggacaggagagggtggataatgtcaatgcattcatcgagcggctgatcgatgccggtcactctgaagcagcaaccatcgccgaatggaaagacgggttaaacgaaatgtgggcagatctgctggagctaatagacacaagaatgcagctgttagctgccagttacgatttgcaccgctatttctataccggtgccgagattctcggcctgatcgatgaaaagcaccgtgagcttcccgaagatgtggggctggacgccagcactgccgaatccttccacagagtccatacagcgtttgaacgggaactgcacctgttaggtgtgcaggttcagcaattccaggacgtggcgacccgcctgcagaccgcatacgccggagaaaaggccgaagctattcagaataaggaacaggaagtttcagctgcatggcaggcactcctagacgcttgcgcgggacgtaggacccaactcgtcgataccgccgacaagttccggttcttctcgatggcgagagatctgttgtcttggatggaatctatcatacggcaaattgagactcaagaaagacccagggatgtgtccagcgtggaactgctcatgaagtaccaccaggggattaatgccgaaatcgaaacaagaagcaaaaacttctctgcctgcctagagctgggcgagtcactccttcagcgtcaacaccaggcaagcgaagagattagagaaaagctccagcaagtaatgtccaggcgcaaggagatgaacgagaagtgggaagctcgctgggagagattaaggatgctcctcgaggtgtgccagttttccagagacgcatctgtggccgaggcctggcttattgcccaggagccgtacctcgcctctggcgacttcggacatacagtggattctgttgagaagctgatcaagaggcatgaggccttcgaaaagtccacggcttcttgggccgagcgattcgccgctcttgagaagcctactaccctggagttgaaagagagacagatcgcagaacgcccagccgaggaaactggaccacaggaagaggaaggagagaccgctggggaagccccagtttctcaccacgccgcaaccgaaaggaccagtcctggagaggaagaaggcacctggccacaaaacctccaacagccgccacctcctggccagcacaaggatggccaaaagtcaactggcgacgagcgacctactaccgagcctttattcaaggttctggacacacctctgtcggaaggtgatgagcctgccacgctcccagctccccgagatcatggacagtcggtccagatggagggttacttaggccgtaaacatgacctcgaagggcctaacaagaaggcctcaaaccggagttggaataacttgtactgtgtgctccggaacagcgaactgactttctacaaggacgctaagaatctggccctcggcatgccttatcatggcgaagaacccctcgctctcagacacgcgatctgcgaaatagcagccaattacaaaaagaaaaagcacgttttcaaactgaggctcagcaatggctcagagtggctgttccatgggaaagatgaggaggaaatgcttagctggctgcagggtgttagtaccgctattaatgaaagtcagtcaatcagggtgaaggcccagagcctccccttaccgtctctgtccggccctgatgccagcctgggaaagaaagataaggagaagcgcttttcgtttttccccaagaagaagta

SEQ ID NO: 28106 - DNA, 6986 bp, Artificial Sequence
  derived and/or modified sequence
atgacatccgccaccgaattcgagaatgtgggcaaccagcccccttactcaagaatcaacgcacgctgggatgctcccgatgacgaactcgataacgataattccagcgctcggcttttcgagcggagtcgtatcaaggctttagcagatgaacgtgaggtggtccagaagaaaacctttactaaatgggtgaattctcacctggcaagggtgtcctgtaggatcacagacttgtataaggacctgagagatggacggatgctcattaagctgctggaagtgctgtccggcgaaatgcttccaaagccgactaagggaaagatgcgcatccattgcttagagaacgttgataaggcactgcagtttcttaaagagcaacgggtgcatttagaaaatatgggcagccatgacattgtggatggcaaccatcgcctggtgttaggactgatttggactatcattcttcgatttcaaattcaggatatcgttgtgcagacacaggagggcagagagactcgaagcgccaaagacgccctgcttctctggtgccagatgaagacagccggatacccccacgtcaacgttaccaacttcacatctagctggaaagatgggctggcattcaacgccttgatacacaagcaccgtccagacctgattgatttcgacaaactgaaggacagcaacgctcgccacaacctggaacatgcattcaatgttgctgagaggcagctggggatcatacccttgcttgatccggaagacgtgttcacagaaaacccagacgagaaatccattatcacgtatgttgtcgcattctatcattatttctccaaaatgaaggtgctggccgtcgaaggaaagcgggttgggaaggttattgatcacgccattgagaccgagaagatgattgaaaaatatagcggactcgcatccgacctattaacatggattgaacaaacaattacggtgttaaattctcgcaaattcgctaactcattgacaggcgtgcagcagcagttgcaggccttttcaacataccgcacagtcgaaaaaccccctaagtttcaggagaaggggaatctggaagtgttgctctttacaatccagtccaggatgagagcaaacaatcagaaggtatatacccctcacgacggtaaacttgtaagtgatatcaaccgggcatgggaatctctggaagaggccgaatatagaagagagctagctttgaggaatgaactgattcggcaagaaaaactggagcagctcgccagaagattcgatcgcaaagctgccatgcgggagacctggctttccgaaaaccagcgtctagtggcgcaagacaattttggctacgatctcgctgccgttgaggctgcaaaaaaaaaacatgaggcgattgagaccgacacggctgcttatgaggagcgtgtgcgtgcactggaagatttggcccaagaactcgaaaaagaaaactatcacgaccagaagagaattaccgctagaaaagataacatcctgcggctttggagctacctgcaggagctgctccagtcgaggcgccagaggttggagacaacgctagctctgcagaaactgtttcaggatatgctgcatagcatcgattggatggatgagatcaaggcgcacctgctttcggcagaattcggaaagcatctgctggaggtagaagaccttctccaaaagcataagttgatggaagctgacatcgccatccagggcgacaaagtcaaagcgattactgccgcaactctgaagtttaccgaggggaagggatatcagccttgtgaccctcaggtcattcaagacaggatctcacacctcgagcaatgctttgaagaactttctaatatggcagccggaaggaaggcacagctggagcaatcgaaacggctctggaagttcttctgggagatggacgaggccgagtcctggattaaggaaaaagagcagatttattcctccttggattatggtaaagatcttacctctgttctcatcctgcagaggaaacataaggcgtttgaggacgagctgcgaggcttggatgctcatcttgagcagattttccaagaagctcatggaatggtagccaggaaacagttcggccacccccaaatcgaagcaagaatcaaggaggtgtccgcccagtgggatcaattaaaggatctggctgctttctgtaaaaaaaacctgcaggacgctgagaacttcttccaatttcagggagacgccgatgatttgaaagcatggctgcaggacgcccaccggttgctttctggggaggatgtcgggcaggatgagggggcaactcgtgctctgggcaagaaacataaagactttttagaagaactcgaagagagtaggggcgtgatggaacatcttgagcagcaggcccagggcttcccggaggaatttagagattcaccagacgtcacccatcggttacaggctctcagagagctttaccaacaagtggtggctcaggcggatctgcggcagcagcgcttgcaggaagctttagatttatacaccgtatttggcgagacagacgcttgcgagctttggatgggcgagaaggaaaagtggctggctgaaatggaaatgcccgataccttggaggatctcgaggtcgtccaacatagattcgatatcctggaccaagagatgaagacattgatgacgcaaattgacggcgttaatctggcagcgaatagtttagtcgagagcggacatccccgatcacgggaagtgaagcaataccaggatcatctaaatactcgttggcaggctttccaaacacttgtgtctgaacgtcgcgaagctgtcgactccgctttgagagtccacaactattgcgtcgactgtgaagagacaagcaaatggatcactgataagacaaaggtggtggagtctacgaaagacttggggagagatctggccggaatcattgctatccagaggaaactgagcggattagaacgggatgtggctgccatccaagcgagggttgatgccctcgagcgggagtctcagcaactgatggacagtcatcccgaacagaaagaggatattggccagcgtcagaaacacctcgaagagttgtggcaaggactgcagcagtctctgcagggtcaggaagaccttctgggagaagtgtcacagctgcaggctttcctccaggacctggacgactttcaagcatggctttctattacacagaaggcagtcgctagcgaagatatgccagaatctctcccagaagcggaacagctcctgcagcagcacgcaggaattaaggacgaaatcgacggccaccaagacagttaccagagagttaaagagagtggggagaaggtcatccagggacagaccgacccggaatacctgcttcttgggcagagactggaaggcctagacacgggctggaacgcgctggggaggatgtgggaaagcagatctcatactttggcccagtgtctaggatttcaggagttccaaaaagatgcgaaacaggcggaggccatcctgtccaaccaggaatacaccctggcccaccttgaaccgcctgactcccttgaagccgcagaggcaggtattcgaaaatttgaagactttctgggttcaatggagaataatcgggataaggttctgtccccagtagattccgggaataaactcgtggccgaaggcaacttgtactccgataagattaaggagaaggtacaattgattgaagaccggcatcggaagaacaatgaaaaggcccaggaagcaagcgtccttcttagagataatctcgaactgcagaacttcctgcaaaactgccaagaactcactttatggatcaatgataaactcctgactagccaggacgtcagctatgacgaagctaggaatcttcacaataaatggctgaaacatcaggcgtttgtggcagagctcgcatcgcacgagggatggcttgaaaacatcgacgccgaagggaagcagctgatggacgaaaaaccacagttcaccgcactggtttctcagaagcttgaagcactgcaccgtctttgggatgaattacaggctacaacaaaagagaagactcagcatctctctgctgcgagatctagcgatctccgcttacagacgcacgccgaccttaacaagtggatctccgcaatggaggaccagctgaggtccgacgatcccggaaaggatctgacatctgtgaaccgcatgttagccaaactcaaacgcgtggaggatcaagtgaatgtccgtaaggaggaattgggtgagctgttcgctcaggtaccttctatgggggaggaggggggtgacgccgatttgtctatagagaagcgttttctggatttgctcgaacccctcggtcgtaggaagaaacaactcgagagtagtcgtgctaagttgcagatcagtcgcgatctggaggatgagaccctgtgggtcgaagaacgcctgcctctcgcccagagcgctgactacggtaccaacctccagactgttcaactgtttatgaagaagaaccaaaccctacaaaacgagatcctggggcacactcctcgggtcgaagacgttctgcagagaggccagcagctcgtcgaggccgcagagattgactgccaggacctagaggaacgattagggcacctccagtccagttgggatagactgagagaggcagccgcaggacgactccagagattgcgagacgcgaacgaagcccaacagtactacctcgacgcagacgaagccgaggcctggatcggtgaacaggagttgtatgtcatcagcgacgagattccaaaggatgaagagggcgctatcgttatgctgaaaagacatctgaggcagcagagggctgtggaagattacgggagaaacattaagcagctagcaagtcgcgcacagggactactgtccgccggacatcctgagggggagcagattatccgccttcaaggacaggtagataaacactacgctggattgaaagatgttgccgaagaacgaaagaggaaactggagaatatgtaccacctgttccaactcaaaagggagacagacgacctggaacagtggatttcggaaaaggagctcgtagcatcctccccggagatgggacaagattttgaccacgtcaccctcctccgtgataaatttcgcgatttcgcacgggaaaccggtgccatcggtcaggagagggtagacaacgtaaatgccttcattgaacggctgatcgacgcaggtcattccgaggctgcgactatcgctgaatggaaagatggcctaaacgagatgtgggccgatctgcttgaattgatcgacaccaggatgcagctgctggcagcctcctacgaccttcacaggtacttttatacgggagctgaaatccttggcctgatagatgaaaagcacagggagctccccgaggacgtggggctcgacgcttcaacagccgagtcattccatagagttcacactgcgtttgagcgggagcttcacctgctgggggtgcaagtgcaacagtttcaggatgtggccacaagattacagaccgcttatgcgggagagaaagcagaggctatccagaataaggagcaggaggtgtccgccgcatggcaggccctgctggatgcttgcgccggaagaaggacccagctggtcgataccgccgacaaattcagattctttagcatggcacgggatttgctatcttggatggaaagtatcatccgccagatcgagacacaggagcgcccaagggatgtctcaagtgtggagctgctgatgaaataccatcagggaatcaacgccgaaatcgaaaccaggtcgaaaaactttagtgcgtgcttggagctaggcgaatcactgctgcagcggcagcaccaggcatctgaggaaattcgagagaaacttcaacaagtgatgtcaaggagaaaagagatgaacgagaaatgggaagcaaggtgggagcgccttcggatgctgcttgaggtctgccaattctcgagggacgcctccgtggcggaagcctggcttatcgcccaggaaccttatctggcaagcggggactttggccacacagtcgacagcgtggagaaacttatcaagagacatgaagcttttgagaagagtacggccagctgggccgagcggttcgccgctctggagaaaccgacaacactcgaactaaaggaaagacagattgccgaaagacccgcagaagagacagggcctcaggaggaggagggggaaacagcaggcgaggcccctgtgtcacaccacgcggctactgaacggaccagccccggagaggaagagggcacctggccccagaatctgcagcagccccctcccccaggccagcacaaagatgggcagaaatcaacgggcgacgagagacccaccaccgaaccactcttcaaggtactggatacaccactgagtgaaggcgacgaaccggctacattacccgctcctagagaccatggccaatcagttcagatggaaggttacttgggacggaaacacgatcttgagggtcccaacaagaaggcttctaatcggtcctggaacaatttatactgcgtgctgagaaattccgagctaacattttataaggatgctaagaacctggcactgggcatgccgtatcacggcgaggaaccactagcgctgaggcacgcaatttgtgagatcgctgccaactataagaagaagaaacatgtgtttaagctacggttgtccaatgggtcggagtggctattccacgggaaggatgaagaggagatgttatcgtggttgcagggggtgtctactgccatcaacgagtcacagtcaatccgcgtcaaggcacagtccctgccgctccctagcctctctggccctgacgcatctctgggaaagaaggataaggagaagagatttagcttctttccaaagaagaagta

SEQ ID NO: 28107 - DNA, 10168 bp, Artificial Sequence
  derived and/or modified sequence
cagggatccttccatgaagactgaggcaggcggagctgctaagagcctgctgacatgacatcggccacagagtttgaaaatgtgggcaaccagccaccttacagcaggatcaatgcccgctgggacgccccagacgacgagctggataatgacaacagctcagccaggctctttgagaggtcccggataaaggccttggcagatgagcgggaagttgttcagaaaaagaccttcacgaaatgggtgaactcgcacctggctcgagtgtcctgccgcatcaccgatctctacaaggacctgcgggatgggcgcatgctcatcaagctgctggaggtgctctctggagagatgctgccaaagcccaccaaggggaagatgcgcatccactgcctggagaatgtggacaaggctctccagttcctcaaggagcagcgtgtacacctggagaacatgggctcccacgacattgtagatggcaaccaccgcctggtcctgggcctcatctggaccatcatcctccgcttccagattcaggacattgtggtccaaactcaggaaggtcgtgaaacacgctcagccaaggatgcgttgctgttgtggtgtcagatgaagacggcaggctaccctcatgttaatgtcaccaactttacctccagctggaaggatggcttggcctttaatgccctgatacacaagcaccggcccgacctgatcgactttgataagctgaaggactccaatgcccggcacaacctggagcacgcattcaatgtggctgagcgccagctgggcatcatcccgctcctcgaccccgaagatgtctttacggaaaaccctgatgagaaatccatcatcacctatgtggtggccttttaccactacttctccaagatgaaggtgctggcagtggagggcaagcgtgtcggcaaggttattgaccatgccattgagactgagaagatgattgaaaagtacagcgggctagcctcggacctgctcacctggatcgagcagaccatcactgtcctgaacagccgcaagtttgccaactcgctgacgggcgtccagcagcagctgcaggccttcagcacctaccgcaccgtggagaagccgcccaagtttcaagagaaggggaatctggaagttctactttttaccatccagtcccggatgagagccaacaatcagaaagtgtacacaccccacgatgggaaactagtgtctgacatcaacagggcctgggaaagcctggaggaagctgagtatcggcgggagctggccctgagaaatgagctcattcggcaggagaagctagagcaactggcccggcgctttgaccggaaggccgcaatgagagagacctggctcagtgaaaaccagcgcctcgtggcccaggataactttgggtatgacctggcagctgtggaggccgccaagaagaagcatgaggccatcgagaccgacacggctgcctacgaggagcgggtgagagccctggaggacctggctcaggagctggagaaagagaactaccatgaccagaagcgcatcacggcccgcaaggacaatatactgcgcctatggagctacctgcaggagctgctgcagtcccggcgccagaggctcgagaccaccctggcactgcagaagctcttccaggacatgctgcacagcatcgactggatggatgagatcaaggctcacctcttgtctgccgagtttgggaagcacttgttggaggttgaagacctgctacagaagcacaagttgatggaagctgacatcgccatccaaggggacaaagtgaaggccatcaccgcagccaccctgaagttcaccgaggggaaagggtaccagccttgtgacccccaggtcatccaggaccgcatcagccacttggagcagtgctttgaggagctgagcaacatggcagctgggcggaaggcccaactggagcagtccaaacgactctggaagttcttctgggagatggatgaggctgagagctggatcaaggagaaggagcagatctattcttccctggactatggcaaagacctgaccagtgtgctcatcttacagcgcaagcacaaggcctttgaggatgagctccgtgggctggatgctcacctggagcagatcttccaggaggctcatggcatggttgcgcgcaagcagtttgggcacccgcagatcgaggcccgcataaaggaggtgtcggcacagtgggaccagctgaaggacctggctgccttctgcaagaagaacctccaggatgctgagaactttttccagttccagggcgatgcggatgacctgaaggcttggctgcaagacgcccaccggctgctctctggtgaagatgtggggcaggacgaaggggccacgcgggccctggggaaaaagcacaaggacttcctggaggagctggaggagagccgtggggtgatggagcacctggagcagcaggcccagggattccccgaagagtttcgggattccccagatgtgacccatcggctgcaggccctgcgggagctctaccaacaggtggtggcccaggcggacctgcgtcagcagaggctgcaggaagccctggacctgtacacggtgttcggggagacagacgcctgtgagctgtggatgggagagaaggagaagtggctggccgagatggaaatgccagacaccctggaggacctggaggtcgtgcagcacaggttcgacatcctggaccaggagatgaagaccttgatgactcagattgatggtgtgaacctcgctgccaacagcttggtagagagtggccacccacgcagcagggaggtgaagcagtaccaggaccatctgaacaccaggtggcaggcatttcagaccctggtgtcggagcggcgggaggctgtggactcagccctccgagtgcacaactactgcgtagattgcgaggagaccagcaagtggatcacggacaagacaaaggtagtggagtccacaaaagacctggggcgggacctggcaggtatcatcgccatccagaggaagttgtcagggctggagcgtgacgtggccgccatccaggcccgtgtggatgccctggagcgtgagtcccagcagctgatggactcgcaccctgagcagaaggaggatattggtcagcggcaaaaacacttggaggagctgtggcagggcctgcagcaatccctgcagggccaggaggacttgctgggggaagtcagccagctgcaggccttcctgcaggatctggatgacttccaggcctggctctccatcacccagaaggctgtggcctctgaggacatgcccgaatccctcccagaggctgagcagctcctgcagcagcatgcaggtatcaaggatgagattgacgggcaccaagacagctaccagcgtgttaaggagtctggggagaaagtgatccaaggccagacggacccagagtatctgcttctgggccagcggctggagggcctggatactggctggaatgccctgggcaggatgtgggagagccgcagccacaccctcgctcagtgccttggcttccaggagttccagaaagatgccaagcaggctgaagccatcctcagcaaccaggaatacactctggctcacttggagcccccagactccctggaagctgcagaggctgggatccggaagtttgaggatttcttggggtctatggagaacaaccgggataaggtcttgagtcctgtggactctggaaacaagctggtagctgagggaaacctatactcagacaagatcaaggagaaggtgcagctgattgaggacaggcacaggaagaacaacgagaaggcccaggaggcctctgtcctactgagagacaacctggagctacagaacttcctccagaactgccaggagctcactctctggatcaacgacaagctgctgacatctcaggatgtctcctatgatgaagcacgaaaccttcacaataaatggctaaagcaccaggcgtttgtggcagagctggcttcccatgaagggtggctagagaacatcgatgcggaaggaaagcagctgatggatgagaagccccagtttacagccctggtgtcccaaaagctggaagccctgcaccggctctgggacgagctgcaggccaccacaaaggagaagacccagcacctctcggctgccaggagctccgacctgcgcttgcagacccatgctgacctcaacaagtggatcagcgccatggaggaccagctgcggtcagacgacccgggcaaggacctgaccagtgtcaatcggatgttggctaagctgaagcgagtggaggaccaagtgaatgtgcgaaaagaggagctgggggagctgtttgcccaggtgccttcaatgggagaggagggaggagatgcagacttgagcatcgagaagcggttcctggacctcctggaacccctaggaaggaggaagaagcagctggaatcatccagagccaagctgcagatcagccgggacttagaggatgagacgctttgggtggaggagaggctgcctctggcccagtcagccgactatggcactaatctgcaaactgtgcaactgttcatgaagaagaaccagacactgcagaatgagattctgggccatacgccgcgggttgaggatgtgctgcagagagggcagcagctggtggaggcggcggagatcgactgccaggaccttgaggagcgcctggggcacctgcagagctcctgggacaggctgcgggaggcagcggccgggaggctgcagcgactgagggacgccaacgaggcacagcagtactacctggatgcagacgaggctgaggcctggattggcgagcaggagctctacgtcatctccgatgagatccccaaggatgaagagggcgccattgtgatgctgaagcgacatttgcggcagcagcgtgcggtggaggactacggccggaacatcaagcagctggccagccgggcccagggcctgctgtctgcaggccaccctgagggggaacagatcatcagacttcaggggcaagtggacaagcactacgcagggctgaaggacgtggcggaagagcgcaagcgcaagctggagaacatgtaccacctgttccagctcaagcgggagaccgacgacctggagcagtggatttcagaaaaggagctagtggcctcttccccggaaatggggcaagactttgaccacgtgactcttctgcgggacaagttccgggactttgcccgggagaccggggcgattgggcaggagcgggtggacaatgtgaatgccttcatcgagcgactcatcgacgcgggccacagcgaggcggccaccatcgccgagtggaaggacgggctgaacgagatgtgggcagacctcctggagctcattgacacgcgcatgcagctgctggccgcctcctatgacctgcaccgctacttctacacgggtgccgagatcctgggcctcatcgacgagaagcaccgcgagctgcccgaggacgtggggctggacgccagcacggccgagtccttccaccgggtgcacacagccttcgagcgggagctccacctgctgggtgtccaggtgcagcagttccaggacgtggccacccgtctgcagacagcatatgctggggagaaggcagaggccatccagaacaaggagcaggaggtgtctgccgcgtggcaggcgctgctcgatgcctgtgccgggcgccggacccagctagtggacacggcggataaattccgcttcttcagcatggcccgtgacctcctctcctggatggagagcatcatccggcagatcgagacccaggagaggcccagggatgtctcctctgtggaactgctcatgaagtatcaccagggcatcaatgcagagattgaaacccggagcaagaacttcagtgcctgcctggagcttggcgagtccctgctgcagcggcagcaccaggcctcagaggagatccgcgagaaactgcagcaggtgatgtccaggaggaaagagatgaatgagaagtgggaagcccgctgggagcggctccgcatgttgctggaggtgtgccagttctcgagggatgcctctgtggctgaggcgtggctgattgcccaggagccctacctggccagcggggactttggacacacagtggacagtgtggagaagctcatcaagaggcatgaggcttttgagaagtccacggccagctgggcagagcgctttgctgccctggagaagcccaccacgcttgagctgaaagaacgccagattgcagagagacccgcagaggagactgggcctcaagaggaggaaggcgagacagcaggggaggctccagtttcccaccatgcggccaccgagagaacgtccccgggggaagaagagggaacgtggcctcagaacctgcagcagccaccaccgccgggtcagcacaaggatgggcagaaatccactggggatgagaggcccaccacggagcccctctttaaggtcctagatacgcctctgagcgagggtgatgagcccgcaacgctgccggccccgcgggaccatgggcagagtgtgcagatggaaggctacctgggccgcaagcatgacctggaggggcccaacaagaaggcttccaacagtaagggagaagagggagaggagaggagggagacagaagaggaggatgaagaggaggaggaaacagagtctgttgctgtagaaatgcagcaacatgcttcccacgtgtcctggaacaacctgtactgtgtgctcaggaacagtgagctaaccttctacaaggatgccaagaacctggccctggggatgccctaccatggggaggaacccctggccctgagacatgccatctgtgagattgctgccaactacaagaagaagaagcacgtctttaagctgaggctgagtaatggcagcgagtggctcttccatggcaaggatgaggaggagatgctgtcctggctgcagggcgtgagcaccgccatcaacgagtcccagagcatccgcgtcaaggcgcagagcctgcccctgccttccctctccggccccgacgccagcctcggcaagaaagacaaggagaagagattcagcttcttccccaaaaagaagtagcaggtggggctggcgggcgcggcggagtcgggacgcgcagagaccgggcagcccaggccttggcctcctctcgccgccgcccgccggtcgaatcgagatgagtcgagtcgcgggccgggcccccgggccccacgctgcactgcaaaagctgccttcgcccgcgtgtcctgggccgacgccccctccatgccctcgcccgcgctggctccgctccagggacaggggctcccagctcctctggcgcctttggggcctccaggcctgggggcaggaaacggttctctgaggcacacgccctcctctcccaccctcctcctgagccgagggggcacaggccccttacccccaaccaaaaaaaaaaaaaaaaaagagctggagaaggctgatggggttcttcaaacgctgcccgttcctaaagcaagtcttgcttcgggtcacctcccacctggtggcagccagggaaaggggaaaggaagaagacactggaaatgcatggccagccccctaggggcatgaggaaggagccttcaggtggcccacaaagccctagctctgggccaggggctctggggggctgaggggaccagactgggtgcagggccttgggagctgccagcctccttcccactgggcttccgcagaactgggactctcacttcaggggccaccacatccctcctctctgcttctccccccagatcaaagggtaccctcccacggttggcagggcctggctgagtgcctctagcaccctttgtgccaccacaggcggtcccaggaagggcagcaaggtcagaccattcctcattgaaaaccgtggctagggcacagggctctgatctgaaggagtgacaggtgcgtcacaacactgcctaaggctctccctctcaatgctgggaccctcgccccactcccagtggcagccaaaccagcaatatccaacagacataggccccctacgggacagtgtgggcccccagatataagatggataccccccgcacctgcagtaaagcatcccaaagccaaatgctcaattgcatcctgtctgcagctgggactttggagggtaatggctgggcagacagtaaagttgatcatctgttttctcggggtggcagacgcagccatgtcttggtatcaccacccatgtgacagctactcctgcacaactgggacaaatgtcagggccagagccatgaaggtgtggtaccccttgatcagcttctccacgtcctggccccaggtcttggcggggagggggtcacatgagtacagaggtcaaatatctaccaccctccagccctgagcaccagaagctctgcaaccaacgtccccaggaatggccttccccttgctgctcaggtcatacttctggaggaagagaaagctcattccatattttccccaccactctactccgaaagcaacacagttctggcccagtatcaaactagggttaggtccaagagagcagtcaagcgggtcgggggtgggggggagggcggagggcagcaggcattttcccccaaggaaaccatgaaagtccccagggcctgcagtcaagtttctatcaccttccccgtgagaaggaccttagttccatggagatgaagtgggtgaggttcaggtagaagccacaggggcaggcatccagaatgaggccccctgaggaaccctgagtgctgaccagtgccggcagaaatcagttccaccctgtggccctgacactatatgtcagggtgacaccaactgcagcaggcaggagccacaggaaggaagacgtcatccgatggagcctgacatccccaggttcccgccctggtgagcaaggtcttcatttggctttggtacatatgaccctatacagggaacctagtgtgtatcactcaccagcctctttctgtatctggggaaaccaaggcagtgaggtgactgcactcacctagcaataaagtaggcctttggtgcacttgcaggcatgtcctcctctggggcagagagcaggttccttgctgaagggcagatggtggcaaacatctccctcaactgtttccctgggccagtctttagggagcctagggacaagggcccaccctcccccttccacgtgtgccaaatcagcacctgaagtgaggcatttccagcaagcaactccacagacccgagaaaggaagggctctagtggaagagctagcatctcaccaccccaggtcccctggcctggtccagggcagccagctgcatgtgaccattctgttgccagctccccacacatccctcctgtcacccaggctccaagacattcgaccaactagactgaaaatgcaggcatccagctttgggagaccctgtgtgtgccacaccagggctaagctctcccagtgccctagcaaggtctttttttttttttctctccttattctactctacagtcttttgacagtattcccaaacgaggttgacacagctccagtccacaccagcataccaggcttccttcccagggcagtttagaggaagctccttctgggcaaggtcaggcggtcctccttccctctctccttcccctttgtcccagcctcaactgactctggctgtgggaggtgtggagggtccttaggcttccctccccaacctggcctccaccaacacccctaacaggaggcccgtggaaggctcagcctctcctccgcatccctcctccttcctgcctatcggagggagccagggtcccctaggctgaccctgaatcctcttcctcccttcatgggaggggggcaggaatccagaggaggatgaagccagcgggaccacatggcttggtggcttggacaaacaagctcagggaggaaatgaggaggcggcggctgcagaggaatgcaaccctgttgggcacagaccatgcaatctggggctggccctggggccagctgggtcctgtcctccacctgctcaaccgtgcttccaccaaccagaggaaacccatttactagtttttctaataaatcaataatgctcc

SEQ ID NO: 28108 - DNA, 6375 bp, Artificial Sequence
  derived and/or modified sequence
cagggatccttccatgaagactgaggcaggcggagctgctaagagcctgctgacatgacatcggccacagagtttgaaaatgtgggcaaccagccaccttacagcaggatcaatgcccgctgggacgccccagacgacgagctggataatgacaacagctcagccaggctctttgagaggtcccggataaaggccttggcagatgagcgggaagttgttcagaaaaagaccttcacgaaatgggtgaactcgcacctggctcgagtgtcctgccgcatcaccgatctctacaaggacctgcgggatgggcgcatgctcatcaagctgctggaggtgctctctggagagatgctgccaaagcccaccaaggggaagatgcgcatccactgcctggagaatgtggacaaggctctccagttcctcaaggagcagcgtgtacacctggagaacatgggctcccacgacattgtagatggcaaccaccgcctggtcctgggcctcatctggaccatcatcctccgcttccagattcaggacattgtggtccaaactcaggaaggtcgtgaaacacgctcagccaaggatgcgttgctgttgtggtgtcagatgaagacggcaggctaccctcatgttaatgtcaccaactttacctccagctggaaggatggcttggcctttaatgccctgatacacaagcaccggcccgacctgatcgactttgataagctgaaggactccaatgcccggcacaacctggagcacgcattcaatgtggctgagcgccagctgggcatcatcccgctcctcgaccccgaagatgtctttacggaaaaccctgatgagaaatccatcatcacctatgtggtggccttttaccactacttctccaagatgaaggtgctggcagtggagggcaagcgtgtcggcaaggttattgaccatgccattgagactgagaagatgattgaaaagtacagcgggctagcctcggacctgctcacctggatcgagcagaccatcactgtcctgaacagccgcaagtttgccaactcgctgacgggcgtccagcagcagctgcaggccttcagcacctaccgcaccgtggagaagccgcccaagtttcaagagaaggggaatctggaagttctactttttaccatccagtcccggatgagagccaacaatcagaaagtgtacacaccccacgatgggaaactagtgtctgacatcaacagggcctgggaaagcctggaggaagctgagtatcggcgggagctggccctgagaaatgagctcattcggcaggagaagctagagcaactggcccggcgctttgaccggaaggccgcaatgagagagacctggctcagtgaaaaccagcgcctcgtggcccaggataactttgggtatgacctggcagctgtggaggccgccaagaagaagcatgaggccatcgagaccgacacggctgcctacgaggagcgggtgagagccctggaggacctggctcaggagctggagaaagagaactaccatgaccagaagcgcatcacggcccgcaaggacaatatactgcgcctatggagctacctgcaggagctgctgcagtcccggcgccagaggctcgagaccaccctggcactgcagaagctcttccaggacatgctgcacagcatcgactggatggatgagatcaaggctcacctcttgtctgccgagtttgggaagcacttgttggaggttgaagacctgctacagaagcacaagttgatggaagctgacatcgccatccaaggggacaaagtgaaggccatcaccgcagccaccctgaagttcaccgaggggaaagggtaccagccttgtgacccccaggtcatccaggaccgcatcagccacttggagcagtgctttgaggagctgagcaacatggcagctgggcggaaggcccaactggagcagtccaaacgactctggaagttcttctgggagatggatgaggctgagagctggatcaaggagaaggagcagatctattcttccctggactatggcaaagacctgaccagtgtgctcatcttacagcgcaagcacaaggcctttgaggatgagctccgtgggctggatgctcacctggagcagatcttccaggaggctcatggcatggttgcgcgcaagcagtttgggcacccgcagatcgaggcccgcataaaggaggtgtcggcacagtgggaccagctgaaggacctggctgccttctgcaagaagaacctccaggatgctgagaactttttccagttccagggcgatgcggatgacctgaaggcttggctgcaagacgcccaccggctgctctctggtgaagatgtggggcaggacgaaggggccacgcgggccctggggaaaaagcacaaggacttcctggaggagctggaggagagccgtggggtgatggagcacctggagcagcaggcccagggattccccgaagagtttcgggattccccagatgtgacccatcggctgcaggccctgcgggagctctaccaacaggtggtggcccaggcggacctgcgtcagcagaggctgcaggaagccctggacctgtacacggtgttcggggagacagacgcctgtgagctgtggatgggagagaaggagaagtggctggccgagatggaaatgccagacaccctggaggacctggaggtcgtgcagcacaggttcgacatcctggaccaggagatgaagaccttgatgactcagattgatggtgtgaacctcgctgccaacagcttggtagagagtggccacccacgcagcagggaggtgaagcagtaccaggaccatctgaacaccaggtggcaggcatttcagaccctggtgtcggagcggcgggaggctgtggactcagccctccgagtgcacaactactgcgtagattgcgaggagaccagcaagtggatcacggacaagacaaaggtagtggagtccacaaaagacctggggcgggacctggcaggtatcatcgccatccagaggaagttgtcagggctggagcgtgacgtggccgccatccaggcccgtgtggatgccctggagcgtgagtcccagcagctgatggactcgcaccctgagcagaaggaggatattggtcagcggcaaaaacacttggaggagctgtggcagggcctgcagcaatccctgcagggccaggaggacttgctgggggaagtcagccagctgcaggccttcctgcaggatctggatgacttccaggcctggctctccatcacccagaaggctgtggcctctgaggacatgcccgaatccctcccagaggctgagcagctcctgcagcagcatgcaggtatcaaggatgagattgacgggcaccaagacagctaccagcgtgttaaggagtctggggagaaagtgatccaaggccagacggacccagagtatctgcttctgggccagcggctggagggcctggatactggctggaatgccctgggcaggatgtgggagagccgcagccacaccctcgctcagtgccttggcttccaggagttccagaaagatgccaagcaggctgaagccatcctcagcaaccaggaatacactctggctcacttggagcccccagactccctggaagctgcagaggctgggatccggaagtttgaggatttcttggggtctatggagaacaaccgggataaggtcttgagtcctgtggactctggaaacaagctggtagctgagggaaacctatactcagacaagatcaaggagaaggtgcagctgattgaggacaggcacaggaagaacaacgagaaggcccaggaggcctctgtcctactgagagacaacctggagctacagaacttcctccagaactgccaggagctcactctctggatcaacgacaagctgctgacatctcaggatgtctcctatgatgaagcacgaaaccttcacaataaatggctaaagcaccaggcgtttgtggcagagctggcttcccatgaagggtggctagagaacatcgatgcggaaggaaagcagctgatggatgagaagccccagtttacagccctggtgtcccaaaagctggaagccctgcaccggctctgggacgagctgcaggccaccacaaaggagaagacccagcacctctcggctgccaggagctccgacctgcgcttgcagacccatgctgacctcaacaagtggatcagcgccatggaggaccagctgcggtcagacgacccgggcaaggacctgaccagtgtcaatcggatgttggctaagctgaagcgagtggaggaccaagtgaatgtgcgaaaagaggagctgggggagctgtttgcccaggtgccttcaatgggagaggagggaggagatgcagacttgagcatcgagaagcggttcctggacctcctggaacccctaggaaggaggaagaagcagctggaatcatccagagccaagctgcagatcagccgggacttagaggatgagacgctttgggtggaggagaggctgcctctggcccagtcagccgactatggcactaatctgcaaactgtgcaactgttcatgaagaagaaccagacactgcagaatgagattctgggccatacgccgcgggttgaggatgtgctgcagagagggcagcagctggtggaggcggcggagatcgactgccaggaccttgaggagcgcctggggcacctgcagagctcctgggacaggctgcgggaggcagcggccgggaggctgcagcgactgagggacgccaacgaggcacagcagtactacctggatgcagacgaggctgaggcctggattggcgagcaggagctctacgtcatctccgatgagatccccaaggatgaagagggcgccattgtgatgctgaagcgacatttgcggcagcagcgtgcggtggaggactacggccggaacatcaagcagctggccagccgggcccagggcctgctgtctgcaggccaccctgagggggaacagatcatcagacttcaggggcaagtggacaagcactacgcagggctgaaggacgtggcggaagagcgcaagcgcaagctggagaacatgtaccacctgttccagctcaagcgggagaccgacgacctggagcagtggatttcagaaaaggagctagtggcctcttccccggaaatggggcaagactttgaccacgtgactcttctgcgggacaagttccgggactttgcccgggagaccggggcgattgggcaggagcgggtggacaatgtgaatgccttcatcgagcgactcatcgacgcgggccacagcgaggcggccaccatcgccgagtggaaggacgggctgaacgagatgtgggcagacctcctggagctcattgacacgcgcatgcagctgctggccgcctcctatgacctgcaccgctacttctacacgggtgccgagatcctgggcctcatcgacgagaagcaccgcgagctgcccgaggacgtggggctggacgccagcacggccgagtccttccaccgggtgcacacagccttcgagcgggagctccacctgctgggtgtccaggtgcagcagttccaggacgtggccacccgtctgcagacagcatatgctggggagaaggcagaggccatccagaacaaggagcaggaggtgtctgccgcgtggcaggcgctgctcgatgcctgtgccgggcgccggacccagctagtggacacggcggataaattccgcttcttcagcatggcccgtgacctcctctcctggatggagagcatcatccggcagatcgagacccaggagaggcccagggatgtctcctctgtggaactgctcatgaagtatcaccagggcatcaatgcagagattgaaacccggagcaagaacttcagtgcctgcctggagcttggcgagtccctgctgcagcggcagcaccaggcctcagaggagatccgcgagaaactgcagcaggtgatgtccaggaggaaagagatgaatgagaagtgggaagcccgctgggagcggctccgcatgttgctggaggtgtgccagttctcgagggatgcctctgtggctgaggcgtggctgattgcccaggagccctacctggccagcggggactttggacacacagtggacagtgtggagaagctcatcaagaggcatgaggcttttgagaagtccacggccagctgggcagagcgctttgctgccctggagaagcccaccacggcctcaagaggaggaaggcgagacagcaggggaggctccagtttcccaccatgcggccaccgagagaacgtccccggtcagtctctggtctcgtttgtctag

SEQ ID NO: 28109 - DNA, 10063 bp, Artificial Sequence
  derived and/or modified sequence
cagggatccttccatgaagactgaggcaggcggagctgctaagagcctgctgacatgacatcggccacagagtttgaaaatgtgggcaaccagccaccttacagcaggatcaatgcccgctgggacgccccagacgacgagctggataatgacaacagctcagccaggctctttgagaggtcccggataaaggccttggcagatgagcgggaagttgttcagaaaaagaccttcacgaaatgggtgaactcgcacctggctcgagtgtcctgccgcatcaccgatctctacaaggacctgcgggatgggcgcatgctcatcaagctgctggaggtgctctctggagagatgctgccaaagcccaccaaggggaagatgcgcatccactgcctggagaatgtggacaaggctctccagttcctcaaggagcagcgtgtacacctggagaacatgggctcccacgacattgtagatggcaaccaccgcctggtcctgggcctcatctggaccatcatcctccgcttccagattcaggacattgtggtccaaactcaggaaggtcgtgaaacacgctcagccaaggatgcgttgctgttgtggtgtcagatgaagacggcaggctaccctcatgttaatgtcaccaactttacctccagctggaaggatggcttggcctttaatgccctgatacacaagcaccggcccgacctgatcgactttgataagctgaaggactccaatgcccggcacaacctggagcacgcattcaatgtggctgagcgccagctgggcatcatcccgctcctcgaccccgaagatgtctttacggaaaaccctgatgagaaatccatcatcacctatgtggtggccttttaccactacttctccaagatgaaggtgctggcagtggagggcaagcgtgtcggcaaggttattgaccatgccattgagactgagaagatgattgaaaagtacagcgggctagcctcggacctgctcacctggatcgagcagaccatcactgtcctgaacagccgcaagtttgccaactcgctgacgggcgtccagcagcagctgcaggccttcagcacctaccgcaccgtggagaagccgcccaagtttcaagagaaggggaatctggaagttctactttttaccatccagtcccggatgagagccaacaatcagaaagtgtacacaccccacgatgggaaactagtgtctgacatcaacagggcctgggaaagcctggaggaagctgagtatcggcgggagctggccctgagaaatgagctcattcggcaggagaagctagagcaactggcccggcgctttgaccggaaggccgcaatgagagagacctggctcagtgaaaaccagcgcctcgtggcccaggataactttgggtatgacctggcagctgtggaggccgccaagaagaagcatgaggccatcgagaccgacacggctgcctacgaggagcgggtgagagccctggaggacctggctcaggagctggagaaagagaactaccatgaccagaagcgcatcacggcccgcaaggacaatatactgcgcctatggagctacctgcaggagctgctgcagtcccggcgccagaggctcgagaccaccctggcactgcagaagctcttccaggacatgctgcacagcatcgactggatggatgagatcaaggctcacctcttgtctgccgagtttgggaagcacttgttggaggttgaagacctgctacagaagcacaagttgatggaagctgacatcgccatccaaggggacaaagtgaaggccatcaccgcagccaccctgaagttcaccgaggggaaagggtaccagccttgtgacccccaggtcatccaggaccgcatcagccacttggagcagtgctttgaggagctgagcaacatggcagctgggcggaaggcccaactggagcagtccaaacgactctggaagttcttctgggagatggatgaggctgagagctggatcaaggagaaggagcagatctattcttccctggactatggcaaagacctgaccagtgtgctcatcttacagcgcaagcacaaggcctttgaggatgagctccgtgggctggatgctcacctggagcagatcttccaggaggctcatggcatggttgcgcgcaagcagtttgggcacccgcagatcgaggcccgcataaaggaggtgtcggcacagtgggaccagctgaaggacctggctgccttctgcaagaagaacctccaggatgctgagaactttttccagttccagggcgatgcggatgacctgaaggcttggctgcaagacgcccaccggctgctctctggtgaagatgtggggcaggacgaaggggccacgcgggccctggggaaaaagcacaaggacttcctggaggagctggaggagagccgtggggtgatggagcacctggagcagcaggcccagggattccccgaagagtttcgggattccccagatgtgacccatcggctgcaggccctgcgggagctctaccaacaggtggtggcccaggcggacctgcgtcagcagaggctgcaggaagccctggacctgtacacggtgttcggggagacagacgcctgtgagctgtggatgggagagaaggagaagtggctggccgagatggaaatgccagacaccctggaggacctggaggtcgtgcagcacaggttcgacatcctggaccaggagatgaagaccttgatgactcagattgatggtgtgaacctcgctgccaacagcttggtagagagtggccacccacgcagcagggaggtgaagcagtaccaggaccatctgaacaccaggtggcaggcatttcagaccctggtgtcggagcggcgggaggctgtggactcagccctccgagtgcacaactactgcgtagattgcgaggagaccagcaagtggatcacggacaagacaaaggtagtggagtccacaaaagacctggggcgggacctggcaggtatcatcgccatccagaggaagttgtcagggctggagcgtgacgtggccgccatccaggcccgtgtggatgccctggagcgtgagtcccagcagctgatggactcgcaccctgagcagaaggaggatattggtcagcggcaaaaacacttggaggagctgtggcagggcctgcagcaatccctgcagggccaggaggacttgctgggggaagtcagccagctgcaggccttcctgcaggatctggatgacttccaggcctggctctccatcacccagaaggctgtggcctctgaggacatgcccgaatccctcccagaggctgagcagctcctgcagcagcatgcaggtatcaaggatgagattgacgggcaccaagacagctaccagcgtgttaaggagtctggggagaaagtgatccaaggccagacggacccagagtatctgcttctgggccagcggctggagggcctggatactggctggaatgccctgggcaggatgtgggagagccgcagccacaccctcgctcagtgccttggcttccaggagttccagaaagatgccaagcaggctgaagccatcctcagcaaccaggaatacactctggctcacttggagcccccagactccctggaagctgcagaggctgggatccggaagtttgaggatttcttggggtctatggagaacaaccgggataaggtcttgagtcctgtggactctggaaacaagctggtagctgagggaaacctatactcagacaagatcaaggagaaggtgcagctgattgaggacaggcacaggaagaacaacgagaaggcccaggaggcctctgtcctactgagagacaacctggagctacagaacttcctccagaactgccaggagctcactctctggatcaacgacaagctgctgacatctcaggatgtctcctatgatgaagcacgaaaccttcacaataaatggctaaagcaccaggcgtttgtggcagagctggcttcccatgaagggtggctagagaacatcgatgcggaaggaaagcagctgatggatgagaagccccagtttacagccctggtgtcccaaaagctggaagccctgcaccggctctgggacgagctgcaggccaccacaaaggagaagacccagcacctctcggctgccaggagctccgacctgcgcttgcagacccatgctgacctcaacaagtggatcagcgccatggaggaccagctgcggtcagacgacccgggcaaggacctgaccagtgtcaatcggatgttggctaagctgaagcgagtggaggaccaagtgaatgtgcgaaaagaggagctgggggagctgtttgcccaggtgccttcaatgggagaggagggaggagatgcagacttgagcatcgagaagcggttcctggacctcctggaacccctaggaaggaggaagaagcagctggaatcatccagagccaagctgcagatcagccgggacttagaggatgagacgctttgggtggaggagaggctgcctctggcccagtcagccgactatggcactaatctgcaaactgtgcaactgttcatgaagaagaaccagacactgcagaatgagattctgggccatacgccgcgggttgaggatgtgctgcagagagggcagcagctggtggaggcggcggagatcgactgccaggaccttgaggagcgcctggggcacctgcagagctcctgggacaggctgcgggaggcagcggccgggaggctgcagcgactgagggacgccaacgaggcacagcagtactacctggatgcagacgaggctgaggcctggattggcgagcaggagctctacgtcatctccgatgagatccccaaggatgaagagggcgccattgtgatgctgaagcgacatttgcggcagcagcgtgcggtggaggactacggccggaacatcaagcagctggccagccgggcccagggcctgctgtctgcaggccaccctgagggggaacagatcatcagacttcaggggcaagtggacaagcactacgcagggctgaaggacgtggcggaagagcgcaagcgcaagctggagaacatgtaccacctgttccagctcaagcgggagaccgacgacctggagcagtggatttcagaaaaggagctagtggcctcttccccggaaatggggcaagactttgaccacgtgactcttctgcgggacaagttccgggactttgcccgggagaccggggcgattgggcaggagcgggtggacaatgtgaatgccttcatcgagcgactcatcgacgcgggccacagcgaggcggccaccatcgccgagtggaaggacgggctgaacgagatgtgggcagacctcctggagctcattgacacgcgcatgcagctgctggccgcctcctatgacctgcaccgctacttctacacgggtgccgagatcctgggcctcatcgacgagaagcaccgcgagctgcccgaggacgtggggctggacgccagcacggccgagtccttccaccgggtgcacacagccttcgagcgggagctccacctgctgggtgtccaggtgcagcagttccaggacgtggccacccgtctgcagacagcatatgctggggagaaggcagaggccatccagaacaaggagcaggaggtgtctgccgcgtggcaggcgctgctcgatgcctgtgccgggcgccggacccagctagtggacacggcggataaattccgcttcttcagcatggcccgtgacctcctctcctggatggagagcatcatccggcagatcgagacccaggagaggcccagggatgtctcctctgtggaactgctcatgaagtatcaccagggcatcaatgcagagattgaaacccggagcaagaacttcagtgcctgcctggagcttggcgagtccctgctgcagcggcagcaccaggcctcagaggagatccgcgagaaactgcagcaggtgatgtccaggaggaaagagatgaatgagaagtgggaagcccgctgggagcggctccgcatgttgctggaggtgtgccagttctcgagggatgcctctgtggctgaggcgtggctgattgcccaggagccctacctggccagcggggactttggacacacagtggacagtgtggagaagctcatcaagaggcatgaggcttttgagaagtccacggccagctgggcagagcgctttgctgccctggagaagcccaccacgcttgagctgaaagaacgccagattgcagagagacccgcagaggagactgggcctcaagaggaggaaggcgagacagcaggggaggctccagtttcccaccatgcggccaccgagagaacgtccccgggggaagaagagggaacgtggcctcagaacctgcagcagccaccaccgccgggtcagcacaaggatgggcagaaatccactggggatgagaggcccaccacggagcccctctttaaggtcctagatacgcctctgagcgagggtgatgagcccgcaacgctgccggccccgcgggaccatgggcagagtgtgcagatggaaggctacctgggccgcaagcatgacctggaggggcccaacaagaaggcttccaacaggtcctggaacaacctgtactgtgtgctcaggaacagtgagctaaccttctacaaggatgccaagaacctggccctggggatgccctaccatggggaggaacccctggccctgagacatgccatctgtgagattgctgccaactacaagaagaagaagcacgtctttaagctgaggctgagtaatggcagcgagtggctcttccatggcaaggatgaggaggagatgctgtcctggctgcagggcgtgagcaccgccatcaacgagtcccagagcatccgcgtcaaggcgcagagcctgcccctgccttccctctccggccccgacgccagcctcggcaagaaagacaaggagaagagattcagcttcttccccaaaaagaagtagcaggtggggctggcgggcgcggcggagtcgggacgcgcagagaccgggcagcccaggccttggcctcctctcgccgccgcccgccggtcgaatcgagatgagtcgagtcgcgggccgggcccccgggccccacgctgcactgcaaaagctgccttcgcccgcgtgtcctgggccgacgccccctccatgccctcgcccgcgctggctccgctccagggacaggggctcccagctcctctggcgcctttggggcctccaggcctgggggcaggaaacggttctctgaggcacacgccctcctctcccaccctcctcctgagccgagggggcacaggccccttacccccaaccaaaaaaaaaaaaaaaaaagagctggagaaggctgatggggttcttcaaacgctgcccgttcctaaagcaagtcttgcttcgggtcacctcccacctggtggcagccagggaaaggggaaaggaagaagacactggaaatgcatggccagccccctaggggcatgaggaaggagccttcaggtggcccacaaagccctagctctgggccaggggctctggggggctgaggggaccagactgggtgcagggccttgggagctgccagcctccttcccactgggcttccgcagaactgggactctcacttcaggggccaccacatccctcctctctgcttctccccccagatcaaagggtaccctcccacggttggcagggcctggctgagtgcctctagcaccctttgtgccaccacaggcggtcccaggaagggcagcaaggtcagaccattcctcattgaaaaccgtggctagggcacagggctctgatctgaaggagtgacaggtgcgtcacaacactgcctaaggctctccctctcaatgctgggaccctcgccccactcccagtggcagccaaaccagcaatatccaacagacataggccccctacgggacagtgtgggcccccagatataagatggataccccccgcacctgcagtaaagcatcccaaagccaaatgctcaattgcatcctgtctgcagctgggactttggagggtaatggctgggcagacagtaaagttgatcatctgttttctcggggtggcagacgcagccatgtcttggtatcaccacccatgtgacagctactcctgcacaactgggacaaatgtcagggccagagccatgaaggtgtggtaccccttgatcagcttctccacgtcctggccccaggtcttggcggggagggggtcacatgagtacagaggtcaaatatctaccaccctccagccctgagcaccagaagctctgcaaccaacgtccccaggaatggccttccccttgctgctcaggtcatacttctggaggaagagaaagctcattccatattttccccaccactctactccgaaagcaacacagttctggcccagtatcaaactagggttaggtccaagagagcagtcaagcgggtcgggggtgggggggagggcggagggcagcaggcattttcccccaaggaaaccatgaaagtccccagggcctgcagtcaagtttctatcaccttccccgtgagaaggaccttagttccatggagatgaagtgggtgaggttcaggtagaagccacaggggcaggcatccagaatgaggccccctgaggaaccctgagtgctgaccagtgccggcagaaatcagttccaccctgtggccctgacactatatgtcagggtgacaccaactgcagcaggcaggagccacaggaaggaagacgtcatccgatggagcctgacatccccaggttcccgccctggtgagcaaggtcttcatttggctttggtacatatgaccctatacagggaacctagtgtgtatcactcaccagcctctttctgtatctggggaaaccaaggcagtgaggtgactgcactcacctagcaataaagtaggcctttggtgcacttgcaggcatgtcctcctctggggcagagagcaggttccttgctgaagggcagatggtggcaaacatctccctcaactgtttccctgggccagtctttagggagcctagggacaagggcccaccctcccccttccacgtgtgccaaatcagcacctgaagtgaggcatttccagcaagcaactccacagacccgagaaaggaagggctctagtggaagagctagcatctcaccaccccaggtcccctggcctggtccagggcagccagctgcatgtgaccattctgttgccagctccccacacatccctcctgtcacccaggctccaagacattcgaccaactagactgaaaatgcaggcatccagctttgggagaccctgtgtgtgccacaccagggctaagctctcccagtgccctagcaaggtctttttttttttttctctccttattctactctacagtcttttgacagtattcccaaacgaggttgacacagctccagtccacaccagcataccaggcttccttcccagggcagtttagaggaagctccttctgggcaaggtcaggcggtcctccttccctctctccttcccctttgtcccagcctcaactgactctggctgtgggaggtgtggagggtccttaggcttccctccccaacctggcctccaccaacacccctaacaggaggcccgtggaaggctcagcctctcctccgcatccctcctccttcctgcctatcggagggagccagggtcccctaggctgaccctgaatcctcttcctcccttcatgggaggggggcaggaatccagaggaggatgaagccagcgggaccacatggcttggtggcttggacaaacaagctcagggaggaaatgaggaggcggcggctgcagaggaatgcaaccctgttgggcacagaccatgcaatctggggctggccctggggccagctgggtcctgtcctccacctgctcaaccgtgcttccaccaaccagaggaaacccatttactagtttttctaataaatcaataatgctcc

SEQ ID NO: 28110 - DNA, 7481 bp, Artificial Sequence
  derived and/or modified sequence
gtgccaggagccccgcgctgccctcctccccctgcgccgccgccgccgccacccccgggctcggggtggcccccgcttcagtcccagggcagggatccttccatgaagactgaggcaggcggagctgctaagagcctgctgacatgacatcggccacagagtttgaaaatgtgggcaaccagccaccttacagcaggatcaatgcccgctgggacgccccagacgacgagctggataatgacaacagctcagccaggctctttgagaggtcccggataaaggccttggcagatgagcgggaagttgttcagaaaaagaccttcacgaaatgggtgaactcgcacctggctcgagtgtcctgccgcatcaccgatctctacaaggacctgcgggatgggcgcatgctcatcaagctgctggaggtgctctctggagagatgctgccaaagcccaccaaggggaagatgcgcatccactgcctggagaatgtggacaaggctctccagttcctcaaggagcagcgtgtacacctggagaacatgggctcccacgacattgtagatggcaaccaccgcctggtcctgggcctcatctggaccatcatcctccgcttccagattcaggacattgtggtccaaactcaggaaggtcgtgaaacacgctcagccaaggatgcgttgctgttgtggtgtcagatgaagacggcaggctaccctcatgttaatgtcaccaactttacctccagctggaaggatggcttggcctttaatgccctgatacacaagcaccggcccgacctgatcgactttgataagctgaaggactccaatgcccggcacaacctggagcacgcattcaatgtggctgagcgccagctgggcatcatcccgctcctcgaccccgaagatgtctttacggaaaaccctgatgagaaatccatcatcacctatgtggtggccttttaccactacttctccaagatgaaggtgctggcagtggagggcaagcgtgtcggcaaggttattgaccatgccattgagactgagaagatgattgaaaagtacagcgggctagcctcggacctgctcacctggatcgagcagaccatcactgtcctgaacagccgcaagtttgccaactcgctgacgggcgtccagcagcagctgcaggccttcagcacctaccgcaccgtggagaagccgcccaagtttcaagagaaggggaatctggaagttctactttttaccatccagtcccggatgagagccaacaatcagaaagtgtacacaccccacgatgggaaactagtgtctgacatcaacagggcctgggaaagcctggaggaagctgagtatcggcgggagctggccctgagaaatgagctcattcggcaggagaagctagagcaactggcccggcgctttgaccggaaggccgcaatgagagagacctggctcagtgaaaaccagcgcctcgtggcccaggataactttgggtatgacctggcagctgtggaggccgccaagaagaagcatgaggccatcgagaccgacacggctgcctacgaggagcgggtgagagccctggaggacctggctcaggagctggagaaagagaactaccatgaccagaagcgcatcacggcccgcaaggacaatatactgcgcctatggagctacctgcaggagctgctgcagtcccggcgccagaggctcgagaccaccctggcactgcagaagctcttccaggacatgctgcacagcatcgactggatggatgagatcaaggctcacctcttgtctgccgagtttgggaagcacttgttggaggttgaagacctgctacagaagcacaagttgatggaagctgacatcgccatccaaggggacaaagtgaaggccatcaccgcagccaccctgaagttcaccgaggggaaagggtaccagccttgtgacccccaggtcatccaggaccgcatcagccacttggagcagtgctttgaggagctgagcaacatggcagctgggcggaaggcccaactggagcagtccaaacgactctggaagttcttctgggagatggatgaggctgagagctggatcaaggagaaggagcagatctattcttccctggactatggcaaagacctgaccagtgtgctcatcttacagcgcaagcacaaggcctttgaggatgagctccgtgggctggatgctcacctggagcagatcttccaggaggctcatggcatggttgcgcgcaagcagtttgggcacccgcagatcgaggcccgcataaaggaggtgtcggcacagtgggaccagctgaaggacctggctgccttctgcaagaagaacctccaggatgctgagaactttttccagttccagggcgatgcggatgacctgaaggcttggctgcaagacgcccaccggctgctctctggtgaagatgtggggcaggacgaaggggccacgcgggccctggggaaaaagcacaaggacttcctggaggagctggaggagagccgtggggtgatggagcacctggagcagcaggcccagggattccccgaagagtttcgggattccccagatgtgacccatcggctgcaggccctgcgggagctctaccaacaggtggtggcccaggcggacctgcgtcagcagaggctgcaggaagccctggacctgtacacggtgttcggggagacagacgcctgtgagctgtggatgggagagaaggagaagtggctggccgagatggaaatgccagacaccctggaggacctggaggtcgtgcagcacaggttcgacatcctggaccaggagatgaagaccttgatgactcagattgatggtgtgaacctcgctgccaacagcttggtagagagtggccacccacgcagcagggaggtgaagcagtaccaggaccatctgaacaccaggtggcaggcatttcagaccctggtgtcggagcggcgggaggctgtggactcagccctccgagtgcacaactactgcgtagattgcgaggagaccagcaagtggatcacggacaagacaaaggtagtggagtccacaaaagacctggggcgggacctggcaggtatcatcgccatccagaggaagttgtcagggctggagcgtgacgtggccgccatccaggcccgtgtggatgccctggagcgtgagtcccagcagctgatggactcgcaccctgagcagaaggaggatattggtcagcggcaaaaacacttggaggagctgtggcagggcctgcagcaatccctgcagggccaggaggacttgctgggggaagtcagccagctgcaggccttcctgcaggatctggatgacttccaggcctggctctccatcacccagaaggctgtggcctctgaggacatgcccgaatccctcccagaggctgagcagctcctgcagcagcatgcaggtatcaaggatgagattgacgggcaccaagacagctaccagcgtgttaaggagtctggggagaaagtgatccaaggccagacggacccagagtatctgcttctgggccagcggctggagggcctggatactggctggaatgccctgggcaggatgtgggagagccgcagccacaccctcgctcagtgccttggcttccaggagttccagaaagatgccaagcaggctgaagccatcctcagcaaccaggaatacactctggctcacttggagcccccagactccctggaagctgcagaggctgggatccggaagtttgaggatttcttggggtctatggagaacaaccgggataaggtcttgagtcctgtggactctggaaacaagctggtagctgagggaaacctatactcagacaagatcaaggagaaggtgcagctgattgaggacaggcacaggaagaacaacgagaaggcccaggaggcctctgtcctactgagagacaacctggagctacagaacttcctccagaactgccaggagctcactctctggatcaacgacaagctgctgacatctcaggatgtctcctatgatgaagcacgaaaccttcacaataaatggctaaagcaccaggcgtttgtggcagagctggcttcccatgaagggtggctagagaacatcgatgcggaaggaaagcagctgatggatgagaagccccagtttacagccctggtgtcccaaaagctggaagccctgcaccggctctgggacgagctgcaggccaccacaaaggagaagacccagcacctctcggctgccaggagctccgacctgcgcttgcagacccatgctgacctcaacaagtggatcagcgccatggaggaccagctgcggtcagacgacccgggcaaggacctgaccagtgtcaatcggatgttggctaagctgaagcgagtggaggaccaagtgaatgtgcgaaaagaggagctgggggagctgtttgcccaggtgccttcaatgggagaggagggaggagatgcagacttgagcatcgagaagcggttcctggacctcctggaacccctaggaaggaggaagaagcagctggaatcatccagagccaagctgcagatcagccgggacttagaggatgagacgctttgggtggaggagaggctgcctctggcccagtcagccgactatggcactaatctgcaaactgtgcaactgttcatgaagaagaaccagacactgcagaatgagattctgggccatacgccgcgggttgaggatgtgctgcagagagggcagcagctggtggaggcggcggagatcgactgccaggaccttgaggagcgcctggggcacctgcagagctcctgggacaggctgcgggaggcagcggccgggaggctgcagcgactgagggacgccaacgaggcacagcagtactacctggatgcagacgaggctgaggcctggattggcgagcaggagctctacgtcatctccgatgagatccccaaggatgaagagggcgccattgtgatgctgaagcgacatttgcggcagcagcgtgcggtggaggactacggccggaacatcaagcagctggccagccgggcccagggcctgctgtctgcaggccaccctgagggggaacagatcatcagacttcaggggcaagtggacaagcactacgcagggctgaaggacgtggcggaagagcgcaagcgcaagctggagaacatgtaccacctgttccagctcaagcgggagaccgacgacctggagcagtggatttcagaaaaggagctagtggcctcttccccggaaatggggcaagactttgaccacgtgactcttctgcgggacaagttccgggactttgcccgggagaccggggcgattgggcaggagcgggtggacaatgtgaatgccttcatcgagcgactcatcgacgcgggccacagcgaggcggccaccatcgccgagtggaaggacgggctgaacgagatgtgggcagacctcctggagctcattgacacgcgcatgcagctgctggccgcctcctatgacctgcaccgctacttctacacgggtgccgagatcctgggcctcatcgacgagaagcaccgcgagctgcccgaggacgtggggctggacgccagcacggccgagtccttccaccgggtgcacacagccttcgagcgggagctccacctgctgggtgtccaggtgcagcagttccaggacgtggccacccgtctgcagacagcatatgctggggagaaggcagaggccatccagaacaaggagcaggaggtgtctgccgcgtggcaggcgctgctcgatgcctgtgccgggcgccggacccagctagtggacacggcggataaattccgcttcttcagcatggcccgtgacctcctctcctggatggagagcatcatccggcagatcgagacccaggagaggcccagggatgtctcctctgtggaactgctcatgaagtatcaccagggcatcaatgcagagattgaaacccggagcaagaacttcagtgcctgcctggagcttggcgagtccctgctgcagcggcagcaccaggcctcagaggagatccgcgagaaactgcagcaggtgatgtccaggaggaaagagatgaatgagaagtgggaagcccgctgggagcggctccgcatgttgctggaggtgtgccagttctcgagggatgcctctgtggctgaggcgtggctgattgcccaggagccctacctggccagcggggactttggacacacagtggacagtgtggagaagctcatcaagaggcatgaggcttttgagaagtccacggccagctgggcagagcgctttgctgccctggagaagcccaccacgcttgagctgaaagaacgccagattgcagagagacccgcagaggagactgggcctcaagaggaggaaggcgagacagcaggggaggctccagtttcccaccatgcggccaccgagagaacgtccccgggggaagaagagggaacgtggcctcagaacctgcagcagccaccaccgccgggtcagcacaaggatgggcagaaatccactggggatgagaggcccaccacggagcccctctttaaggtcctagatacgcctctgagcgagggtgatgagcccgcaacgctgccggccccgcgggaccatgggcagagtgtgcagatggaaggctacctgggccgcaagcatgacctggaggggcccaacaagaaggcttccaacaggtcctggaacaacctgtactgtgtgctcaggaacagtgagctaaccttctacaaggatgccaagaacctggccctggggatgccctaccatggggaggaacccctggccctgagacatgccatctgtgagattgctgccaactacaagaagaagaagcacgtctttaagctgaggctgagtaatggcagcgagtggctcttccatggcaaggatgaggaggagatgctgtcctggctgcagggcgtgagcaccgccatcaacgagtcccagagcatccgcgtcaaggcgcagagcctgcccctgccttccctctccggccccgacgccagcctcggcaagaaagacaaggagaagagattcagcttcttccccaaaaagaagtagcaggtggggctggcgggcgcggcggagtcgggacgcgcagagaccgggcagcccaggccttggcctcctctcgccgccgcccgccggtcgaatcgagatgagtcgagtcgcgggccgggcccccgggccccacgctgcactgcaaaagctgccttcgcccgcgtgtcctgggccgacgccccctccatgccctcgcccgcgctggctccgctccagggacaggggctcccagctcctctggcgcctttggggcctccaggcctgggggcaggaaacggttctctgaggcacacgccctcctctcccaccctcctcctgagccgagggggcacaggccccttacccccaacc

SEQ ID NO: 28111 - protein, 464 aa, Artificial Sequence
  derived and/or modified sequence
MGHLSAPLHRVRVPWQGLLLTASLLTFWNPPTTAQLTTESMPFNVAEGKEVLLLVHNLPQQLFGYSWYKGERVDGNRQIVGYAIGTQQATPGPANSGRETIYPNASLLIQNVTQNDTGFYTLQVIKSDLVNEEATGQFHVYPELPKPSISSNNSNPVEDKDAVAFTCEPETQDTTYLWWINNQSLPVSPRLQLSNGNRTLTLLSVTRNDTGPYECEIQNPVSANRSDPVTLNVTYGPDTPTISPSDTYYRPGANLSLSCYAASNPPAQYSWLINGTFQQSTQELFIPNITVNNSGSYTCHANNSVTGCNRTTVKTIIVTELSPVVAKPQIKASKTTVTGDKDSVNLTCSTNDTGISIRWFFKNQSLPSSERMKLSQGNTTLSINPVKREDAGTYWCEVFNPISKNQSDPIMLNVNYNALPQENGLSPGAIAGIVIGVVALVALIAVALACFLHFGKTGSSGPLQ

SEQ ID NO: 28112 - DNA, 1254 bp, Artificial Sequence
  derived and/or modified sequence
atgggtcatctatcagcacctctgcatagagtcagagtgccatggcagggcctgcttctgacagcctcacttttgaccttttggaatccgcccaccaccgctcagctgacaactgaatcaatgccttttaatgtagctgaaggaaaggaggtcctgctcctcgtgcacaatttgccacagcagctgtttggttatagctggtacaagggagaacgagtggacgggaacaggcaaattgtgggctatgctatcggcacccaacaagctacccccggtcctgctaactcgggacgtgagaccatttacccaaacgctagtctcctgattcagaacgtcacgcagaatgacaccgggttctatacccttcaggtgataaagtcagaccttgtgaacgaggaggccacggggcagttccacgtttaccctgagctgcccaagccaagcattagcagcaataactccaatcccgtcgaagataaagacgctgtggcattcacctgtgaaccagagacgcaggataccacgtatctctggtggataaataaccagagcctgccagtgagcccccgtctacaactctccaatggcaacagaacgctaactctgctctcagtcacgcgcaatgacacaggtccttacgagtgtgagatacagaacccagtgagtgctaatcgtagcgaccctgtcacacttaatgtcacttatggcccagacacaccaacgatttccccaagcgacacatattacagacctggtgccaatctgtcactttcttgttatgcagcctccaacccccccgcccagtactcctggttgattaatggaacttttcagcagagtactcaggaactgtttatccctaatatcactgttaacaatagcggctcttatacatgccatgcaaacaacagtgtgacaggttgcaataggactaccgtgaaaacgatcattgtgacggagctcagtccagttgtggcgaagccccagatcaaggcaagcaagaccaccgttaccggagacaaagacagcgtcaatctgacatgcagtaccaatgatacaggcatcagcattagatggttcttcaagaatcagtcgttgccttcctcagagagaatgaaactgagccagggaaacaccaccttatccattaatcccgttaagagggaagacgcagggacttattggtgtgaggtcttcaaccccatttcaaaaaatcagagcgatcccattatgctcaatgtgaattgcaagtag

SEQ ID NO: 28113 - DNA, 1437 bp, Artificial Sequence
  derived and/or modified sequence
atgccttttaatgtcgcagagggtaaggaggtccttcttttggtgcacaacctgccacagcagctgtttggatattcatggtataagggcgagcgagtagatggcaatagacagatcgtcggatacgccatcgggacgcagcaagccacacctggaccagctaactcaggaagagagaccatttaccctaatgcctccctgctcatccagaacgtcacacagaatgatacgggcttctatactctccaggtcatcaagagcgatttagtgaatgaggaagccaccggtcagttccacgtctaccccgaactgcctaagcccagcatttcttcaaataactcaaaccccgtggaagataaggacgctgtggcgttcacttgcgaaccggaaacacaagatactacttacctgtggtggattaataaccagtccctgcccgtcagtccccggctgcaactttcaaatggaaatcggactttaaccttactttctgttactaggaacgacactggtccctatgagtgtgaaatccagaatcctgtgtctgctaatagatctgatcccgtcacactgaacgtgacctacggtccagacacgcctacaattagccccagcgatacctactatagacccggggccaatctaagtttaagctgctacgccgcctcaaatcccccagcgcagtattcatggcttatcaatggaaccttccagcagtcaacacaagagctgtttatcccaaacatcaccgtgaacaactccggtagctacacttgccatgccaacaactccgtcactggatgcaataggacaactgtgaagaccattattgtgaccgagctttccccagtcgtggctaagccacagatcaaggctagtaaaaccactgtaaccggtgacaaagactccgtgaatttaacctgcagcactaacgataccggtatctcgataaggtggtttttcaaaaatcaaagcctcccatctagtgagcggatgaagctctcccagggtaatacaaccttgagcattaacccagtgaaaagagaagatgccggaacttactggtgtgaagtgtttaatccaattagcaagaatcagagcgatcctattatgctgaatgaaatggcattccaccacgtagctaaagccggcctcaagctgctctcaagctccaatccacctgcaagcacaagccagagcgctaaaatcactgaacgccaaaacctgaccatgctgccccgtctcgactctaattcctgggctcaggctatccttcctagcgtttcgcagtctgcagaaattacagataacgccctaccccaggaaaacggtttgagtcctggagcgattgctgggatcgtgatcggagtggtcgcattagtggctttaattgccgtcgccctcgcctgttttctgcatttcggtaagactgggtag

SEQ ID NO: 28114 - DNA, 1458 bp, Artificial Sequence
  derived and/or modified sequence
cgtggcgatcgagctgcagtgcttgaggctttcctcgagccaaagctgagctccaccggtgaggatagagcctctcggaggcaccacggcgcgccacttagccctacctcacaatccgcttgcactctcgggctgcttctaacagcatctctgctgacattctggaaccctcccactacagcccagttgaccacggaaagcatgcccttcaacgttgccgagggaaaggaagtgctacttttagttcacaacctccctcaacagttgtttggctattcctggtataaaggcgagagagtggatggcaaccggcaaattgtgggctacgccattgggactcagcaagcaactcccggccccgccaatagcgggagggagaccatctatcctaacgcaagtctgcttattcagaacgtaactcagaatgatacaggtttttatactctgcaagtgattaaatcagacttagtgaacgaggaagcaaccggccagttccatgtctatcccgagttgcccaaaccgagtatctcatccaataattctaatcccgtggaagataaagacgccgtcgcgtttacttgtgaaccagaaacccaggacactacatacctgtggtggatcaataaccaatccttgccagttagcccgagactccaattatcaaacggcaacaggacactgacccttcttagcgtaactagaaatgataccgggccttacgaatgcgagatccagaaccccgtcagcgcgaatagatccgaccctgtcaccctgaatgtgacatatggacctgacacgccaacgatttccccttcggacacgtattatcggcctggggccaacctgtcgctttcttgttatgcagcctccaatccacctgcacagtactcctggctgattaatggaaccttccaacaatccacgcaggaactgttcatacccaatatcactgtcaacaacagcgggtcatatacatgccacgcgaacaacagcgtaacgggctgcaatcggacaaccgtcaaaacgatcatcgtcacggaactgagccccgttgttgccaagccgcagatcaaagcctctaagactacagtcaccggtgataaagatagtgtgaacctcacctgttcaacaaatgacaccgggataagtatcagatggttcttcaagaatcagagtttgccaagcagcgagcgcatgaaactgagccaaggcaataccacactgagcataaatcctgtaaagcgggaggacgctggcacctactggtgtgaagtgtttaaccctatcagtaaaaaccagagtgaccctatcatgcttaacgtgaactataatgccctgccccaggaaaacggcctctccccgggcgccattgccggcatcgtgattggtgtggttgccttggtggcactgatagccgttgccctggcctgttttctgcatttcggaaaaaccggttag

SEQ ID NO: 28115 - DNA, 1395 bp, Artificial Sequence
  derived and/or modified sequence
atggggcatctctcagcaccattacatcgagtacgcgtgccatggcagggacttttgttgaccgccagcctcctgacattttggaaccctcctaccactgcgcagctgacaacggagagtatgccgttcaacgtagcagagggcaaggaagtgttgcttttggtgcacaatctcccccagcaactgttcggctactcatggtataaaggagaaagagtggatggaaacaggcagattgtgggttacgccataggtactcagcaagctaccccaggacccgcgaatagcggccgggagaccatttaccccaatgcctccctgcttatccagaacgtgacacaaaacgataccggattttatactctgcaggtgatcaaatcagacctggtcaacgaggaagctaccggccagtttcacgtctatccggaactgcctaagcccagtatctcttcgaataacagcaatcctgtcgaggataaagatgccgttgcatttacatgcgaacccgagacccaagacaccacatacctgtggtggatcaataatcaatcactgcccgtgtccccccgcctccagctcagtaacggcaacaggactctcaccttgttatccgtaacccggaacgatactggaccctacgaatgcgaaattcagaaccctgtgagtgcgaaccggtctgaccccgttactctcaacgtgacctatgggccagatactcccaccataagccccagtgacacttactatcgccccggggctaacttgtcattgtcttgttacgcagctagcaaccctcctgctcagtattcctggctgattaacgggaccttccagcagagcactcaggagctgttcattccgaacataactgtcaataattcaggctcctatacatgccatgcgaataatagcgtcaccgggtgtaacagaaccactgtgaaaaccatcatagtcactgagctctcgccggtcgtagcaaagccacaaattaaggcgtcaaagaccactgtaacaggcgacaaagacagcgtgaatctcacctgcagcacaaacgatacaggcatctcaatacggtggtttttcaagaatcagtccctgccttcgtcagagagaatgaaactgtcccagggcaacacgaccctctccattaatcccgtgaaacgtgaggacgccggcacctactggtgcgaagtctttaacccaatcagcaagaatcagtcagatcccataatgctcaacgttaactacaacgccctgccccaggagaacggcctgagccccggcgcgattgctggtatagttatcggggtggtggcactcgtggcgctgattgccgtggctctcgcctgcttcctgcactttggcaagacgggttccagcggaccactgcaatag

SEQ ID NO: 28116 - DNA, 1254 bp, Artificial Sequence
  derived and/or modified sequence
atgggccacctgagcgcccccctgcaccgggtgcgggtgccctggcagggcctgctgctgacagccagcctgctgaccttctggaacccccccaccacagcccagctgaccacagagagcatgcccttcaacgtggccgagggcaaggaggtgctgctgctggtgcacaacctgccccagcagctgtttggctacagctggtacaagggggagcgggtggatggcaaccggcagatcgtgggctacgccatcggcacccagcaggccaccccaggccctgccaacagcggccgggagaccatctacccaaatgccagcctgctgatccagaatgtgacccagaatgacaccggcttctacaccctgcaggtgatcaagagtgacctggtgaatgaggaggccaccggccagttccacgtgtacccagagctgcccaagcccagcatcagcagcaacaacagcaaccctgtggaggacaaggatgctgtggccttcacctgtgagcctgagacccaggacaccacctacctgtggtggatcaacaaccagagcctgcctgtgagcccccggctgcagctgagcaatggaaacagaaccctgaccctgctgtctgtgaccagaaatgacaccggcccctatgaatgtgagatccagaaccctgtgtctgccaacagaagtgaccctgtgaccctgaatgtgacctacggccctgacacccccaccatcagccccagcgacacctactacagacctggggccaacctgagcctgagctgctatgctgccagcaaccccccagcccagtacagctggctgatcaatggcaccttccagcagagcacccaggagctgttcatccccaacatcaccgtgaacaacagcggcagctacacctgccacgccaacaacagcgtgacaggctgcaacagaaccaccgtgaagaccatcatcgtgacagagctgagccctgtggtggccaagccccagatcaaggccagcaagaccaccgtgactggagacaaggacagcgtgaacctgacctgcagcaccaatgacaccggcatcagcatccgctggttcttcaagaaccagagcctgcccagcagcgagaggatgaagctgagccagggcaacaccaccctgagcatcaaccctgtgaagagagaagatgctggcacctactggtgtgaggtgttcaaccccatcagcaagaaccagagcgaccccatcatgctgaatgtgaactgcaagtag

SEQ ID NO: 28117 - DNA, 1437 bp, Artificial Sequence
  derived and/or modified sequence
atgcccttcaacgtggccgagggcaaggaggtgctgctgctggtgcacaacctgccccagcagctgtttggctacagctggtacaagggggagcgggtggatggcaaccggcagatcgtgggctacgccatcggcacccagcaggccaccccaggccctgccaacagcggccgggagaccatctacccaaatgccagcctgctgatccagaatgtgacccagaatgacaccggcttctacaccctgcaggtgatcaagagtgacctggtgaatgaggaggccaccggccagttccacgtgtacccagagctgcccaagcccagcatcagcagcaacaacagcaaccctgtggaggacaaggatgctgtggccttcacctgtgagcctgagacccaggacaccacctacctgtggtggatcaacaaccagagcctgcctgtgagcccccggctgcagctgagcaatggaaacagaaccctgaccctgctgtctgtgaccagaaatgacaccggcccctatgaatgtgagatccagaaccctgtgtctgccaacagaagtgaccctgtgaccctgaatgtgacctacggccctgacacccccaccatcagccccagcgacacctactacagacctggggccaacctgagcctgagctgctatgctgccagcaaccccccagcccagtacagctggctgatcaatggcaccttccagcagagcacccaggagctgttcatccccaacatcaccgtgaacaacagcggcagctacacctgccacgccaacaacagcgtgacaggctgcaacagaaccaccgtgaagaccatcatcgtgacagagctgagccctgtggtggccaagccccagatcaaggccagcaagaccaccgtgactggagacaaggacagcgtgaacctgacctgcagcaccaatgacaccggcatcagcatccgctggttcttcaagaaccagagcctgcccagcagcgagaggatgaagctgagccagggcaacaccaccctgagcatcaaccctgtgaagagagaagatgctggcacctactggtgtgaggtgttcaaccccatcagcaagaaccagagcgaccccatcatgctgaatgagatggccttccaccacgtggccaaggccggcctgaagctgctgagcagcagcaaccccccagccagcaccagccagagcgccaagatcacagagcggcagaacctgaccatgctgccccggctggacagcaacagctgggcccaggccatcctgcccagcgtgtcccagagcgctgagatcacagacaatgccctgccccaggagaatggcctgagccctggggccatcgccggcatcgtgattggagtggtggccctggtggccctgattgctgtggccctggcctgcttcctgcactttgggaagacaggatag

SEQ ID NO: 28118 - DNA, 1458 bp, Artificial Sequence
  derived and/or modified sequence
cggggggacagagctgctgtgctggaggccttcctggagcccaagctgagcagcactggagaagatcgggccagccgccgccaccacggggcccccctgagccccaccagccagagcgcctgcaccctgggcctgctgctgacagccagcctgctgaccttctggaacccccccaccacagcccagctgaccacagagagcatgcccttcaacgtggccgagggcaaggaggtgctgctgctggtgcacaacctgccccagcagctgtttggctacagctggtacaagggggagcgggtggatggcaaccggcagatcgtgggctacgccatcggcacccagcaggccaccccaggccctgccaacagcggccgggagaccatctacccaaatgccagcctgctgatccagaatgtgacccagaatgacaccggcttctacaccctgcaggtgatcaagagtgacctggtgaatgaggaggccaccggccagttccacgtgtacccagagctgcccaagcccagcatcagcagcaacaacagcaaccctgtggaggacaaggatgctgtggccttcacctgtgagcctgagacccaggacaccacctacctgtggtggatcaacaaccagagcctgcctgtgagcccccggctgcagctgagcaatggaaacagaaccctgaccctgctgtctgtgaccagaaatgacaccggcccctatgaatgtgagatccagaaccctgtgtctgccaacagaagtgaccctgtgaccctgaatgtgacctacggccctgacacccccaccatcagccccagcgacacctactacagacctggggccaacctgagcctgagctgctacgccgccagcaaccccccagcccagtacagctggctgatcaatggcaccttccagcagagcacccaggagctgttcatccccaacatcaccgtgaacaacagcggcagctacacctgccacgccaacaacagcgtgacaggctgcaacagaaccaccgtgaagaccatcatcgtgacagagctgagccctgtggtggccaagccccagatcaaggccagcaagaccaccgtgactggagacaaggacagcgtgaacctgacctgcagcaccaatgacaccggcatcagcatccgctggttcttcaagaaccagagcctgcccagcagcgagaggatgaagctgagccagggcaacaccaccctgagcatcaaccctgtgaagcgggaggatgctggcacctactggtgtgaggtgttcaaccccatcagcaagaaccagagcgaccccatcatgctgaatgtgaactacaatgccctgccccaggagaatggcctgagccctggggccatcgccggcatcgtcatcggcgtggtggccctggtggccctgattgctgtggccctggcctgcttcctgcactttgggaagacaggatag

SEQ ID NO: 28119 - DNA, 1395 bp, Artificial Sequence
  derived and/or modified sequence
atgggccacctgagcgcccccctgcaccgggtgcgggtgccctggcagggcctgctgctgacagccagcctgctgaccttctggaacccccccaccacagcccagctgaccacagagagcatgcccttcaacgtggccgagggcaaggaggtgctgctgctggtgcacaacctgccccagcagctgtttggctacagctggtacaagggggagcgggtggatggcaaccggcagatcgtgggctacgccatcggcacccagcaggccaccccaggccctgccaacagcggccgggagaccatctacccaaatgccagcctgctgatccagaatgtgacccagaatgacaccggcttctacaccctgcaggtgatcaagagtgacctggtgaatgaggaggccaccggccagttccacgtgtacccagagctgcccaagcccagcatcagcagcaacaacagcaaccctgtggaggacaaggatgctgtggccttcacctgtgagcctgagacccaggacaccacctacctgtggtggatcaacaaccagagcctgcctgtgagcccccggctgcagctgagcaatggaaacagaaccctgaccctgctgtctgtgaccagaaatgacaccggcccctatgaatgtgagatccagaaccctgtgtctgccaacagaagtgaccctgtgaccctgaatgtgacctacggccctgacacccccaccatcagccccagcgacacctactacagacctggggccaacctgagcctgagctgctatgctgccagcaaccccccagcccagtacagctggctgatcaatggcaccttccagcagagcacccaggagctgttcatccccaacatcaccgtgaacaacagcggcagctacacctgccacgccaacaacagcgtgacaggctgcaacagaaccaccgtgaagaccatcatcgtgacagagctgagccctgtggtggccaagccccagatcaaggccagcaagaccaccgtgactggagacaaggacagcgtgaacctgacctgcagcaccaatgacaccggcatcagcatccgctggttcttcaagaaccagagcctgcccagcagcgagaggatgaagctgagccagggcaacaccaccctgagcatcaaccctgtgaagagagaagatgctggcacctactggtgtgaggtgttcaaccccatcagcaagaaccagagcgaccccatcatgctgaatgtgaactacaatgccctgccccaggagaatggcctgagccctggggccatcgccggcatcgtgattggagtggtggccctggtggccctgattgctgtggccctggcctgcttcctgcactttgggaagacaggcagcagcggccccctgcagtag

SEQ ID NO: 28120 - DNA, 1254 bp, Artificial Sequence
  derived and/or modified sequence
atgggccacctgagcgcccccctgcaccgggtgcgggtgccctggcaagggctactgctaacggcgtcattgcttaccttttggaaccctcccacgacagcccagttaactactgagtccatgccatttaacgtggccgagggcaaagaagtactgttactagtacacaacctgcctcagcaactttttggatactcatggtacaaaggtgaaagggttgatggcaaccgtcagatcgtcggctacgccataggtacacaacaggcaacccccgggcccgctaattctgggagagaaaccatttatcctaatgcttctttacttatccagaacgttacacagaacgacacgggcttttatacgctgcaagtgatcaagtctgaccttgtcaacgaagaggccacagggcagtttcatgtttaccccgagttgcccaagccttctatttccagcaacaacagtaaccctgtagaggacaaagacgctgtggcctttacttgtgagccagaaacacaggacacgacctatctgtggtggattaacaaccagagccttccggtatctccccggctgcagctatcaaatgggaatcgcacacttactttattgagtgtcactcgaaatgacacagggccatacgaatgcgaaatccaaaatcctgtgagcgctaataggtcagatccagtaaccctgaacgtcacctatggtccagatactcctaccatcagtccatctgatacttattacagaccgggcgccaatctgagtctgagttgttatgccgcgtccaacccccccgcccaatattcttggttgattaacggaacatttcaacaatccacgcaggaactgttcatcccaaacattacagttaataacagtggtagttatacatgtcacgccaataactccgtcactggatgcaataggacaacggttaagaccataattgtcaccgaattatctcccgtcgttgcgaagccacaaataaaggcatccaaaactactgttacgggagacaaagattcggtgaatcttacatgtagcaccaacgataccggaatctccatacgatggttctttaaaaaccagtcacttccaagctctgaacggatgaagctgagccaaggtaacacgaccttgtcgatcaacccagtgaagcgcgaggacgccggaacttattggtgcgaagtgttcaatcccataagtaagaaccagagcgaccctattatgttaaatgtgaattgcaagtag

SEQ ID NO: 28121 - DNA, 1437 bp, Artificial Sequence
  derived and/or modified sequence
atgcccttcaacgtggccgagggcaaggaggtgctgctgctggtgcacaacctgccacaacagctttttgggtatagttggtacaagggagagcgcgttgacggcaaccgtcagatcgtggggtacgcaatcggaacgcaacaggcaactccgggcccagccaacagcggccgggaaaccatctaccctaacgcaagcctccttatccagaacgtgacccaaaatgacacggggttttataccctgcaagtgattaagtctgacctagtaaatgaagaggccactgggcaatttcacgtatacccagaactgccaaagccgtcaatctctagcaacaactctaatcccgtcgaagacaaagacgcagtcgcgttcacttgtgagccagaaacacaggatacaacgtacctgtggtggattaataaccagagcttgcctgtgagcccacgcttacagctaagcaatggaaaccggaccttgactctgctgagtgttacgagaaacgacaccgggccatatgagtgtgagatccaaaaccccgtgtctgcaaaccggtcagacccggttaccctcaacgtgacatatggaccggacacccccacgatcagtccatccgacacatactaccgcccgggtgccaatctttccctgagttgctatgccgccagcaacccccctgctcagtatagctggctgattaatgggacgtttcagcagtcaacccaggagctttttattccaaacattaccgtgaacaacagcggcagctacacatgccatgcaaataattcagtcaccggctgcaatcgaactacagtcaagacaattattgtcaccgagctctccccagtggtcgccaagccccaaatcaaagcctccaagactactgtaacaggtgataaggatagcgtgaatttgacgtgttctactaatgatacaggaatttcaattcgctggttctttaagaatcagtcgctgccgagtagtgaacgaatgaaattgtcacagggtaatacaacattgtctatcaatcccgttaaacgcgaggatgctggcacatactggtgcgaggtctttaacccgatctctaagaatcaatccgaccccattatgctgaacgagatggcctttcaccatgtagcaaaagcggggttgaaattgctgtcgagctccaaccctcctgcatctacctcccagagcgccaaaataacagaacgacagaatttaactatgctgcccaggctggattcaaattcatgggcccaggcgatcttgccatccgtaagccagagcgcagagataaccgacaatgcattaccccaagaaaatggcttgtcccccggcgcaatcgcggggatcgtaatcggagtcgtggcacttgttgcccttatcgctgtagctctcgcatgcttcctgcactttggtaagaccgggtag

SEQ ID NO: 28122 - DNA, 1458 bp, Artificial Sequence
  derived and/or modified sequence
cggggcgaccgggccgccgtgctggaggccttcctggagcccaagctgtcgtcaaccggagaagaccgggcctcacggagacaccacggcgcgccactgtccccaacttctcaatccgcttgtaccctcggactgcttcttacggcttccctgctcactttttggaatcctccaactacagctcagctgacgacagaaagtatgcctttcaacgtcgctgagggaaaggaggtgcttttgctggtgcacaacctgccacagcagctcttcggctatagctggtataagggggaaagagtagatggcaacagacagatcgtggggtatgcaataggtacccagcaggccacgcctggccctgctaatagcggccgcgagactatctatcctaatgcttcactcctgatccagaacgttacccagaacgacactgggttctatacgctccaggtcattaaatcagacctcgtaaatgaggaggccaccggacagttccacgtttatcccgaactgcctaagccaagtattagttccaacaactcgaaccctgtcgaggacaaggacgctgtagcatttacctgcgagcctgaaacccaagataccacctacctttggtggattaataatcagagcctgcccgtctctcccagactgcaattatcaaacggcaatcgtaccctgactctactgtcggttacccgcaacgacacagggccttacgagtgtgaaatccagaaccccgtgagcgccaataggagcgatccagtcacattgaatgtgacatacggaccggacacccccacaatctccccatccgatacatactaccggcctggcgccaacttatcactgtcatgctacgctgctagtaaccctccggcacagtatagttggttgattaacgggaccttccagcaaagcactcaggagctgttcatccccaatatcacggttaataattccggtagctatacctgtcacgcaaataacagcgtcaccggctgtaaccggacaaccgtcaagactatcatagtgacggaactctcaccggtggttgcgaaacctcagatcaaagcaagcaaaacaacggtcacaggtgacaaggattctgtcaacctaacatgctcgacaaatgatactggaattagcatacgctggtttttcaaaaaccaatcgctgccctcctccgagagaatgaagctgagccagggtaacacaacactgtccattaatccagtgaagcgcgaagacgccggcacctactggtgtgaggtgttcaacccaattagcaaaaatcagagcgatcccatcatgctcaacgttaactacaatgcactgccccaggagaacggactcagccccggagccatcgccggtatcgtgatcggggtagtcgccttagtggccctcattgccgtggccctcgcatgcttccttcatttcgggaagacaggctag

SEQ ID NO: 28123 - DNA, 1395 bp, Artificial Sequence
  derived and/or modified sequence
atgggccacctgagcgcccccctgcaccgggtgcgggtgccctggcagggcctgcttctcacagcctcactcttaacgttctggaacccccctaccaccgcgcagctgaccactgagtcaatgccttttaacgttgcagaggggaaggaagtccttctgttggtgcataacctgcctcaacaactattcggttattcctggtataaaggcgagcgcgtggatggcaaccgccagatcgtcggatatgcgatcgggactcagcaggccacccccggtccagccaattccgggcgcgaaaccatttaccccaacgcatctctgctgattcagaacgttacacaaaacgacactggcttctacacccttcaagttatcaagagtgatctagtcaatgaagaagcgactggacaattccatgtttatccggagctgccgaagcccagtatttcctcaaataactccaatcccgtggaagataaggatgcagttgccttcacatgtgaacctgaaacgcaggacactacatacctgtggtggataaacaatcagagtttgccagtcagccctagattgcagctgagcaatgggaaccgaaccttgacgcttctgagtgttacaagaaacgatacaggtccttacgagtgcgagatccagaacccagtctcggctaaccggagtgatcccgttaccctgaacgtcacatacgggcctgataccccaactatatctccatccgatacctactacagaccaggagctaatttgtccctgtcttgttacgcggccagcaatcctccagctcagtattcctggctcatcaacggaacctttcaacagtctacccaagagctattcatcccaaacattactgtgaataactcaggatcttatacctgtcatgctaacaactcagttacgggatgtaacagaacaaccgtgaaaactatcatcgtaactgaactgtcacccgtggttgcaaaacctcagatcaaagcgtctaaaacgaccgtaacaggcgataaagactctgtcaatctgacttgttcgacgaacgatactgggattagcattaggtggtttttcaaaaaccagagcctccctagctctgagcggatgaaactgtctcaaggcaatacaactttaagtatcaaccctgtaaaacgggaggacgcgggcacttactggtgcgaggtgttcaatcccatatcaaaaaatcaaagcgaccctattatgctgaacgttaactataacgctctgccacaggagaacggcctttcccccggagctatagccggcattgtaatcggtgtcgtagcattagtcgctctgatcgcagtcgccctggcatgcttcttacacttcggcaagaccggtagctctggtccattgcagtag

SEQ ID NO: 28124 - DNA, 1254 bp, Artificial Sequence
  derived and/or modified sequence
atgggacacctgagcgcccctctgcatcgagtgcgggttccttggcaagggttgttacttaccgcctctctcctgacattctggaaccctccgaccacagcccagttaaccaccgagtctatgccattcaacgtcgccgaggggaaggaggtgctactcctcgttcacaacctaccccagcaacttttcggctatagttggtataaaggcgagcgggtggacggtaaccgtcagatcgtggggtatgccatagggacccagcaagcaactcccggtccagccaatagtggaagggaaacaatctacccaaatgcctcactgcttatccagaatgtcacccagaacgataccggattttacactctgcaggtgatcaagtcggacctggtcaatgaagaggcaacagggcaatttcacgtgtatcctgaactccctaagccgagcatttctagtaacaactcgaatcctgttgaagacaaggatgctgtggcttttacatgtgaaccagagacccaagacactacatacttgtggtggattaacaatcagtccctgccagtgagccctcggctgcagctaagcaatggcaatcgcacactgacccttctcagcgtaactcgaaatgatacgggtccttatgaatgcgaaatacagaacccggtttctgccaaccgaagcgacccagtcacattaaatgtcacttacggccctgatacgccaactatctctccttcagatacctactacaggccaggggcaaatctgtccctaagttgttacgcggcatctaaccctcccgctcagtacagctggctgatcaacggaaccttccaacaatcaactcaggaactttttatccccaatatcactgtgaacaactccggtagttatacctgtcatgccaataacagtgtgactggttgcaaccgcactacagtgaaaacaattatcgtaacggagttgtctccagtggtagccaagcctcagattaaggcctccaaaaccacggtgacaggagacaaggactccgtgaatctgacatgcagcactaatgataccggcatctcaatcagatggttctttaagaaccagtccctcccatccagcgaaaggatgaaattatctcagggtaatacgaccctctccattaatcccgtaaagagagaggacgccggaacatactggtgcgaagtgttcaacccaataagcaaaaatcaatcagatcccataatgcttaacgtgaactgcaaatag

SEQ ID NO: 28125 - DNA, 1437 bp, Artificial Sequence
  derived and/or modified sequence
atgccattcaatgtggccgagggaaaggaggttctgctactggtccataatcttcctcagcaactgtttgggtactcctggtataagggcgagagagtagatgggaacagacagattgtgggatacgccatcggcactcagcaggctacaccaggacccgctaacagcgggagagagacaatttatccaaacgcatctttgctcatacagaacgtcactcaaaatgacacaggcttttatacgctgcaggtgattaagtcggatctggtcaacgaggaagctactggccagttccacgtataccccgaacttcccaaaccgtcgatatcctcaaataactctaatcccgtggaggataaggacgccgttgcctttacatgcgagcccgagacacaggataccacgtacctgtggtggatcaacaaccagtctttgcctgttagccccaggctccagctaagcaatggcaatcggaccctcacactgctgtccgtcacccggaatgatactggaccttacgagtgcgagattcaaaatcctgtgtcggctaatcggtccgacccagtcacattgaatgtcacctatgggcctgatacacccacgatctcgcccagcgacacttactatagaccaggggctaacctgagcctcagttgctatgcagccagtaatccaccagctcagtatagctggctgataaatggaacctttcagcagtctactcaggagctattcataccgaacattactgtaaacaatagcggcagttacacttgccatgctaataattccgtaaccggctgtaaccggaccaccgttaagactattatcgtgacggaactgtcaccggtggtggcgaagcctcagattaaggcttctaagactacggtgacaggagacaaagacagcgttaacctgacctgcagcaccaacgataccgggatcagcatacgctggtttttcaaaaatcagagtctgccgtcttccgaacgtatgaagctgtcgcagggaaatacgaccttgtcaattaatccagtcaagcgagaagatgctggaacatattggtgcgaagtctttaaccccatctctaaaaatcagtccgacccaataatgctgaatgaaatggcttttcaccatgtggctaaggccggattgaaattactcagttcctctaatcctcctgcgtctacctctcagtcagccaagatcacagagcggcaaaatttaaccatgttgcccagattagattcaaatagctgggctcaggctatcctgccttccgtctcccagagcgccgagataactgacaatgctttgccgcaggagaatggcctgtccccaggagcaatcgccggtatcgttatcggggtagttgcgctcgtggcgctgatcgctgtggccctggcttgttttctgcatttcggtaagaccggatag

SEQ ID NO: 28126 - DNA, 1458 bp, Artificial Sequence
  derived and/or modified sequence
cggggagaccgggcagcagtccttgaagctttcctggaacctaagctgtcctcaactggagaagaccgggcatcccgtcggcatcacggcgcacccctgtctcctaccagccagtctgcctgcactctcgggctgctgctgacagcaagcctccttaccttctggaatcctcccaccacggcgcagctgacaacagagtccatgccgtttaatgttgcagagggcaaagaggttttgctgctcgtgcataacctccctcagcagctgttcgggtatagctggtacaaaggcgagagagtggacgggaacaggcaaatcgttggatatgcaattggcacacagcaggccacccctgggcctgcgaactctggccgtgagactatctaccccaacgcttccctgttaattcaaaatgtgacacagaatgatacaggtttctataccctgcaggtcattaagagcgacctggtcaacgaggaggccaccgggcaattccacgtgtatcctgagctccccaaaccaagtataagcagtaacaactccaatccagtggaagataaagacgccgtggcctttacttgtgagcccgaaactcaagatacaacttacctgtggtggattaacaaccagagcctgccagtctccccgcgactgcaactgtctaacggaaaccggacgctcacactgctgtcagtgactcgaaatgatacaggaccctacgaatgtgagatacagaatcctgtctcagcaaaccgaagcgatcccgtgaccctgaatgtgacctacggccctgacaccccgactattagcccctcggatacttactaccggcctggcgctaatttgagcctgagttgctacgccgcaagtaaccccccagcccaatattcttggctgatcaacggtactttccagcagagcacacaggaactattcatccctaacattaccgtgaataattctgggagctacacttgccacgccaacaactctgttacaggatgtaacaggactactgtgaaaacaatcatagtcaccgagttgtctccggtcgtcgccaaaccccaaataaaagcaagcaaaacaaccgtaacgggggataaagattctgtgaacctgacatgctccaccaacgataccggtatcagtataaggtggttcttcaagaatcagagtctaccctcctccgagcgcatgaaattgagccagggcaacactaccctgtccatcaaccctgtaaagcgtgaagatgccggaacctattggtgcgaagtttttaaccccatctcaaaaaatcaaagtgacccaataatgctcaacgtgaactacaatgcattgccccaggagaacgggttgagtccaggcgcaatcgccggaattgtgatcggagtggtagccctggtggctcttattgcagtagcccttgcatgtttcctgcactttggcaagactggatag

SEQ ID NO: 28127 - DNA, 1395 bp, Artificial Sequence
  derived and/or modified sequence
atgggccacctgagcgctccacttcaccgggtgcgagtgccctggcagggactgctgttgaccgcttctctgctaaccttctggaaccctccaaccactgcccagttaaccactgagtccatgccttttaatgttgcggagggcaaagaggttctgctgctcgtccataacttaccccaacagctgtttggctatagttggtacaaaggggaacgagtagacggaaacagacagatcgtaggatatgccataggcacgcaacaggctacaccgggaccagcgaactcaggccgtgaaaccatttaccccaatgccagcctcctaatccaaaacgtgacccagaatgatacaggtttttacacccttcaagttattaagtcagacttggtgaacgaggaggccaccggccagtttcacgtttacccagaactgcccaagcctagtatctcatccaataactcaaacccggtggaggataaagacgctgtggcctttacctgtgagcctgagacacaggataccacctatctttggtggataaacaaccagtctctgccggtttcccctaggctccagctttcaaatggaaaccggactttaacattgctctctgttaccaggaacgacacaggaccttacgaatgcgaaattcagaatccggtgagtgcgaaccgatccgaccctgtgacactcaatgtgacgtacggtcccgacaccccaacgatttcaccatctgacacctattataggccgggagcgaacttaagcctaagctgctacgccgctagtaatcctccagcccagtatagttggctcataaatggcacatttcagcagtcaacgcaggagctgtttatccccaatattaccgtgaacaatagtggttcttatacatgccacgctaacaattcggtcactggctgtaaccgcaccaccgtcaagacgatcattgtgacagagctctcacctgtggtggctaaacctcaaattaaagcgtctaagaccaccgtcaccggagataaagacagtgtgaacttgacatgttccaccaacgatactggtatcagtattaggtggttttttaaaaaccagtcactgccctcctccgagcgaatgaagctgtctcagggcaacactactttatccatcaaccctgtcaagagggaagatgccggaacttactggtgcgaggttttcaatcccattagcaaaaaccaaagtgaccccatcatgttaaacgtaaattacaatgcccttcctcaggagaacgggctctcccccggagcaatagctggcattgtcattggcgttgtggccctggtagccctgatcgcggtcgcactggcatgctttcttcatttcggaaaaaccggctccagcgggcctctgcagtag

SEQ ID NO: 28128 - DNA, 1773 bp, Artificial Sequence
  derived and/or modified sequence
ggaaaacagcagaggtgacagagcagccgtgctcgaagcgttcctggagcccaagctctcctccacaggtgaagacagggccagcaggagacaccatggggcacctctcagccccacttcacagagtgcgtgtaccctggcaggggcttctgctcacagcctcacttctaaccttctggaacccgcccaccactgcccagctcactactgaatccatgccattcaatgttgcagaggggaaggaggttcttctccttgtccacaatctgccccagcaactttttggctacagctggtacaaaggggaaagagtggatggcaaccgtcaaattgtaggatatgcaataggaactcaacaagctaccccagggcccgcaaacagcggtcgagagacaatataccccaatgcatccctgctgatccagaacgtcacccagaatgacacaggattctacaccctacaagtcataaagtcagatcttgtgaatgaagaagcaactggacagttccatgtatacccggagctgcccaagccctccatctccagcaacaactccaaccctgtggaggacaaggatgctgtggccttcacctgtgaacctgagactcaggacacaacctacctgtggtggataaacaatcagagcctcccggtcagtcccaggctgcagctgtccaatggcaacaggaccctcactctactcagtgtcacaaggaatgacacaggaccctatgagtgtgaaatacagaacccagtgagtgcgaaccgcagtgacccagtcaccttgaatgtcacctatggcccggacacccccaccatttccccttcagacacctattaccgtccaggggcaaacctcagcctctcctgctatgcagcctctaacccacctgcacagtactcctggcttatcaatggaacattccagcaaagcacacaagagctctttatccctaacatcactgtgaataatagtggatcctatacctgccacgccaataactcagtcactggctgcaacaggaccacagtcaagacgatcatagtcactgagctaagtccagtagtagcaaagccccaaatcaaagccagcaagaccacagtcacaggagataaggactctgtgaacctgacctgctccacaaatgacactggaatctccatccgttggttcttcaaaaaccagagtctcccgtcctcggagaggatgaagctgtcccagggcaacaccaccctcagcataaaccctgtcaagagggaggatgctgggacgtattggtgtgaggtcttcaacccaatcagtaagaaccaaagcgaccccatcatgctgaacgtaaactgtaagtgactcctcaccccttcctatatgtccctctaggattactctgtcaatggtgtgcaaaatggataaaactcacaggaggcagaatatcaatgaagagaccattatagcaaacagaattgcaaagtggttaagagctcagctcaggccgggcacagtggctcacgcctgtaatcccagcagtttgggaggccaaggcgggcggatcacgagggcaggagatcgagaccatcctggctaatatggtgaaaccccgtgtctactaaaaatacaaaaaaaaattagccgggcatggtggcgggcgcctgtagtcccagctactcgggaggctgaggcgggagaatggcgtgaacctgggaggcggagctttcagtgagccgagatggtgccactgcactccagtctaggcaacagagcaagactctgtctc

SEQ ID NO: 28129 - DNA, 3677 bp, Artificial Sequence
  derived and/or modified sequence
aggctcagcacagagagtggaaaacagcagaggtgacagagcagccgtgctcgaagcgttcctggagcccaagctctcctccacaggtgaagacagggccagcaggagacaccatggggcacctctcagccccacttcacagagtgcgtgtaccctggcaggggcttctgctcacagcctcacttctaaccttctggaacccgcccaccactgcccagctcactactgaatccatgccattcaatgttgcagaggggaaggaggttcttctccttgtccacaatctgccccagcaactttttggctacagctggtacaaaggggaaagagtggatggcaaccgtcaaattgtaggatatgcaataggaactcaacaagctaccccagggcccgcaaacagcggtcgagagacaatataccccaatgcatccctgctgatccagaacgtcacccagaatgacacaggattctacaccctacaagtcataaagtcagatcttgtgaatgaagaagcaactggacagttccatgtatacccggagctgcccaagccctccatctccagcaacaactccaaccctgtggaggacaaggatgctgtggccttcacctgtgaacctgagactcaggacacaacctacctgtggtggataaacaatcagagcctcccggtcagtcccaggctgcagctgtccaatggcaacaggaccctcactctactcagtgtcacaaggaatgacacaggaccctatgagtgtgaaatacagaacccagtgagtgcgaaccgcagtgacccagtcaccttgaatgtcacctatggcccggacacccccaccatttccccttcagacacctattaccgtccaggggcaaacctcagcctctcctgctatgcagcctctaacccacctgcacagtactcctggcttatcaatggaacattccagcaaagcacacaagagctctttatccctaacatcactgtgaataatagtggatcctatacctgccacgccaataactcagtcactggctgcaacaggaccacagtcaagacgatcatagtcactgagctaagtccagtagtagcaaagccccaaatcaaagccagcaagaccacagtcacaggagataaggactctgtgaacctgacctgctccacaaatgacactggaatctccatccgttggttcttcaaaaaccagagtctcccgtcctcggagaggatgaagctgtcccagggcaacaccaccctcagcataaaccctgtcaagagggaggatgctgggacgtattggtgtgaggtcttcaacccaatcagtaagaaccaaagcgaccccatcatgctgaacgagatggcgtttcaccatgttgccaaggctggtctcaaactcctgagctcaagcaatccacccgcctccacctcccaaagtgctaagattacagagagacagaatctcaccatgttacccaggctggactcgaactcctgggctcaagcaatcctcccatctgtttcccaaagtgctgagattacagataatgctctaccacaagaaaatggcctctcacctggggccattgctggcattgtgattggagtagtggccctggttgctctgatagcagtagccctggcatgttttctgcatttcgggaagaccggcagggcaagcgaccagcgtgatctcacagagcacaaaccctcagtctccaaccacactcaggaccactccaatgacccacctaacaagatgaatgaagttacttattctaccctgaactttgaagcccagcaacccacacaaccaacttcagcctccccatccctaacagccacagaaataatttattcagaagtaaaaaagcagtaatgaaacctgtcctgctcactgcagtgctgatgtatttcaagtctctcaccctcatcactaggagattcctttcccctgtaggggtagaggggtggggacagaaacaactttctcctactcttccttcctaataggcatctccaggctgcctggtcactgcccctctctcagtgtcaatagatgaaagtacattgggagtctgtaggaaacccaaccttcttgtcattgaaatttggcaaagctgactttgggaaagagggaccagaacttcccctcccttccccttttcccaacctggacttgttttaaacttgcctgttcagagcactcattccttcccacccccagtcctgtcctatcactctaattcggatttgccatagccttgaggttatgtccttttccattaagtacatgtgccaggaaacaagagagagagaaagtaaaggcagtaatgccttctcctatttctccaaagccttgtgtgaactcaccaaacacaagaaaatcaaatatataaccaatagtgaaatgccacacctttgtccactgtcagggttgtctacctgtaggatcagggtctaagcaccttggtgcttagctagaataccacctaatccttctggcaagcctgtcttcagagaacccactagaagcaactaggaaaatcacttgccaaaatccaaggcaattcctgatggaaaatgcaaaagcacatatatgttttaatatctttatgggctctgttcaaggcagtgctgagagggaggggttatagcttcaggagggaaccagcttctgataaacacaatctgctaggaacttgggaaaggaatcagagagctgcccttcagcgattatttaaattattgttaaagaatacacaatttggggtattgggatttttctccttttctctgagacattccaccattttaatttttgtaactgcttatttatgtgaaaagggttatttttacttagcttagctatgtcagccaatccgattgccttaggtgaaagaaaccaccgaaatccctcaggtcccttggtcaggagcctctcaagattttttttgtcagaggctccaaatagaaaataagaaaaggttttcttcattcatggctagagctagatttaactcagtttctaggcacctcagaccaatcatcaactaccattctattccatgtttgcacctgtgcattttctgtttgcccccattcactttgtcaggaaaccttggcctctgctaaggtgtatttggtccttgagaagtgggagcaccctacagggacactatcactcatgctggtggcattgtttacagctagaaagctgcactggtgctaatgccccttggggaaatggggctgtgaggaggaggattataacttaggcctagcctcttttaacagcctctgaaatttatcttttcttctatggggtctataaatgtatcttataataaaaaggaaggacaggaggaagacaggcaaatgtacttctcacccagtcttctacacagatggaatctctttggggctaagagaaaggttttattctatattgcttacctgatctcatgttaggcctaagaggctttctccaggaggattagcttggagttctctatactcaggtacctctttcagggttttctaaccctgacacggactgtgcatactttccctcatccatgctgtgctgtgttatttaatttttcctggctaagatcatgtctgaattatgtatgaaaattattctatgtttttataataaaaataatatatcagacatcga

SEQ ID NO: 28130 - DNA, 3427 bp, Artificial Sequence
  derived and/or modified sequence
acagagagtggaaaacagcagaggtgacagagcagccgtgctcgaagcgttcctggagcccaagctctcctccacaggtgaagacagggccagcaggagacaccatggggcacctctcagccccacttcacagagtgcgtgtaccctggcaggggcttctgctcacagcctcacttctaaccttctggaacccgcccaccactgcccagctcactactgaatccatgccattcaatgttgcagaggggaaggaggttcttctccttgtccacaatctgccccagcaactttttggctacagctggtacaaaggggaaagagtggatggcaaccgtcaaattgtaggatatgcaataggaactcaacaagctaccccagggcccgcaaacagcggtcgagagacaatataccccaatgcatccctgctgatccagaacgtcacccagaatgacacaggattctacaccctacaagtcataaagtcagatcttgtgaatgaagaagcaactggacagttccatgtatacccggagctgcccaagccctccatctccagcaacaactccaaccctgtggaggacaaggatgctgtggccttcacctgtgaacctgagactcaggacacaacctacctgtggtggataaacaatcagagcctcccggtcagtcccaggctgcagctgtccaatggcaacaggaccctcactctactcagtgtcacaaggaatgacacaggaccctatgagtgtgaaatacagaacccagtgagtgcgaaccgcagtgacccagtcaccttgaatgtcacctatggcccggacacccccaccatttccccttcagacacctattaccgtccaggggcaaacctcagcctctcctgctatgcagcctctaacccacctgcacagtactcctggcttatcaatggaacattccagcaaagcacacaagagctctttatccctaacatcactgtgaataatagtggatcctatacctgccacgccaataactcagtcactggctgcaacaggaccacagtcaagacgatcatagtcactgagctaagtccagtagtagcaaagccccaaatcaaagccagcaagaccacagtcacaggagataaggactctgtgaacctgacctgctccacaaatgacactggaatctccatccgttggttcttcaaaaaccagagtctcccgtcctcggagaggatgaagctgtcccagggcaacaccaccctcagcataaaccctgtcaagagggaggatgctgggacgtattggtgtgaggtcttcaacccaatcagtaagaaccaaagcgaccccatcatgctgaacgtaaactataatgctctaccacaagaaaatggcctctcacctggggccattgctggcattgtgattggagtagtggccctggttgctctgatagcagtagccctggcatgttttctgcatttcgggaagaccggcagctcaggaccactccaatgacccacctaacaagatgaatgaagttacttattctaccctgaactttgaagcccagcaacccacacaaccaacttcagcctccccatccctaacagccacagaaataatttattcagaagtaaaaaagcagtaatgaaacctgtcctgctcactgcagtgctgatgtatttcaagtctctcaccctcatcactaggagattcctttcccctgtaggggtagaggggtggggacagaaacaactttctcctactcttccttcctaataggcatctccaggctgcctggtcactgcccctctctcagtgtcaatagatgaaagtacattgggagtctgtaggaaacccaaccttcttgtcattgaaatttggcaaagctgactttgggaaagagggaccagaacttcccctcccttccccttttcccaacctggacttgttttaaacttgcctgttcagagcactcattccttcccacccccagtcctgtcctatcactctaattcggatttgccatagccttgaggttatgtccttttccattaagtacatgtgccaggaaacaagagagagagaaagtaaaggcagtaatgccttctcctatttctccaaagccttgtgtgaactcaccaaacacaagaaaatcaaatatataaccaatagtgaaatgccacacctttgtccactgtcagggttgtctacctgtaggatcagggtctaagcaccttggtgcttagctagaataccacctaatccttctggcaagcctgtcttcagagaacccactagaagcaactaggaaaatcacttgccaaaatccaaggcaattcctgatggaaaatgcaaaagcacatatatgttttaatatctttatgggctctgttcaaggcagtgctgagagggaggggttatagcttcaggagggaaccagcttctgataaacacaatctgctaggaacttgggaaaggaatcagagagctgcccttcagcgattatttaaattattgttaaagaatacacaatttggggtattgggatttttctccttttctctgagacattccaccattttaatttttgtaactgcttatttatgtgaaaagggttatttttacttagcttagctatgtcagccaatccgattgccttaggtgaaagaaaccaccgaaatccctcaggtcccttggtcaggagcctctcaagattttttttgtcagaggctccaaatagaaaataagaaaaggttttcttcattcatggctagagctagatttaactcagtttctaggcacctcagaccaatcatcaactaccattctattccatgtttgcacctgtgcattttctgtttgcccccattcactttgtcaggaaaccttggcctctgctaaggtgtatttggtccttgagaagtgggagcaccctacagggacactatcactcatgctggtggcattgtttacagctagaaagctgcactggtgctaatgccccttggggaaatggggctgtgaggaggaggattataacttaggcctagcctcttttaacagcctctgaaatttatcttttcttctatggggtctataaatgtatcttataataaaaaggaaggacaggaggaagacaggcaaatgtacttctcacccagtcttctacacagatggaatctctttggggctaagagaaaggttttattctatattgcttacctgatctcatgttaggcctaagaggctttctccaggaggattagcttggagttctctatactcaggtacctctttcagggttttctaaccctgacacggactgtgcatactttccctcatccatgctgtgctgtgttatttaatttttcctggctaagatcatgtctgaattatgtatgaaaattattctatgtttttataataaaaataatatatca

SEQ ID NO: 28131 - DNA, 1254 bp, Artificial Sequence
  derived and/or modified sequence
atgggccacctgagcgcccccctgcacagagtgagagtgccctggcagggcctgctgctgaccgccagcctgctgaccttctggaacccccccaccaccgcccagctgaccaccgagagcatgcccttcaacgtggccgagggcaaggaggtgctgctgctggtgcacaacctgccccagcagctgttcggctacagctggtacaagggcgagagagtggacggcaacagacagatcgtgggctacgccatcggcacccagcaggccacccccggccccgccaacagcggcagagagaccatctaccccaacgccagcctgctgatccagaacgtgacccagaacgacaccggcttctacaccctgcaggtgatcaagagcgacctggtgaacgaggaggccaccggccagttccacgtgtaccccgagctgcccaagcccagcatcagcagcaacaacagcaaccccgtggaggacaaggacgccgtggccttcacctgcgagcccgagacccaggacaccacctacctgtggtggatcaacaaccagagcctgcccgtgagccccagactgcagctgagcaacggcaacagaaccctgaccctgctgagcgtgaccagaaacgacaccggcccctacgagtgcgagatccagaaccccgtgagcgccaacagaagcgaccccgtgaccctgaacgtgacctacggccccgacacccccaccatcagccccagcgacacctactacagacccggcgccaacctgagcctgagctgctacgccgccagcaacccccccgcccagtacagctggctgatcaacggcaccttccagcagagcacccaggagctgttcatccccaacatcaccgtgaacaacagcggcagctacacctgccacgccaacaacagcgtgaccggctgcaacagaaccaccgtgaagaccatcatcgtgaccgagctgagccccgtggtggccaagccccagatcaaggccagcaagaccaccgtgaccggcgacaaggacagcgtgaacctgacctgcagcaccaacgacaccggcatcagcatcagatggttcttcaagaaccagagcctgcccagcagcgagagaatgaagctgagccagggcaacaccaccctgagcatcaaccccgtgaagagagaggacgccggcacctactggtgcgaggtgttcaaccccatcagcaagaaccagagcgaccccatcatgctgaacgtgaactgcaagtag

SEQ ID NO: 28132 - DNA, 1437 bp, Artificial Sequence
  derived and/or modified sequence
atgcccttcaacgtggccgagggcaaggaggtgctgctgctggtgcacaacctgccccagcagctgttcggctacagctggtacaagggcgagagagtggacggcaacagacagatcgtgggctacgccatcggcacccagcaggccacccccggccccgccaacagcggcagagagaccatctaccccaacgccagcctgctgatccagaacgtgacccagaacgacaccggcttctacaccctgcaggtgatcaagagcgacctggtgaacgaggaggccaccggccagttccacgtgtaccccgagctgcccaagcccagcatcagcagcaacaacagcaaccccgtggaggacaaggacgccgtggccttcacctgcgagcccgagacccaggacaccacctacctgtggtggatcaacaaccagagcctgcccgtgagccccagactgcagctgagcaacggcaacagaaccctgaccctgctgagcgtgaccagaaacgacaccggcccctacgagtgcgagatccagaaccccgtgagcgccaacagaagcgaccccgtgaccctgaacgtgacctacggccccgacacccccaccatcagccccagcgacacctactacagacccggcgccaacctgagcctgagctgctacgccgccagcaacccccccgcccagtacagctggctgatcaacggcaccttccagcagagcacccaggagctgttcatccccaacatcaccgtgaacaacagcggcagctacacctgccacgccaacaacagcgtgaccggctgcaacagaaccaccgtgaagaccatcatcgtgaccgagctgagccccgtggtggccaagccccagatcaaggccagcaagaccaccgtgaccggcgacaaggacagcgtgaacctgacctgcagcaccaacgacaccggcatcagcatcagatggttcttcaagaaccagagcctgcccagcagcgagagaatgaagctgagccagggcaacaccaccctgagcatcaaccccgtgaagagagaggacgccggcacctactggtgcgaggtgttcaaccccatcagcaagaaccagagcgaccccatcatgctgaacgagatggccttccaccacgtggccaaggccggcctgaagctgctgagcagcagcaacccccccgccagcaccagccagagcgccaagatcaccgagagacagaacctgaccatgctgcccagactggacagcaacagctgggcccaggccatcctgcccagcgtgagccagagcgccgagatcaccgacaacgccctgccccaggagaacggcctgagccccggcgccatcgccggcatcgtgatcggcgtggtggccctggtggccctgatcgccgtggccctggcctgcttcctgcacttcggcaagaccggctag

SEQ ID NO: 28133 - DNA, 1458 bp, Artificial Sequence
  derived and/or modified sequence
agaggcgacagagccgccgtgctggaggccttcctggagcccaagctgagcagcaccggcgaggacagagccagcagaagacaccacggcgcccccctgagccccaccagccagagcgcctgcaccctgggcctgctgctgaccgccagcctgctgaccttctggaacccccccaccaccgcccagctgaccaccgagagcatgcccttcaacgtggccgagggcaaggaggtgctgctgctggtgcacaacctgccccagcagctgttcggctacagctggtacaagggcgagagagtggacggcaacagacagatcgtgggctacgccatcggcacccagcaggccacccccggccccgccaacagcggcagagagaccatctaccccaacgccagcctgctgatccagaacgtgacccagaacgacaccggcttctacaccctgcaggtgatcaagagcgacctggtgaacgaggaggccaccggccagttccacgtgtaccccgagctgcccaagcccagcatcagcagcaacaacagcaaccccgtggaggacaaggacgccgtggccttcacctgcgagcccgagacccaggacaccacctacctgtggtggatcaacaaccagagcctgcccgtgagccccagactgcagctgagcaacggcaacagaaccctgaccctgctgagcgtgaccagaaacgacaccggcccctacgagtgcgagatccagaaccccgtgagcgccaacagaagcgaccccgtgaccctgaacgtgacctacggccccgacacccccaccatcagccccagcgacacctactacagacccggcgccaacctgagcctgagctgctacgccgccagcaacccccccgcccagtacagctggctgatcaacggcaccttccagcagagcacccaggagctgttcatccccaacatcaccgtgaacaacagcggcagctacacctgccacgccaacaacagcgtgaccggctgcaacagaaccaccgtgaagaccatcatcgtgaccgagctgagccccgtggtggccaagccccagatcaaggccagcaagaccaccgtgaccggcgacaaggacagcgtgaacctgacctgcagcaccaacgacaccggcatcagcatcagatggttcttcaagaaccagagcctgcccagcagcgagagaatgaagctgagccagggcaacaccaccctgagcatcaaccccgtgaagagagaggacgccggcacctactggtgcgaggtgttcaaccccatcagcaagaaccagagcgaccccatcatgctgaacgtgaactacaacgccctgccccaggagaacggcctgagccccggcgccatcgccggcatcgtgatcggcgtggtggccctggtggccctgatcgccgtggccctggcctgcttcctgcacttcggcaagaccggctag

SEQ ID NO: 28134 - DNA, 1395 bp, Artificial Sequence
  derived and/or modified sequence
atgggccacctgagcgcccccctgcacagagtgagagtgccctggcagggcctgctgctgaccgccagcctgctgaccttctggaacccccccaccaccgcccagctgaccaccgagagcatgcccttcaacgtggccgagggcaaggaggtgctgctgctggtgcacaacctgccccagcagctgttcggctacagctggtacaagggcgagagagtggacggcaacagacagatcgtgggctacgccatcggcacccagcaggccacccccggccccgccaacagcggcagagagaccatctaccccaacgccagcctgctgatccagaacgtgacccagaacgacaccggcttctacaccctgcaggtgatcaagagcgacctggtgaacgaggaggccaccggccagttccacgtgtaccccgagctgcccaagcccagcatcagcagcaacaacagcaaccccgtggaggacaaggacgccgtggccttcacctgcgagcccgagacccaggacaccacctacctgtggtggatcaacaaccagagcctgcccgtgagccccagactgcagctgagcaacggcaacagaaccctgaccctgctgagcgtgaccagaaacgacaccggcccctacgagtgcgagatccagaaccccgtgagcgccaacagaagcgaccccgtgaccctgaacgtgacctacggccccgacacccccaccatcagccccagcgacacctactacagacccggcgccaacctgagcctgagctgctacgccgccagcaacccccccgcccagtacagctggctgatcaacggcaccttccagcagagcacccaggagctgttcatccccaacatcaccgtgaacaacagcggcagctacacctgccacgccaacaacagcgtgaccggctgcaacagaaccaccgtgaagaccatcatcgtgaccgagctgagccccgtggtggccaagccccagatcaaggccagcaagaccaccgtgaccggcgacaaggacagcgtgaacctgacctgcagcaccaacgacaccggcatcagcatcagatggttcttcaagaaccagagcctgcccagcagcgagagaatgaagctgagccagggcaacaccaccctgagcatcaaccccgtgaagagagaggacgccggcacctactggtgcgaggtgttcaaccccatcagcaagaaccagagcgaccccatcatgctgaacgtgaactacaacgccctgccccaggagaacggcctgagccccggcgccatcgccggcatcgtgatcggcgtggtggccctggtggccctgatcgccgtggccctggcctgcttcctgcacttcggcaagaccggcagcagcggccccctgcagtag

SEQ ID NO: 28135 - protein, 894 aa, Artificial Sequence
  derived and/or modified sequence
MTAIKHALQRDIFTPNDERLLSIVNVCKAGKKKKNCFLCATVTTERPVQVKVVKVKKSDKGDFYKRQIAWALRDLAVVDAKDAIKENPEFDLHFEKIYKWVASSTAEKNAFISCIWKLNQRYLRKKIDFVNVSSQLLEESVPSGENQSVTGGDEEVVDEYQELNAREEQDIEIMMEGCEYAISNAEAFAEKLSRELQVLDGANIQSIMASEKQVNILMKLLDEALKEVDQIELKLSSYEEMLQSVKEQMDQISESNHLIHLSNTNNVKLLSEIEFLVNHMDLAKGHIKALQEGDLASSRGIEACTNAADALLQCMNVALRPGHDLLLAVKQQQQRFSDLRELFARRLASHLNNVFVQQGHDQSSTLAQHSVELTLPNHHPFHRDLLRYAKLMEWLKSTDYGKYEGLTKNYMDYLSRLYEREIKDFFEVAKIKMTGTTKESKKFATLPRKESAVKQETESLHGSSGKLTGSTSSLNKLSVQSSGNRRSQSSSLLDMGNMSASDLDVADRTKFDKIFEQVLSELEPLCLAEQDFISKFFKLQQHQSMPGTMAEAEDLDGGTLSRQHNCGTPLPVSSEKDMIRQMMIKIFRCIEPELNNLIALGDKIDSFNSLYMLVKMSHHVWTAQNVDPASFLSTTLGNVLVTVKRNFDKCISNQIRQMEEVKISKKSKVGILPFVAEFEEFAGLAESIFKNAERRGDLDKAYTKLIRGVFVNVEKVANESQKTPRDVVMMENFHHIFATLSRLKISCLEAEKKEAKQKYTDHLQSYVIYSLGQPLEKLNHFFEGVEARVAQGIREEEVSYQLAFNKQELRKVIKEYPGKEVKKGLDNLYKKVDKHLCEEENLLQVVWHSMQDEFIRQYKHFEGLIARCYPGSGVTMEFTIQDILDYCSSIAQSH

SEQ ID NO: 28136 - DNA, 3357 bp, Artificial Sequence
  derived and/or modified sequence
agtgttgggggaacggccgcttcccgttcaacgctttattgaggggcgtatcctagtggcccccatccggtctccgttttggaagacccgcctcggcacagccaggctcagtccggccttgcgctgagaaaagatgacagcaatcaagcatgcattacaaagagacatttttacaccaaatgatgaacgcctgctgagcattgtgaatgtctgcaaagcaggaaaaaagaaaaagaactgttttttatgtgccacagtgacaactgaacgccctgtgcaggttaaggtggtcaaagtcaagaaatccgataagggagatttctacaaaaggcagattgcatgggcccttcgagatcttgctgtggtagatgccaaagatgctatcaaagaaaatcctgaatttgatttacactttgaaaaaatatataaatgggttgccagcagcactgctgaaaagaatgcatttatttcatgcatttggaaattgaatcagcgatatctccggaagaaaattgattttgtcaatgttagctcacagcttttggaagaatctgttccaagtggagaaaatcagagtgtgacaggaggtgatgaagaagtagtagatgaataccaagagttaaatgcaagagaagaacaggatatcgaaataatgatggaaggctgtgaatatgcaatctcgaatgcggaagcctttgcagaaaaattgtccagagagctgcaggtgctagatggggctaacatccagtcaatcatggcatctgaaaaacaagtcaacatcctgatgaaattgctagatgaggctctaaaggaggtagatcagattgaattgaaactgagcagttatgaggaaatgctccaaagtgtaaaagaacaaatggatcagatctctgaaagcaaccacctaattcatcttagtaacactaataatgtaaaactcctatctgagatagagttccttgtgaaccacatggacttggccaaaggtcatataaaggcccttcaggaaggagatcttgcttcttccagaggcattgaggcctgcaccaatgctgctgatgcccttctgcagtgcatgaatgtagctcttcgaccaggccatgacttgcttctggcagtcaaacagcaacagcagcgattcagtgatttgcgagagctttttgcccggagactggccagtcacctcaacaatgtttttgttcaacagggtcatgatcagagttcgactcttgcccaacactctgttgaactgactttacccaatcatcatccatttcatagagatttgctccgatatgccaagctgatggagtggctaaagagtacagattatggaaaatatgaaggactaacaaagaattacatggattatttatcccgactatatgaaagagaaatcaaagatttctttgaagttgcaaagatcaagatgactggcacaactaaagaaagcaagaagtttgctacactgcctcgaaaagaaagtgctgtcaaacaggaaacagagagtcttcatggaagttcggggaaattaactggatctacttctagtctaaataagctcagtgttcagagttcagggaatcgcagatctcagtcatcttccctgttggatatgggaaacatgtctgcctctgatctcgatgttgctgacaggaccaaatttgataagatctttgaacaggtactaagtgaactggagcccctatgtctggcagaacaggacttcataagtaaatttttcaaactacagcaacatcaaagtatgcctggaactatggctgaagcagaggacctggatggaggaacattatcacggcaacataattgtggcacaccactgcctgtttcatctgagaaagatatgatccgccaaatgatgattaaaatatttcgctgcattgagccagagctgaacaacctaattgcattaggagacaaaattgatagctttaactctctttatatgttagtcaaaatgagtcatcatgtgtggactgcacaaaatgtggaccctgcttctttcctaagtactacattgggaaatgttttggtgactgtcaaaaggaactttgacaaatgcattagtaaccaaataaggcaaatggaagaagtaaagatctcaaaaaagagtaaagttggaattcttccatttgttgctgaatttgaagaatttgctggacttgcagaatcaatcttcaaaaatgctgagcgtcgtggagacctggataaagcatacaccaaacttatcagaggagtatttgttaatgtggagaaagtagcaaatgaaagccagaagacccccagggatgtggttatgatggaaaactttcaccatatttttgcaactctttctcgattgaaaatctcatgtctagaagcagaaaaaaaagaagccaaacaaaaatacacagatcaccttcagtcttatgtcatttactctttaggacaacctcttgaaaaactaaatcatttctttgaaggtgttgaagctcgcgtggcacagggcataagggaggaggaagtaagttaccaacttgcatttaacaaacaagaacttcgtaaagtcattaaggagtaccctggaaaggaagtaaaaaaaggtctagataacctctacaagaaagttgataaacatttatgtgaagaagagaacttacttcaggtggtgtggcactccatgcaagatgaatttatacgccagtataagcactttgaaggtttgatagctcgctgttatcctggatctggtgttacaatggaattcactattcaggacattctggattattgttccagcattgcacagtcccactaaaccttgtgaaagaagaaaagataactgaatgaagcatttgagtataacagacactataccaaaataccaagcaactgttttgagaacccagacttaaaattttatgtattattaaatgttagataaatgggtagtaccatactacaaatatttaaatgcaaaattaccaacctatatagcagttttatttgccctataggttgcatactaacttaagcattcatgtcaccataaaatgcctttagcatttctcaatgactggatgggaaattttcctttattgcctagctgcttgtgtttgagtggttgtcctatgagcaatgcatttggagttcttcagctttcactacttctctgttgcttgctaatcatgtaactactaaaatactgtacaaaattgttttttcacactaacaaatgtgtatatggagaagagggctcatgtgatgatcatttgtgaacttagatttttgaggattatgtgactagtaataaatgtgaaataaattttcaaaaaagttgacatttgataatatttt

SEQ ID NO: 28137 - DNA, 3551 bp, Artificial Sequence
  derived and/or modified sequence
cttccttctctacgcggtcaacttccggcgcggagtttgtcacgtgcccggatataggaagtgttgggggaacggccgcttcccgttcaacgctttattgaggggcgtatcctagtggcccccatccggtctccgttttggaagacccgcctcggcacagccaggctcagtccggccttgcggtaagccttcggccgcggctgcccggtagtcccggcggcggcggacagacgagctgacaggcaccagggtctaaggcggctcctcagtccggctgctgtctccacgcctggggtcgggcaccgctccttctgaccttcctttccccgtttgtcccgctgagaaaagatgacagcaatcaagcatgcattacaaagagacatttttacaccaaatgatgaacgcctgctgagcattgtgaatgtctgcaaagcaggaaaaaagaaaaagaactgttttttatgtgccacagtgacaactgaacgccctgtgcaggttaaggtggtcaaagtcaagaaatccgataagggagatttctacaaaaggcagattgcatgggcccttcgagatcttgctgtggtagatgccaaagatgctatcaaagaaaatcctgaatttgatttacactttgaaaaaatatataaatgggttgccagcagcactgctgaaaagaatgcatttatttcatgcatttggaaattgaatcagcgatatctccggaagaaaattgattttgtcaatgttagctcacagcttttggaagaatctgttccaagtggagaaaatcagagtgtgacaggaggtgatgaagaagtagtagatgaataccaagagttaaatgcaagagaagaacaggatatcgaaataatgatggaaggctgtgaatatgcaatctcgaatgcggaagcctttgcagaaaaattgtccagagagctgcaggtgctagatggggctaacatccagtcaatcatggcatctgaaaaacaagtcaacatcctgatgaaattgctagatgaggctctaaaggaggtagatcagattgaattgaaactgagcagttatgaggaaatgctccaaagtgtaaaagaacaaatggatcagatctctgaaagcaaccacctaattcatcttagtaacactaataatgtaaaactcctatctgagatagagttccttgtgaaccacatggacttggccaaaggtcatataaaggcccttcaggaaggagatcttgcttcttccagaggcattgaggcctgcaccaatgctgctgatgcccttctgcagtgcatgaatgtagctcttcgaccaggccatgacttgcttctggcagtcaaacagcaacagcagcgattcagtgatttgcgagagctttttgcccggagactggccagtcacctcaacaatgtttttgttcaacagggtcatgatcagagttcgactcttgcccaacactctgttgaactgactttacccaatcatcatccatttcatagagatttgctccgatatgccaagctgatggagtggctaaagagtacagattatggaaaatatgaaggactaacaaagaattacatggattatttatcccgactatatgaaagagaaatcaaagatttctttgaagttgcaaagatcaagatgactggcacaactaaagaaagcaagaagtttgctacactgcctcgaaaagaaagtgctgtcaaacaggaaacagagagtcttcatggaagttcggggaaattaactggatctacttctagtctaaataagctcagtgttcagagttcagggaatcgcagatctcagtcatcttccctgttggatatgggaaacatgtctgcctctgatctcgatgttgctgacaggaccaaatttgataagatctttgaacaggtactaagtgaactggagcccctatgtctggcagaacaggacttcataagtaaatttttcaaactacagcaacatcaaagtatgcctggaactatggctgaagcagaggacctggatggaggaacattatcacggcaacataattgtggcacaccactgcctgtttcatctgagaaagatatgatccgccaaatgatgattaaaatatttcgctgcattgagccagagctgaacaacctaattgcattaggagacaaaattgatagctttaactctctttatatgttagtcaaaatgagtcatcatgtgtggactgcacaaaatgtggaccctgcttctttcctaagtactacattgggaaatgttttggtgactgtcaaaaggaactttgacaaatgcattagtaaccaaataaggcaaatggaagaagtaaagatctcaaaaaagagtaaagttggaattcttccatttgttgctgaatttgaagaatttgctggacttgcagaatcaatcttcaaaaatgctgagcgtcgtggagacctggataaagcatacaccaaacttatcagaggagtatttgttaatgtggagaaagtagcaaatgaaagccagaagacccccagggatgtggttatgatggaaaactttcaccatatttttgcaactctttctcgattgaaaatctcatgtctagaagcagaaaaaaaagaagccaaacaaaaatacacagatcaccttcagtcttatgtcatttactctttaggacaacctcttgaaaaactaaatcatttctttgaaggtgttgaagctcgcgtggcacagggcataagggaggaggaagtaagttaccaacttgcatttaacaaacaagaacttcgtaaagtcattaaggagtaccctggaaaggaagtaaaaaaaggtctagataacctctacaagaaagttgataaacatttatgtgaagaagagaacttacttcaggtggtgtggcactccatgcaagatgaatttatacgccagtataagcactttgaaggtttgatagctcgctgttatcctggatctggtgttacaatggaattcactattcaggacattctggattattgttccagcattgcacagtcccactaaaccttgtgaaagaagaaaagataactgaatgaagcatttgagtataacagacactataccaaaataccaagcaactgttttgagaacccagacttaaaattttatgtattattaaatgttagataaatgggtagtaccatactacaaatatttaaatgcaaaattaccaacctatatagcagttttatttgccctataggttgcatactaacttaagcattcatgtcaccataaaatgcctttagcatttctcaatgactggatgggaaattttcctttattgcctagctgcttgtgtttgagtggttgtcctatgagcaatgcatttggagttcttcagctttcactacttctctgttgcttgctaatcatgtaactactaaaatactgtacaaaattgttttttcacactaacaaatgtgtatatggagaagagggctcatgtgatgatcatttgtgaacttagatttttgaggattatgtgactagtaataaatgtgaaataaattttcaaaaaa

SEQ ID NO: 28138 - DNA, 2685 bp, Artificial Sequence
  derived and/or modified sequence
atgaccgcgattaaacacgccctgcaaagagatatctttacccccaacgatgagaggttgcttagtatagttaatgtctgcaaagcagggaagaaaaagaaaaattgtttcctctgcgctacagtgactactgagaggcccgtgcaggtgaaggttgtgaaggttaagaagagcgacaagggtgatttctataagcggcaaatagcatgggctctgagagatctggccgtggtggacgccaaggacgccattaaagaaaacccagagtttgacctgcatttcgagaaaatctacaaatgggtggcttcttccacagcagaaaaaaatgccttcatatcttgcatatggaaactaaatcagcgatatctgcggaagaagatagattttgtcaatgtctccagccagctcctagaagaatcagtaccttctggcgaaaaccaatctgtcacagggggcgacgaggaagtggtagatgagtaccaagaattgaacgcgcgggaggaacaggatattgagattatgatggagggatgcgaatatgccatctctaacgcagaagcttttgccgaaaagctgtctagagagctgcaggttctggatggcgcaaatatccagtccattatggccagtgagaagcaggttaacatccttatgaagctgctggatgaggccttgaaggaagtggaccagattgagctgaagctgagctcttacgaagaaatgctgcaaagcgtaaaggaacagatggaccagatctcagagtcgaaccacctgattcatctcagcaacacgaacaatgtcaagttactgagtgagattgagttcttagtgaatcatatggatctcgccaagggccatattaaggcactccaggaaggggacctggcatccagtcgcgggatcgaagcttgcacaaacgcagccgatgcgctgctgcagtgcatgaatgtcgcgcttcggcccggccacgatctgcttctggctgttaagcagcagcaacagagattcagcgacctgagggaactatttgctaggcgactggccagccatctgaataacgtcttcgtgcagcagggccacgaccaaagcagtacattggctcagcactcagttgagttgaccctccctaaccatcatccatttcaccgtgacctgttgagatatgctaagttgatggaatggctcaagagcaccgactacggcaaatatgagggattgaccaagaactatatggattacttgtctaggttatacgagcgcgaaattaaggatttctttgaggtggctaaaataaaaatgacaggaaccacgaaagagtctaagaaatttgctaccctgcctagaaaggagagtgcggtgaaacaagagacagaatcactgcatggctcatctggaaaactaactggaagcacctcgtccctaaataagctgagcgtgcagtcatccggaaatcggcgctcacaaagcagctccttacttgacatgggaaatatgagtgcgtctgacctggatgttgctgatcggacgaaatttgacaaaatcttcgagcaggtcctctctgagctggagcctctttgcctggctgaacaagattttatctctaagtttttcaagcttcagcagcaccagtccatgccgggaacgatggccgaggctgaggatctcgatggaggaaccctctcccggcaacacaattgcggtacgcccttgcctgtctcctccgagaaagatatgatccgacaaatgatgattaagatcttcagatgcattgaacccgaactgaataacctgatcgcgttgggtgacaaaatcgattcattcaactctctctatatgttagttaaaatgtcccatcacgtgtggaccgcccagaatgtggatcctgctagcttcctgtcaacaaccttgggtaatgtccttgtgacagttaaaaggaacttcgataaatgcattagtaaccagatcaggcagatggaagaggtaaagatttctaagaaatctaaagtggggatcctgccattcgtggcggagttcgaagagttcgccggtcttgccgagagcatttttaaaaacgccgagaggcgcggggacctggataaggcatatacaaagctcattcgcggtgtttttgtcaatgtcgaaaaggtggcaaatgaatcacagaagacaccccgtgacgtggttatgatggagaattttcatcacatcttcgccaccctgtctcgcctcaagatcagctgcctggaagcagagaaaaaggaggccaaacagaaatacacagatcacttgcagtcttatgtgatatatagcctgggccagccactagagaagcttaatcatttttttgaaggggttgaagccagggtggcgcagggtattagggaggaagaggtatcctatcaattggccttcaataaacaggagctgcggaaagtcattaaggaataccccggaaaggaagtgaagaaaggattggacaatttgtataaaaaggtcgacaaacacctgtgtgaggaggagaatctccttcaggtcgtgtggcatagcatgcaggacgaattcatccgccagtacaagcactttgagggcttgattgccaggtgctaccccgggagtggagtaaccatggaatttacgatccaggatatcctcgactactgcagctctattgcccaatcccactag

SEQ ID NO: 28139 - DNA, 2685 bp, Artificial Sequence
  derived and/or modified sequence
atgactgcgattaaacatgccctgcagagggatatatttacgccgaatgatgagcggctattgtccattgtcaacgtatgtaaggcaggaaaaaagaagaagaactgtttcctctgcgccaccgtgactactgaaaggcccgtgcaggtcaaggtggtcaaggtcaagaaatccgataagggggacttctacaaaaggcagatcgcgtgggcgctcagagacttggccgtcgttgatgctaaggatgccattaaagagaacccagaatttgacctgcattttgagaagatatataagtgggtcgcgagttctaccgccgaaaagaacgccttcatatcatgtatttggaaactgaaccagcggtatctgcggaaaaagatagacttcgtgaatgtctcatcccagctgctagaagagagtgtcccaagtggcgagaaccagtcagtcaccggcggcgatgaggaggttgtcgatgagtatcaggagctcaatgccagagaagaacaggatattgaaatcatgatggagggctgtgagtacgctatcagtaatgcggaggctttcgccgagaagctgtcccgggagctgcaagtgctcgatggtgctaacatacaatctataatggcatctgaaaagcaggtcaacatactcatgaagttgcttgatgaagcccttaaggaggtggatcaaatcgaactaaaacttagctcctacgaggagatgctacagagcgttaaggaacagatggatcagatcagcgagagcaatcaccttattcatttgtccaacaccaacaatgtgaaactgctgtccgaaatcgagttcctcgtcaaccatatggacctcgcgaaaggtcatattaaagccttgcaggagggcgacctcgcctcatcccgggggattgaagcttgtactaacgcagctgatgcgctgctccagtgcatgaacgtagcactgcgacctggacatgaccttctgctggctgttaagcagcagcaacaaaggttcagcgatctgcgtgagctgttcgcaaggcgcctggctagccacctgaataatgtcttcgtacaacagggtcatgatcagagcagcacccttgcccagcactcagttgagttaacccttcccaatcatcatcccttccacagggacctcctgagatatgctaagctgatggaatggcttaagagcaccgactatggtaaatatgaaggcctcacaaagaactatatggattaccttagccgtttgtacgagcgcgaaatcaaagattttttcgaggtcgcaaagataaagatgactggtactactaaagagagtaagaagttcgccacactgccccggaaggagtccgcggtcaagcaggaaacagagtcccttcacggctcctccggaaaactaacagggtccacttcctcactgaacaaactgtcagtgcagtcctcagggaatcgccgcagtcagagctcatcactactggacatggggaatatgtctgcaagcgatctggacgtggccgataggactaagttcgacaagatcttcgagcaagtgcttagtgagctcgagcctttgtgcctggcggagcaggactttatctctaagttttttaagctgcaacagcatcagtcaatgcccggcacaatggccgaagcagaggatctggatgggggaactctgtcccgacaacataactgcgggacacctctgcccgtctcttccgaaaaggacatgatcaggcagatgatgattaagatcttcaggtgcatcgaacctgaactcaacaacctcattgcattaggcgataagattgactccttcaactccctctatatgctcgtgaagatgtcccaccatgtctggaccgctcaaaatgtcgatcctgcctcatttctgagcaccacgctcggtaatgtgctggtgactgtcaagagaaatttcgataagtgtataagcaatcaaattagacagatggaagaggtgaagatctccaagaagtccaaggtggggatactcccctttgtcgccgagttcgaggagttcgccggactggccgagtctatctttaaaaacgctgagaggcgcggcgatctggataaagcatatacaaaattgatacggggtgtttttgtgaatgtcgagaaggtcgccaatgaatcccagaaaacccctagggatgtggtgatgatggaaaatttccatcatatatttgccaccctgtcccgcctgaaaatatcttgtcttgaggctgaaaagaaggaggccaaacaaaagtacaccgaccatctgcaatcatacgtgatctactccctgggccagccactggagaagctgaatcacttctttgaaggcgtcgaggctcgggtggcccaaggtatcagggaagaagaagtgagttatcagctggccttcaacaagcaggaactcagaaaagttatcaaggagtaccccggcaaagaggtaaaaaaggggctagacaacttatataaaaaggtggataagcatctgtgtgaagaagagaacctccttcaggtggtctggcattctatgcaggacgaattcatacgccaatacaagcactttgaggggctgattgcaaggtgctacccaggatctggcgtgacaatggaatttacgatccaggacatcctggattattgtagtagcatcgcgcagagtcattag

SEQ ID NO: 28140 - DNA, 2685 bp, Artificial Sequence
  derived and/or modified sequence
atgacagccatcaagcacgccctgcagagggacatcttcaccccaaatgatgagcggctgctgagcatcgtgaatgtgtgcaaggccggcaagaagaagaagaactgcttcctgtgtgccaccgtgaccacagagaggcctgtgcaggtgaaggtggtgaaggtgaagaagagtgacaagggggacttctacaagaggcagatcgcctgggccctgcgggacctggccgtggtggatgccaaggatgccatcaaggagaaccctgagtttgacctgcactttgagaagatctacaagtgggtggccagcagcacagctgagaagaatgccttcatcagctgcatctggaagctgaaccagcgctacctgaggaagaagattgactttgtgaatgtgagcagccagctgctggaggagagcgtgcccagcggggagaaccagagcgtgactggaggagatgaggaggtggtggatgagtaccaggagctgaatgcccgggaggagcaggacatcgagatcatgatggagggctgtgaatatgccatcagcaatgctgaggcctttgctgagaagctgagccgggagctgcaggtgctggatggagccaacatccagagcatcatggccagcgagaagcaggtgaacatcctgatgaagctgctggatgaggccctgaaggaggtggaccagatcgagctgaagctgagcagctatgaggagatgctgcagagcgtgaaggagcagatggaccagatcagcgagagcaaccacctgatccacctgagcaacaccaacaacgtgaagctgctgtctgaaattgagttcctggtgaaccacatggacctggccaagggccacatcaaggccctgcaggagggggacctggccagcagccggggcatcgaggcctgcaccaatgctgctgatgccctgctgcagtgcatgaatgtggccctgcggcccggccatgacctgctgctggccgtgaagcagcagcagcagcgcttcagtgacctgcgggagctgtttgcccggcggctggccagccacctgaacaacgtgtttgtgcagcagggccatgaccagagcagcaccctggcccagcacagcgtggagctgaccctgcccaaccaccaccccttccaccgggacctgctgcgctatgccaagctgatggagtggctgaagagcacagattatggcaagtatgagggcctgaccaagaactacatggactacctgagccggctgtatgaaagagagatcaaggacttctttgaggtggccaagatcaagatgacaggcaccaccaaggagagcaagaagtttgccaccctgcccaggaaggagagcgctgtgaagcaggagacagagagcctgcacggcagcagcggcaagctgaccggcagcaccagcagcctgaacaagctgtctgtgcagagcagcggcaacagaagaagccagagcagcagcctgctggacatgggcaacatgtctgccagtgacctggatgtggccgacaggaccaagtttgacaagatctttgagcaggtgctgtctgagctggagcccctgtgcctggccgagcaggacttcatcagcaagttcttcaagctgcagcagcaccagagcatgcctggcaccatggccgaggccgaggacctggatggcggcaccctgagccggcagcacaactgtggcacccccctgcctgtgagcagcgagaaggacatgatccggcagatgatgatcaagatcttccgctgcatcgagcctgagctgaacaacctgattgccctgggggacaagattgacagcttcaacagcctgtacatgctggtgaagatgagccaccacgtgtggacagcccagaatgtggaccctgccagcttcctgagcaccaccctgggcaatgtgctggtgacagtgaagaggaactttgacaagtgcatcagcaaccagatccggcagatggaggaggtgaagatcagcaagaagagcaaggtgggcatcctgccctttgtggccgagtttgaggagtttgctggcctggccgagagcatcttcaagaatgctgagcggcggggggacctggacaaggcctacaccaagctgatccggggcgtgtttgtgaatgtggagaaggtggccaatgaaagccagaagaccccaagagatgtggtgatgatggagaacttccaccacatctttgccaccctgagccggctgaagatcagctgcctggaggccgagaagaaggaggccaagcagaagtacacagaccacctgcagagctatgtgatctacagcctgggccagcccctggagaagctgaaccacttctttgagggcgtggaggcccgggtggcccagggcatccgggaggaggaggtgtcctaccagctggccttcaacaagcaggagctgaggaaggtgatcaaggagtacccaggcaaggaggtgaagaagggcctggacaacctgtacaagaaggtggacaagcacctgtgtgaggaggagaacctgctgcaggtggtgtggcacagcatgcaggatgagttcatccggcagtacaagcactttgagggcctgattgcccgctgctacccaggcagcggcgtgaccatggagttcaccatccaggacatcctggactactgcagcagcatcgcccagagccactag

SEQ ID NO: 28141 - DNA, 2685 bp, Artificial Sequence
  derived and/or modified sequence
atgaccgccatcaagcacgccctgcagcgggacatcttcacccccaatgacgagaggctgctgagcattgtgaacgtctgtaaggccggaaaaaagaagaagaattgctttctttgtgctacagtgaccaccgaaagaccggtccaggtgaaagtggtcaaagtgaagaaaagcgataagggagacttttacaaacgccagatcgcatgggctctccgcgacctggcagtggtcgatgcaaaggacgctatcaaagagaacccagagttcgatctccactttgagaaaatttataagtgggtggcttcttctaccgccgagaagaatgcatttatctcatgtatttggaagctgaaccagcgatacctgaggaaaaaaatcgacttcgttaatgtgtcctcgcagctcctggaagagtctgtaccctccggagagaaccagagcgtcaccggcggggacgaggaagttgtggacgagtaccaggagctcaatgcgcgcgaagagcaggatatcgaaattatgatggaaggatgtgagtatgcaatctctaacgccgaggcttttgcagagaagttgtcccgcgagctgcaggtgttggacggcgcaaatatccagtcaattatggcatccgagaaacaggtgaacattctaatgaagctgctggacgaagcactcaaggaagtagatcagattgagttaaaactgtcatcatacgaagagatgctacaatccgtgaaagaacagatggatcagatttctgagagcaatcatttgatacacctcagtaatacaaacaatgtgaagttactgtccgaaattgaatttctggttaatcatatggatctggccaagggtcacatcaaagctttacaggagggcgacttggcttcgtcaagaggcattgaagcttgcaccaatgcggccgatgccctattgcaatgcatgaatgtcgctctgcgccccggccatgacctgctcttggcggtgaagcagcagcaacagagattcagtgatttgcgggaactcttcgccaggcgactggcctcccacctgaataacgtgttcgtccagcagggacatgatcaaagctccaccctggcccaacactctgtggagctgacactgcctaaccaccacccttttcaccgtgacttacttagatacgcaaagctaatggaatggctgaaaagtactgactacggtaagtacgagggcctgactaaaaactatatggactatctaagtaggctgtatgaacgggaaatcaaggattttttcgaagtggcaaaaatcaagatgacaggcaccacaaaggagtcaaaaaaattcgccaccctgcctcgtaaagaatcagctgtgaaacaggagaccgagtcactgcatgggtcaagcggaaaactgacagggtcaacaagcagtctcaacaaactgagtgtccagagcagtggcaatcgaaggtctcagagcagctccctgttggatatgggcaacatgagtgcttctgaccttgacgttgctgaccgaaccaaattcgacaaaattttcgaacaagtgctctctgaattggaacccctatgtctggccgagcaggattttatttcaaaattcttcaaattacagcagcatcagtctatgcccggcactatggctgaggccgaagacctagacggcgggacactgtcaaggcagcataattgtgggacacccttacccgtttccagcgagaaggatatgatccgtcagatgatgataaaaatttttcgctgtatcgagccagaactcaacaatctgattgccctgggtgataagatagatagctttaattccctctacatgctggtgaaaatgagccaccacgtctggacagcacaaaacgtagacccagcaagcttcctgtctaccacactggggaacgtcctcgtgacagtgaaacgaaatttcgacaaatgtatatctaatcaaatcagacaaatggaggaggtaaagatctccaaaaaatcgaaggttgggattctcccatttgtcgcagaattcgaggaatttgccgggcttgccgagagcatttttaagaacgcggagagaagaggcgaccttgacaaggcctacacaaaactgattcgaggggttttcgtaaacgtcgagaaggtcgcaaacgagtctcagaagacacctcgcgacgtggttatgatggaaaactttcaccacattttcgccacgctctcccggttgaagatctcctgtttggaggccgaaaagaaggaagcaaagcaaaaatatacagatcacctgcagtcgtatgttatttactctctggggcagcccctggaaaaattaaaccactttttcgaaggagtggaggctcgagtggctcagggaatccgggaggaagaggtctcttatcagctggcatttaacaaacaggagttgagaaaggttatcaaggaataccctggaaaggaagtgaaaaaggggttggataatctgtacaagaaagttgacaagcacttgtgtgaagaggagaacctgctccaagtcgtgtggcacagtatgcaggatgaattcatcaggcaatacaagcattttgaaggactcattgctcgttgttaccccggtagcggtgttaccatggaatttactatacaggatatcctggactactgctctagcatcgcccaatcccactag

SEQ ID NO: 28142 - DNA, 2685 bp, Artificial Sequence
  derived and/or modified sequence
atgaccgccatcaagcacgccctgcagcgggacatcttcacccccaatgatgaacgtctcctcagcattgtgaatgtatgcaaggccgggaagaagaagaagaattgcttcctatgtgccaccgtcacgacagagagaccggtccaggtgaaggtggtaaaagtgaagaagagcgataagggagacttctacaagcggcagattgcgtgggccctgcgcgatttagcagtcgttgacgccaaggatgccatcaaggagaaccccgaattcgatttacactttgaaaaaatttacaagtgggtggcaagctcaacggcagaaaagaatgccttcatttcatgcatctggaagctaaatcagcgatatctcaggaaaaagattgacttcgttaacgtatccagtcaattattagaagagtctgttcctagcggggaaaatcagtccgtcactggcggagacgaggaagtcgtggacgaatatcaagagctgaatgccagagaagaacaagatatcgaaatcatgatggaaggatgcgaatatgccattagtaatgctgaagctttcgccgagaagctctcaagagagttgcaggtgcttgacggcgctaacatccaatctataatggcctctgagaagcaggtcaacattctgatgaagctgttggacgaagccctgaaagaggtcgatcagatcgaactcaagctctcatcctatgaagagatgctccagtctgtgaaggagcagatggatcagatcagtgaaagtaaccacttgatccacttatccaatactaacaacgtcaagctcttgagcgaaattgaatttctggtgaatcatatggacctcgccaaaggtcatatcaaggctctgcaggagggagacctggcttcctccaggggaatcgaagcctgcacaaatgccgctgacgcactactgcagtgtatgaatgtggccctccgccccggacacgacctccttctcgccgtgaagcaacagcaacaaaggtttagcgacctgagagaactctttgcaaggcgtctggcctcccacttgaacaacgtgttcgtgcagcaagggcacgatcagtcctctacccttgcacagcatagtgttgagttaactctaccgaaccatcaccctttccaccgggatctgctgcgctatgccaaactaatggagtggctgaaaagtaccgactatgggaaatatgaggggttaaccaaaaattacatggattacctgagccggttatacgaaagagagatcaaggacttcttcgaggtggctaaaatcaagatgaccggtacgaccaaggagtcaaaaaagtttgctactttgcctaggaaggagagcgccgtaaaacaggaaactgagtcattgcacggcagctccggtaagctcacagggagtacctcttccctgaataagctttccgtgcagtcatctggcaatcgccgatctcagtcgtcctcgctgctggacatggggaatatgagcgctagcgatcttgacgtggccgaccgcacaaaatttgacaagatctttgagcaagtgctgagtgagctggagcctttatgcctcgcagaacaagacttcatatcaaagttctttaaactacagcagcaccagtccatgcccggaactatggccgaggctgaggatctggatgggggaacactgtccagacagcacaactgcggtacccccttaccagtgtccagcgagaaagatatgataagacagatgatgataaaaatatttcgatgtatcgaacccgaattaaataatttgatcgctttgggcgataagattgactcttttaactccttatacatgctggtgaaaatgtctcatcacgtgtggactgctcagaacgtggaccccgctagctttttgagcactactttaggtaatgtgctcgtaaccgtcaaacggaactttgacaagtgtataagcaaccagatcagacagatggaggaggttaaaatcagtaagaaatctaaagtgggtattttacccttcgtcgctgagttcgaggagttcgcaggactcgccgagtctatatttaagaatgcagagcgccggggggacctggacaaggcctacaccaagctgatccgcggggtcttcgtcaacgtcgagaaggtggcaaatgaatcgcagaagactccaagagatgtcgtgatgatggagaatttccaccatattttcgccacactgtccaggcttaaaataagttgcctggaggctgaaaagaaggaagccaagcaaaagtatacagatcaccttcaatcctacgtgatatactcgctcgggcaacctcttgagaaacttaaccatttctttgaaggtgttgaggctagagtcgcacaagggattagggaggaggaagtgagttaccagctggcatttaataaacaggagctgcgtaaggtgatcaaggaataccctggcaaagaggttaaaaagggcctggataatctgtacaaaaaagtggacaaacatctgtgtgaggaagagaatctccttcaggtggtgtggcactctatgcaggacgagtttataaggcagtataagcactttgaaggcctgatagcccgttgttacccgggctccggcgtgactatggagttcaccattcaggatattttggactactgtagcagcatagcccagtcacactag

SEQ ID NO: 28143 - DNA, 2685 bp, Artificial Sequence
  derived and/or modified sequence
atgacagccataaaacacgctttgcaacgggatatttttacccccaacgacgagagactgctgtcaatagtcaatgtgtgcaaagctggaaaaaaaaagaagaattgcttcttatgcgcaaccgtgacaactgaacgcccagtccaagtgaaagttgtgaaagtgaagaaatcggataaaggggatttttacaagaggcagatcgcctgggctttaagagacttggctgtcgtagatgcgaaggacgctatcaaagagaacccagagttcgaccttcattttgagaagatctacaagtgggtcgctagcagcacagctgaaaaaaatgccttcatcagttgcatttggaagctgaaccaacgatacctcaggaagaagattgacttcgtgaacgtgagtagccagttgctggaagagagtgtgccgtctggagaaaaccagtccgtcactggaggtgacgaggaggtggtcgatgaataccaggaactcaacgcacgggaagaacaggacatcgagattatgatggagggttgcgagtacgcaataagtaacgcggaagctttcgcggaaaagttaagccgcgagctgcaggtcctcgacggtgccaacattcagtctattatggcgtcagaaaagcaggtcaacatactcatgaaactcctggacgaggcactcaaggaggtggaccagattgaattgaaactttcaagttacgaagagatgctgcagagcgtgaaggaacagatggaccagatttcagagagcaaccatcttattcatctgtctaatacaaataacgtgaagctgttaagcgaaatcgagttcctggtgaaccatatggatctggccaaggggcacatcaaggcgctacaggaaggtgacctcgcctccagccgcggtattgaggcttgtacgaacgctgcagacgctctgcttcagtgtatgaacgtcgcgctgcggccaggccatgacctacttttggctgtgaagcagcaacagcagcggttcagtgacctccgcgaactgttcgctcggcgtcttgcctctcacctgaacaatgtcttcgttcagcagggccacgatcagagcagtacgctggctcagcacagcgtcgagctgaccctgccaaatcatcatcctttccatcgagacctgttgcgctatgcaaagctgatggagtggctcaagtctacagactacggtaaatatgagggccttaccaagaactacatggattatctgagcaggttgtatgaacgcgaaatcaaagactttttcgaagttgcgaagataaaaatgactggaactaccaaagagtctaaaaagttcgccaccttaccaaggaaggagtcagccgtgaagcaagagaccgagagcctgcatggaagctctggaaagcttaccgggtctacatcatcgctgaacaagctgagtgtccagtcttccggaaatcgcaggagccagagctcttccctcctcgatatggggaatatgtctgcctctgacctggacgtggccgaccggacaaagttcgacaagatcttcgagcaggtgttgtccgagctggaaccactctgcctggccgagcaggacttcatcagcaagtttttcaagctccagcagcatcaaagcatgccagggactatggccgaggctgaggacctggatggcggaacccttagtcgtcagcataattgcggtacccctttgcccgtgagttccgagaaagatatgatccgtcaaatgatgattaagatttttcggtgcatcgagcctgaactgaataacttaattgccctgggggacaaaattgatagcttcaatagtctgtatatgctcgtgaagatgtcccaccacgtttggacggcacagaacgtcgaccctgcaagcttcctaagtaccaccctggggaacgtactcgttaccgttaagcgcaactttgataaatgtatctctaatcaaatcaggcagatggaggaggtaaagatatcaaagaagtcaaaagtaggaatcctgcccttcgtcgcagagtttgaggaattcgccggattagcagagtctatcttcaagaatgccgagcggaggggcgacctggacaaggcgtacaccaaactgatccgcggagttttcgtaaatgtggagaaggttgctaatgaatcccagaagactccgagagacgtggtaatgatggagaatttccatcatatcttcgctactctgtcccgcctgaaaatttcctgcctggaagccgaaaaaaaagaagcaaaacaaaaatataccgaccatctgcaaagttacgtaatctatagtctcggacagcctctggaaaagctcaaccacttcttcgagggagtggaagccagggtagcacagggcatccgcgaagaagaagtttcatatcagttggcttttaataaacaggagctccgaaaggtcataaaggaatatcctggtaaggaagtgaagaagggtttggacaatctttacaagaaagtggataagcatctgtgcgaagaggagaatcttctccaagtggtgtggcatagtatgcaagacgagtttattagacagtacaagcatttcgaggggctcatcgcccgttgttatccagggtccggagttacgatggagttcactatccaggatatcttagactactgtagctccatcgcccagagccactag

SEQ ID NO: 28144 - DNA, 2685 bp, Artificial Sequence
  derived and/or modified sequence
atgactgccatcaaacacgcccttcagcgcgacatttttacccccaacgatgaacggttgttgtccatcgtgaatgtgtgtaaggccggtaaaaaaaagaagaattgctttctgtgcgccacagttaccaccgagcgccctgtacaggttaaggttgtgaaggtcaagaagtctgacaaaggggacttttataagcggcagattgcctgggccctgcgcgatctggccgtagtggatgccaaagatgcaattaaggagaatccggagtttgacctgcacttcgaaaagatttacaagtgggtcgcatctagcactgcagagaagaacgccttcatttcatgtatttggaagctgaaccaacggtatttgcgaaaaaagattgatttcgtcaatgtgtcatcccaattgctggaggagtcagtcccaagtggcgaaaaccagtccgtcaccgggggagacgaggaagttgttgacgagtatcaggagctcaacgctagggaggagcaagacattgaaataatgatggaagggtgcgagtatgcgatttcgaacgccgaagcctttgcggaaaagctgagtagggagctacaagttctggacggcgctaacatccaaagcatcatggcttccgagaagcaagtgaatattcttatgaaactgttggatgaagcactgaaggaggtggaccaaattgaattgaaattgagctcctacgaggagatgttgcaatccgtgaaagagcagatggaccaaatcagcgaatccaatcatctcattcacctcagtaatacgaataatgtgaagctgctgagcgaaattgagtttttggttaaccacatggacctcgctaagggacatattaaggccctccaggagggtgaccttgcatccagccgcggaatcgaggcgtgtactaacgccgctgacgccttgctacagtgcatgaacgtggctctgagaccgggacacgacttacttttggctgtgaagcagcaacagcagcggttttcagacttgcgggagctgttcgccagacgattggcctcccacctaaacaacgtgtttgtgcaacaggggcatgatcagtcctcaactctggctcagcatagtgtcgagctaacactcccgaatcatcacccgttccatagggacttgctccgttacgctaaactgatggagtggctgaaaagtacagattatgggaagtacgaaggcctgacaaaaaactatatggactatttgagtcggctgtacgaaagagagatcaaagacttcttcgaggtggctaaaattaaaatgactggtacaaccaaggagtcaaaaaaatttgcgaccctccccaggaaggagtctgccgttaagcaggaaaccgaaagcctgcacggttcttcaggtaaattgaccggatctaccagtagtctgaataagctatcagtgcagtcttcgggaaatcgccgtagtcagtcaagttctttgctcgatatgggaaatatgtccgccagcgatcttgatgttgctgatcgcaccaaattcgataagatatttgaacaagtactgtcggaactggaacccctttgcctggctgagcaggacttcatctctaaattttttaaattgcaacagcatcaaagcatgcctggcaccatggccgaagccgaagacctggatggcggaactctgtccaggcagcacaactgcgggaccccactgcccgtgtccagcgagaaggacatgatccggcaaatgatgatcaagatcttcaggtgtatagagccagagctcaacaacctcatcgccctgggggataaaatcgatagtttcaattcactgtatatgctagttaagatgagtcatcacgtatggaccgctcagaacgtagaccccgctagcttcttatcgacaaccttgggtaacgtgctcgttacggtgaaacggaacttcgacaaatgcatctccaaccagattcggcagatggaggaagtgaagatctccaagaagagtaaggtcgggatcctgccgttcgtcgcagaattcgaggagtttgctggcttagctgaaagcatattcaagaatgccgaaaggagaggcgatctggacaaagcgtacaccaaattgattcgaggcgtatttgttaatgttgaaaaggtggcaaacgaatcccagaagacccctcgtgacgtcgtgatgatggaaaattttcaccatatctttgccacgttgtccagactcaagatttcatgtctagaagcagagaagaaagaggcaaagcagaagtatactgaccatctgcagagctacgtgatctactctctggggcagccgctagagaaacttaaccatttttttgaaggggtggaggcacgcgtcgcccaggggatacgggaagaggaagtttcttatcaactggcctttaacaagcaagaactgaggaaagtgattaaagagtaccccggtaaggaggtgaagaagggactggacaacttgtataaaaaagtggataagcatttatgcgaagaggagaatttgcttcaggtagtctggcacagcatgcaggacgaatttatacggcagtataagcacttcgaggggctcattgctcgctgctacccaggcagcggtgttactatggaatttacaattcaggacatactcgattactgctcatctatcgctcagtcgcattag

SEQ ID NO: 28145 - DNA, 2685 bp, Artificial Sequence
  derived and/or modified sequence
atgaccgccatcaagcacgccctgcagagagacatcttcacccccaacgacgagagactgctgagcatcgtgaacgtgtgcaaggccggcaagaagaagaagaactgcttcctgtgcgccaccgtgaccaccgagagacccgtgcaggtgaaggtggtgaaggtgaagaagagcgacaagggcgacttctacaagagacagatcgcctgggccctgagagacctggccgtggtggacgccaaggacgccatcaaggagaaccccgagttcgacctgcacttcgagaagatctacaagtgggtggccagcagcaccgccgagaagaacgccttcatcagctgcatctggaagctgaaccagagatacctgagaaagaagatcgacttcgtgaacgtgagcagccagctgctggaggagagcgtgcccagcggcgagaaccagagcgtgaccggcggcgacgaggaggtggtggacgagtaccaggagctgaacgccagagaggagcaggacatcgagatcatgatggagggctgcgagtacgccatcagcaacgccgaggccttcgccgagaagctgagcagagagctgcaggtgctggacggcgccaacatccagagcatcatggccagcgagaagcaggtgaacatcctgatgaagctgctggacgaggccctgaaggaggtggaccagatcgagctgaagctgagcagctacgaggagatgctgcagagcgtgaaggagcagatggaccagatcagcgagagcaaccacctgatccacctgagcaacaccaacaacgtgaagctgctgagcgagatcgagttcctggtgaaccacatggacctggccaagggccacatcaaggccctgcaggagggcgacctggccagcagcagaggcatcgaggcctgcaccaacgccgccgacgccctgctgcagtgcatgaacgtggccctgagacccggccacgacctgctgctggccgtgaagcagcagcagcagagattcagcgacctgagagagctgttcgccagaagactggccagccacctgaacaacgtgttcgtgcagcagggccacgaccagagcagcaccctggcccagcacagcgtggagctgaccctgcccaaccaccaccccttccacagagacctgctgagatacgccaagctgatggagtggctgaagagcaccgactacggcaagtacgagggcctgaccaagaactacatggactacctgagcagactgtacgagagagagatcaaggacttcttcgaggtggccaagatcaagatgaccggcaccaccaaggagagcaagaagttcgccaccctgcccagaaaggagagcgccgtgaagcaggagaccgagagcctgcacggcagcagcggcaagctgaccggcagcaccagcagcctgaacaagctgagcgtgcagagcagcggcaacagaagaagccagagcagcagcctgctggacatgggcaacatgagcgccagcgacctggacgtggccgacagaaccaagttcgacaagatcttcgagcaggtgctgagcgagctggagcccctgtgcctggccgagcaggacttcatcagcaagttcttcaagctgcagcagcaccagagcatgcccggcaccatggccgaggccgaggacctggacggcggcaccctgagcagacagcacaactgcggcacccccctgcccgtgagcagcgagaaggacatgatcagacagatgatgatcaagatcttcagatgcatcgagcccgagctgaacaacctgatcgccctgggcgacaagatcgacagcttcaacagcctgtacatgctggtgaagatgagccaccacgtgtggaccgcccagaacgtggaccccgccagcttcctgagcaccaccctgggcaacgtgctggtgaccgtgaagagaaacttcgacaagtgcatcagcaaccagatcagacagatggaggaggtgaagatcagcaagaagagcaaggtgggcatcctgcccttcgtggccgagttcgaggagttcgccggcctggccgagagcatcttcaagaacgccgagagaagaggcgacctggacaaggcctacaccaagctgatcagaggcgtgttcgtgaacgtggagaaggtggccaacgagagccagaagacccccagagacgtggtgatgatggagaacttccaccacatcttcgccaccctgagcagactgaagatcagctgcctggaggccgagaagaaggaggccaagcagaagtacaccgaccacctgcagagctacgtgatctacagcctgggccagcccctggagaagctgaaccacttcttcgagggcgtggaggccagagtggcccagggcatcagagaggaggaggtgagctaccagctggccttcaacaagcaggagctgagaaaggtgatcaaggagtaccccggcaaggaggtgaagaagggcctggacaacctgtacaagaaggtggacaagcacctgtgcgaggaggagaacctgctgcaggtggtgtggcacagcatgcaggacgagttcatcagacagtacaagcacttcgagggcctgatcgccagatgctaccccggcagcggcgtgaccatggagttcaccatccaggacatcctggactactgcagcagcatcgcccagagccactag

SEQ ID NO: 28146 - protein, 140 aa, Artificial Sequence
  derived and/or modified sequence
MPLVKRNIDPRHLCHTALPRGIKNELECVTNISLANIIRQLSSLSKYAEDIFGELFNEAHSFSFRVNSLQERVDRLSVSVTQLDPKEEELSLQDITMRKAFRSSTIQDQQLFDRKTLPIPLQETYDVCEQPPPLNILTPY

SEQ ID NO: 28147 - protein, 559 aa, Artificial Sequence
  derived and/or modified sequence
MPLVKRNIDPRHLCHTALPRGIKNELECVTNISLANIIRQLSSLSKYAEDIFGELFNEAHSFSFRVNSLQERVDRLSVSVTQLDPKEEELSLQDITMRKAFRSSTIQDQQLFDRKTLPIPLQETYDVCEQPPPLNILTPYRDDGKEGLKFYTNPSYFFDLWKEKMLQDTEDKRKEKRKQKQKNLDRPHEPEKVPRAPHDRRREWQKLAQGPELAEDDANLLHKHIEVANGPASHFETRPQTYVDHMDGSYSLSALPFSQMSELLTRAEERVLVRPHEPPPPPPMHGAGDAKPIPTCISSATGLIENRPQSPATGRTPVFVSPTPPPPPPPLPSALSTSSLRASMTSTPPPPVPPPPPPPATALQAPAVPPPPAPLQIAPGVLHPAPPPIAPPLVQPSPPVARAAPVCETVPVHPLPQGEVQGLPPPPPPPPLPPPGIRPSSPVTVTALAHPPSGLHPTPSTAPGPHVPLMPPSPPSQVIPASEPKRHPSTLPVISDARSVLLEAIRKGIQLRKVEEQREQEAKHERIENDVATILSRRIAVEYSDSEDDSEFDEVDWLE

SEQ ID NO: 28148 - protein, 89 aa, Artificial Sequence
  derived and/or modified sequence
MPLVKRNIDPRHLCHTALPRGIKNELECVTNISLANIIRQLSSLSKYAEDIFGELFNEAHSFSFRVNSLQERVDRLSVSVTQLDPKEEE

SEQ ID NO: 28149 - protein, 180 aa, Artificial Sequence
  derived and/or modified sequence
MPLVKRNIDPRHLCHTALPRGIKNELECVTNISLANIIRQLSSLSKYAEDIFGELFNEAHSFSFRVNSLQERVDRLSVSVTQLDPKEEELSLQDITMRKAFRSSTIQDQQLFDRKTLPIPLQETYDVCEQPPPLNILTPYRDDGKEGLKFYTNPSYFFDLWKEKMLQDTEDKRKEKRKQK

SEQ ID NO: 28150 - DNA, 1680 bp, Artificial Sequence
  derived and/or modified sequence
atgcccctggtgaagagaaacatcgaccccagacacctgtgccacaccgccctgcccagaggcatcaagaacgagctggagtgcgtgaccaacatcagcctggccaacatcatcagacagctgagcagcctgagcaagtacgccgaggacatcttcggcgagctgttcaacgaggcccacagcttcagcttcagagtgaacagcctgcaggagagagtggacagactgagcgtgagcgtgacccagctggaccccaaggaggaggagctgagcctgcaggacatcaccatgagaaaggccttcagaagcagcaccatccaggaccagcagctgttcgacagaaagaccctgcccatccccctgcaggagacctacgacgtgtgcgagcagcccccccccctgaacatcctgaccccctacagagacgacggcaaggagggcctgaagttctacaccaaccccagctacttcttcgacctgtggaaggagaagatgctgcaggacaccgaggacaagagaaaggagaagagaaagcagaagcagaagaacctggacagaccccacgagcccgagaaggtgcccagagccccccacgacagaagaagagagtggcagaagctggcccagggccccgagctggccgaggacgacgccaacctgctgcacaagcacatcgaggtggccaacggccccgccagccacttcgagaccagaccccagacctacgtggaccacatggacggcagctacagcctgagcgccctgcccttcagccagatgagcgagctgctgaccagagccgaggagagagtgctggtgagaccccacgagccccccccccccccccccatgcacggcgccggcgacgccaagcccatccccacctgcatcagcagcgccaccggcctgatcgagaacagaccccagagccccgccaccggcagaacccccgtgttcgtgagccccacccccccccccccccccccccccctgcccagcgccctgagcaccagcagcctgagagccagcatgaccagcaccccccccccccccgtgcccccccccccccccccccccgccaccgccctgcaggcccccgccgtgccccccccccccgcccccctgcagatcgcccccggcgtgctgcaccccgcccccccccccatcgccccccccctggtgcagcccagcccccccgtggccagagccgcccccgtgtgcgagaccgtgcccgtgcaccccctgccccagggcgaggtgcagggcctgccccccccccccccccccccccccctgcccccccccggcatcagacccagcagccccgtgaccgtgaccgccctggcccacccccccagcggcctgcaccccacccccagcaccgcccccggcccccacgtgcccctgatgccccccagcccccccagccaggtgatccccgccagcgagcccaagagacaccccagcaccctgcccgtgatcagcgacgccagaagcgtgctgctggaggccatcagaaagggcatccagctgagaaaggtggaggagcagagagagcaggaggccaagcacgagagaatcgagaacgacgtggccaccatcctgagcagaagaatcgccgtggagtacagcgacagcgaggacgacagcgagttcgacgaggtggactggctggagtag

SEQ ID NO: 28151 - DNA, 1680 bp, Artificial Sequence
  derived and/or modified sequence
atgcctctggttaaacgaaacattgaccctagacatctttgtcacaccgcgttgcccagggggatcaaaaacgagctcgaatgtgttacgaacatcagtctcgctaatatcatccgccagctgagcagcctgtccaagtatgcggaagacatctttggcgagctcttcaatgaagcacactcctttagttttcgcgtgaactccctccaggagagggtggatcgcctgagtgtaagcgtaacccagctggatcccaaagaggaagaattaagcctgcaggacatcacgatgcgcaaagccttccgcagctctacaatccaggatcagcaactgttcgataggaagacattacccattcccctccaggaaacgtacgatgtttgcgaacagcccccacccctgaacatcctgaccccttatcgggatgacggcaaggaaggcctcaagttctacaccaacccatcttatttttttgacctctggaaggaaaaaatgctacaggatacagaggataagagaaaggaaaaacgaaaacagaaacaaaaaaacctggaccggccacacgagcccgaaaaagtaccacgggctccccacgaccgccggcgagagtggcagaagctggcgcagggaccggagctggcagaagacgacgcaaatctattgcacaaacacatagaagtggcaaacggccccgcttctcacttcgaaacccggccccaaacatacgtcgaccacatggacgggtcatacagcctgtccgctttacctttttcacagatgtcagagctcctaacaagagcggaagagagagtcctggtgagacctcacgagcccccacccccaccacccatgcacggagctggtgatgccaagcccatcccaacctgtatttcatcagccacgggattgattgaaaatcggcctcaatcgcccgccacgggacggacgcctgtctttgtgtcccctactcccccaccaccgcctccaccactgcctagtgccctaagtacttccagcttgagagcatccatgacaagtacaccgccacccccggtcccaccaccgccgccaccaccagccactgccttgcaggcgcctgccgtgccgccaccgccagccccgctgcagatagctcccggagtcttacacccagccccccctccgattgcccctccactggtacagccttccccccctgtggccagggcggctccggtgtgcgaaacagtgccagtacatcccctcccgcaaggcgaggtgcaaggtctccctccccctccacctcccccgcctttgccgccccctggaattcgaccctcctcccccgtgaccgttacagcactcgctcatcctccttccggcctgcatccgacaccctcaacagcaccaggccctcatgtgccgctgatgcccccttcgcccccaagccaagttatccctgcatctgagcccaagagacatccttctactctgcctgtgatctccgatgcgcggagtgtattactggaggcaatccggaaaggtatacaactgcgcaaggtggaggagcagcgcgagcaggaggccaaacacgaaaggatagagaatgatgtggcaactatcttgagccgtaggatcgccgtggagtattctgactctgaagacgacagcgagttcgacgaggtcgactggttggagtag

SEQ ID NO: 28152 - DNA, 1680 bp, Artificial Sequence
  derived and/or modified sequence
atgcccttggtgaaacggaatatcgaccccaggcacctgtgtcacacagctctgccaagagggattaagaacgaacttgaatgcgttacaaacatttcattagcgaacattattcgtcagctgagttcactctccaagtacgccgaggacattttcggggagttgttcaatgaggctcattccttctcctttcgagttaactctctccaggaaagagtggataggctctcagtgagcgttacccagctagaccctaaagaagaagagctgagccttcaagacatcaccatgcgcaaagcctttcgcagttccaccattcaagatcaacagctctttgaccgcaagactctcccaatccccctccaggaaacatatgatgtgtgtgagcagccgccacccctgaacatcctgactccctatcgggacgacggaaaagagggcttgaaattctataccaatccctcttatttttttgacttgtggaaagaaaaaatgctccaagataccgaggacaaaaggaaggagaaaaggaagcagaagcagaagaacctggatcgtccacacgaacctgaaaaggtccctagggccccccatgacaggagaagagaatggcagaaactggctcagggtcctgaactcgcggaagatgacgctaacctgttgcacaaacacattgaagtcgccaacggccctgcatcccactttgagacacgaccgcaaacctatgtcgatcacatggacggtagctactctttgtctgccctgccctttagccagatgtctgaattgctgacacgcgcagaagaaagggttctggtccgcccacatgaacctcctccccctccacccatgcacggagccggtgacgccaagcccattcctacctgcatctccagtgctacaggtttgatcgaaaatcgaccccagtccccagccactgggaggactcctgtgtttgtgagccctaccccccctcccccacccccgcctctcccctctgctctctcaacatcctccctgcgcgcctctatgaccagcactccaccccctcctgttcccccccctcctcctcctcctgctactgctctgcaggctcctgctgtcccaccccctccagcgccgcttcaaatcgcacctggggtgctgcaccctgcaccgccgcccatcgcccctcctttagtccagccctctccacccgtggctcgtgcagccccagtgtgcgagaccgtccccgtgcaccccctaccacagggggaggtccagggcttgcctcctcctcctcccccccctcctctgccaccacctgggatccgtccttcctcgcctgtaaccgtgacagccctcgctcacccgcctagcggcctgcaccccaccccctctacagcccccggaccacacgtgccactgatgccaccttctccgccgagccaggtaatccctgctagtgagccgaagaggcacccctctacactgcccgttatctcagatgcccgctctgtccttttggaagcgattcgaaagggcattcagttacggaaggttgaggagcagcgtgagcaggaggctaagcacgagcgcatagaaaacgacgtcgcaactattctatccaggaggatcgccgtagaatatagtgattccgaggatgactcagaatttgatgaagtcgattggctcgagtag

SEQ ID NO: 28153 - DNA, 1680 bp, Artificial Sequence
  derived and/or modified sequence
atgcccctggtgaagcgaaacatcgatcccagacacctgtgccatacggcacttccaaggggaatcaaaaatgaactcgagtgcgtaactaacatatccctggctaacataatccgtcagctcagttcgttgtctaaatatgcggaagacatctttggtgagttgttcaacgaagcccacagcttctctttccgcgtcaatagcctacaggagagggtggataggttatcagtctcagttacacagctggatccgaaagaggaagagctgagtctgcaggatattacaatgcgtaaggctttccgatcttcaaccattcaagatcagcagttgtttgatagaaagaccttgcctatccctcttcaggagacttacgatgtgtgtgaacaaccacctcccttaaacatcctaaccccctacagggacgatgggaaagaaggattaaaattctacaccaatcctagctattttttcgatctgtggaaggaaaagatgctacaggatacggaggataaacgaaaggaaaagcgtaagcaaaagcagaagaatctggacagaccccacgaaccggagaaggtccctcgagccccacacgaccgaaggcgcgaatggcaaaagttggcacagggtcccgagcttgcggaggatgacgctaatctcctgcataagcatattgaagtggccaatggacctgcctctcacttcgaaacacgcccacagacgtatgtcgatcacatggacggatcctactcccttagcgccttgccattctcacaaatgtcggagttgctcaccagagccgaggaaagagtcctggtgcggccacacgaacccccacctcccccgcctatgcacggggctggtgacgccaagcctattcctacgtgtatctcttccgcaactggtctcatagagaatcgtcctcagtctcctgccactggcaggactccggtgtttgtatctcccacgcctcccccaccacctccacccctgcccagcgcactgtcgacatccagcctcagagcctccatgaccagtacccctcctccacctgtaccacctccaccccctcctcctgctaccgccctacaggcccccgccgtgccgccaccccctgctcccttacagattgcgcccggagttttacatccggccccaccgccaatagcacctccgctcgtgcagccatccccccccgtggctagagctgctccggtctgtgagacagttccagttcacccactaccacagggagaagtgcaaggattgccaccacctcctcccccgccacccctacccccaccaggtatcagaccatcaagtcctgtcaccgtgaccgccttagctcacccaccaagcgggctgcacccaaccccctccacagcccccggacctcacgtccccctaatgcccccctcaccaccaagtcaggtgatcccggcttcagagcccaagagacacccatccactttgcccgtgattagtgacgctcgctccgtgctgctggaagccattcgtaaagggatccagctcaggaaagtagaggaacaaagggagcaggaagccaaacacgagcgcatcgaaaacgatgtggccacaatcctgtctaggcggattgccgtggagtattccgactcagaggacgatagcgagttcgatgaggtagactggttagagtag

SEQ ID NO: 28154 - DNA, 1680 bp, Artificial Sequence
  derived and/or modified sequence
atgcctctggtgaagcggaacatcgatcctcggcacctttgtcatactgcactgcccaggggaatcaaaaatgaattggagtgcgtgacaaacatcagcctggccaacataatacgacagttgagcagcctttctaaatacgccgaggacatctttggtgagctgttcaatgaggcccattcatttagcttccgggtgaactcattgcaggaaagagtggatagactctcagtcagcgtgacacagttggaccccaaggaggaggaacttagcctccaggacattacaatgcggaaggcctttcggtcctctactatacaggaccagcagctctttgacaggaagaccctgcctatcccgctgcaggagacatacgatgtctgcgagcagcccccccccttgaacatcttgactccctatcgcgatgacggtaaggagggactcaaattctataccaatccgtcctactttttcgacctgtggaaagaaaagatgttgcaggacacggaggataaacggaaagagaaacggaaacagaagcagaagaacttagatcggcctcacgagcctgagaaagtaccgagagcacctcatgatagacgcagggaatggcagaagctcgcccagggccctgaattagccgaagatgatgctaacctgctccataaacatattgaagtcgctaatggccctgccagtcattttgaaacgaggccacagacgtatgttgatcacatggacggatcatactcactgtctgccctgccattttctcaaatgagcgagctgttgactcgcgccgaggagcgcgtgctcgtgcgaccacacgaaccacccccaccacccccaatgcacggcgcaggagacgcaaaaccaatacctacttgtatcagcagcgcaacagggctgattgagaaccgcccccagagccccgcaaccgggcgcacgccagtgttcgtgtctcctactcctcctcccccacctccccctctaccaagcgctcttagcacttcttcgcttagagccagcatgacctccactcctccaccccctgttcccccccctcccccaccccccgctacagctctgcaggccccagccgtgccgccacctcccgcgcctctccaaattgcccccggcgtgttacaccctgcccccccacccatagccccccctctggtgcagccaagcccacctgtggccagagctgcaccagtgtgcgaaacagtgccggtgcatcctctgccacagggggaggtgcagggtctcccaccgcctccccctccgcccccacttcctccacctgggattagacctagtagcccagtcactgtgaccgcgttagcccacccaccttcaggtcttcaccccactccctccactgcgcccggaccgcatgtacccctgatgccgccctctcccccctctcaggtgatccccgcgtctgaacccaaaagacatcccagcactctacccgtcatctctgacgccagatctgtcctgcttgaagccatcaggaagggcatccagctacgcaaagttgaagagcaacgggaacaagaggccaaacatgagcgaatcgaaaacgatgtcgccacaatcctaagcaggaggatcgctgtggaatactctgattccgaagacgactccgagttcgacgaggtggactggctggagtag

SEQ ID NO: 28155 - DNA, 1680 bp, Artificial Sequence
  derived and/or modified sequence
atgcccctagtcaaaaggaatatcgaccctcgacacctgtgtcacacagccctacccaggggcatcaaaaacgaattagagtgtgtgacaaatattagcctagcgaatataatacggcagctctcatcactgagcaaatacgccgaagacatctttggcgagctgttcaatgaagcacatagtttctcctttcgcgtgaacagcttgcaggagcgggtcgaccgtctgagcgtgagtgtgacacaactggatccaaaggaggaagaactctctctgcaggacatcacaatgaggaaagctttccggtccagcacgatccaggatcaacagctgtttgacagaaagaccttgcccattcctctgcaggagacctatgacgtctgtgaacagccaccccccctcaatattctcacaccctatcgagacgatggaaaagagggtttgaaattctacaccaatccctcttacttcttcgacctgtggaaagaaaaaatgttgcaggatacagaggacaaacgcaaggagaaacgtaagcagaagcagaagaatctagatagaccccatgaaccagagaaggtgccacgtgccccacacgacaggagacgcgagtggcaaaaactggctcagggtccagagctggccgaggacgacgccaacctcctccacaagcacattgaagtcgctaacggcccagcctcccactttgaaactcgaccccaaacctacgtagaccacatggacgggagctattccctgtctgctctaccattcagccagatgtctgaactactgacgcgggcggaagaaagagtgctggtgcgtccacatgagcctcccccacctccacccatgcacggggccggagatgccaaacccattcctacctgtatcagttctgccactgggctgatcgaaaaccggccacagagtcccgctacaggcaggacgccagtgtttgtctctcctacaccaccaccccctcccccaccactgccctctgccctcagtacatcttccctgagagctagtatgacgagtacaccacccccgccggtccctcctcccccacctcccccggcaacagccctgcaggcccccgctgtccctcccccgcccgcgcctctgcaaatcgcccccggcgtccttcaccctgccccgccccccatcgctccaccgttggtgcagccaagccctcccgtggcccgcgctgcaccagtgtgtgagactgtgcccgtacatccactcccacagggagaggtgcagggcctccccccgcctcctccaccgccgcccttgccgccacccggtatccgtcctagctcacccgttactgtgacggccctggcccaccctcctagcgggcttcatcccacaccttccacggcaccaggccctcatgtgccacttatgccgccctccccaccgagtcaggtgatccctgcctccgagccaaaacgccacccaagcacgctgccagtcattagcgacgccagaagtgtgctcctggaagccattcggaaaggaatccagctacgaaaagtggaagagcagagggagcaggaggctaagcacgagaggatcgagaacgatgtcgcgactatcctgagccgccgcatcgccgttgagtattccgattctgaggacgactccgagtttgacgaggtagactggctggaatag

SEQ ID NO: 28156 - DNA, 1680 bp, Artificial Sequence
  derived and/or modified sequence
atgcccctggtgaagaggaacatcgaccccaggcacctgtgccacacagccctgccccggggcatcaagaatgagctggagtgtgtgaccaacatcagcctggccaacatcatccggcagctgagcagcctgagcaaatatgcagaggacatctttggagagctgttcaatgaggcccacagcttctccttccgggtgaacagcctgcaggagcgggtggaccggctgtctgtgtctgtgacccagctggaccccaaggaggaggagctgagcctgcaggacatcaccatgaggaaggccttccgcagcagcaccatccaggaccagcagctgtttgacaggaagaccctgcccatccccctgcaggagacctatgatgtgtgtgagcagcccccacccctgaacatcctgaccccctacagagatgatggcaaggagggcctgaagttctacaccaaccccagctacttctttgacctgtggaaggagaagatgctgcaggacacagaggacaagaggaaggagaagaggaagcagaagcagaagaacctggaccggccccatgagcctgagaaggtgccccgggcccctcatgacagaagaagagagtggcagaagctggcccagggccctgagctggctgaagatgatgccaacctgctgcacaagcacatcgaggtggccaatggacctgccagccactttgagacccggccccagacctacgtggaccacatggatggcagctacagcctgagcgccctgcccttcagccagatgtctgagctgctgaccagggctgaggagcgggtgctggtgcggccccatgagcccccacctcctccacccatgcatggagctggagatgccaagcccatccccacctgcatcagcagcgccaccggcctgattgaaaatcggccccagagccctgccactggaagaacacctgtgtttgtgagccccaccccacctcctcctcctccacccctgcccagcgccctgagcaccagcagcctgcgggcctccatgaccagcaccccacctcctcctgtgcccccacctcctcctcctccagccacagccctgcaggccccagctgtgcccccacctccagcccccctgcagatcgcccctggggtgctgcacccagcccccccacccatcgccccacccctggtgcagcccagcccccctgtggcccgggccgcccctgtgtgtgaaacagtgcctgtgcaccccctgccccagggcgaggtgcagggcctgcccccacctcctcctcctccacccctgcccccacctggcatccggcccagcagccctgtgacagtgacagccctggcccaccccccatctggcctgcaccccacccccagcacagcccctggcccccacgtgcccctgatgccacccagcccccccagccaggtgatcccagccagcgagcccaagaggcaccccagcaccctgcccgtcatcagtgatgcccggtctgtgctgctggaggccatcaggaagggcatccagctgaggaaggtggaggagcagcgggagcaggaggccaagcatgaaagaattgaaaatgatgtggccaccatcctgagcagaagaattgctgtggagtacagcgacagtgaagatgacagcgagtttgatgaggtggactggctggagtag

SEQ ID NO: 28157 - DNA, 1680 bp, Artificial Sequence
  derived and/or modified sequence
atgcccctggtgaagcggaacatcgacccccggcacctgtgccacaccgctttgccacgaggcattaagaacgaactggagtgcgtcacaaacattagtctggcaaacatcattaggcagctgagcagtctgtcaaaatacgccgaggatatattcggcgagctcttcaacgaggctcattctttttcatttagggtgaactcccttcaggagagagtggaccgcttaagcgtcagtgtcacgcaactggacccgaaggaagaggagctcagcctccaagatatcacaatgagaaaagcattcagatcgtccaccattcaagaccaacagctgtttgaccgcaaaactttacccataccactgcaagagacatacgatgtttgcgagcagcctccccctcttaatattctcactccgtaccgcgatgacggcaaggagggcttgaaattctacaccaacccctcatatttcttcgacctgtggaaggagaagatgttgcaggacacagaagataaaaggaaagaaaagcgcaagcaaaaacagaaaaacctggataggccacacgagcctgagaaagtgccccgcgctccgcacgacagacgaagagagtggcagaaacttgcccagggcccagagttggcggaggatgacgccaacttgctgcataagcacattgaggtggccaatggtcctgcctcacacttcgaaactagaccccagacttatgtggatcatatggacggctcctacagtcttagcgcattgccgttctctcagatgtctgagttgctgacaagggcggaggaaagggtgctggtgcgtcctcatgaacccccaccgccgccacccatgcacggtgccggagatgctaaacctatccctacttgtatcagctcagccactggattaatagagaatcgaccccaaagtcctgctaccgggagaacccctgtcttcgtgtctcctacccccccccccccccccccaccccttccttcagctttaagtaccagcagtctccgcgcctccatgacatccacaccccctccgcctgtacctcctcctccacccccccccgctaccgccctgcaggctcctgccgtcccccccccacccgctcctcttcaaattgccccgggcgtactacatccagctccacccccaatcgccccaccattggtgcagccaagccccccagtggctcgagctgccccagtgtgtgaaacagtcccagtgcatcccctgccccagggcgaggtgcaagggctgccaccccctccaccacctccacccttaccgccacctgggatccgtcctagcagcccagttacagtgaccgccctggctcacccgccatctggtctgcatcccacaccgagcaccgcccccgggccccatgttcccctgatgccacctagcccgccttctcaggtgatcccagccagtgagccaaagaggcacccttccactcttcccgtaatctcagacgcccgaagtgtgctgctggaggctataagaaagggtatccagttaagaaaagtggaagaacagagggagcaggaggcgaaacacgaacgcattgagaatgacgtagctaccatcttgtcgcgcaggatcgccgtcgagtatagtgacagcgaagatgatagtgagttcgacgaggtcgattggctggaatag

SEQ ID NO: 28158 - DNA, 1680 bp, Artificial Sequence
  derived and/or modified sequence
atgcccctggtgaagcggaacatcgacccccggcacctgtgccacacagcactccctcgcggcatcaaaaacgaattagaatgcgtcaccaacatctccttagccaacatcattcgacagctgtcgtccctctctaagtatgcagaagacattttcggcgaactgtttaacgaggcgcattctttttccttcagggttaacagcctgcaggaacgcgttgaccgcctgtcggtctcagtcacccagttggatcccaaagaagaagagctgtctctacaggatataactatgcggaaggcatttcggtcgtcaaccatacaggaccaacagctgtttgatcggaaaacgctgccaattcccctgcaggagacctatgacgtttgtgaacagcccccaccactgaatatattaacaccttatcgtgatgatggtaaggagggcctgaaattttacaccaacccctcctacttcttcgatttgtggaaagagaagatgcttcaagacacagaggataagaggaaagagaaaaggaagcagaagcagaaaaacctggacagaccgcatgaacccgagaaggttcccagggccccacacgatcgccgcagggaatggcagaaactggcacagggcccagagttagccgaggatgatgcaaacttattgcataaacacatcgaagtggctaatggcccggcttcccacttcgaaacacgcccacagacatacgtggatcatatggatggttcctattctctcagcgccctgccgttctcccagatgtccgagctgctaactcgagctgaggaacgggttttagtgaggcctcatgagcctcctcctccaccgccaatgcatggcgccggagacgccaagccgatacccacatgcatttcttctgcaacaggcctcatagagaatcggccacaatctcccgccactggccggactccagtgttcgtatcacccacgcctccaccaccaccaccacccctgccttctgccttgtcaaccagtagcctgagggctagcatgacatctacgcctccgccgcccgtgcctcccccacccccccccccggctaccgccctgcaggccccggctgtgcctcccccccctgcacccttacagattgcaccaggcgtcctccacccagcacccccacccatagcaccccctctggttcagcctagcccacctgtggccagggccgctcctgtgtgtgagacagtcccagtccatcccttgccacagggagaggtgcagggactgccaccgcccccccccccccctcctttgccccctccagggatacggccaagcagccccgtcactgtgaccgcactggcccacccaccaagcgggttgcatcccactccatccactgccccgggccctcatgtaccactcatgccacctagcccaccaagccaggtgattcccgcttcggaacccaaacggcacccaagtaccctgccggtgatatcagatgctagaagtgtgctgctcgaggccatacgtaaggggatacagctgcgcaaggtcgaggaacaacgcgagcaagaggccaaacacgaaaggatcgagaatgacgtggcgaccatcttatcaaggaggattgctgtggaatattccgatagtgaggatgattctgagtttgacgaggtggattggctcgagtag

SEQ ID NO: 28159 - DNA, 1680 bp, Artificial Sequence
  derived and/or modified sequence
atgcccctggtgaagcggaacatcgacccccggcacctgtgccacacggccctcccacggggcatcaagaacgaactagaatgtgtgacaaacataagtcttgccaatattattaggcagctcagctctcttagcaagtacgccgaggacatcttcggggaactctttaacgaggctcattccttcagcttccgggtgaacagtctgcaggagagagttgatcgactatccgtgagtgttacccagctcgaccctaaggaggaagagctatcactgcaggacataactatgcgcaaagcttttcggagtagtaccatccaggaccaacagctctttgatcgaaagactctcccaatcccacttcaggaaacgtacgacgtgtgcgaacagcctccgccattaaatatcctcacaccttatcgggacgacggtaaagagggtctgaagttctatactaatccctcctatttcttcgatctttggaaggaaaaaatgctgcaggacaccgaagataagcggaaggaaaaacgaaagcagaagcagaaaaacttggatcgcccccatgagcctgaaaaggtgcctagggccccccatgataggcgtcgggagtggcagaaactggcgcagggacccgaactggcggaagatgatgcgaatctgcttcataagcacatcgaagttgccaacggccctgccagtcactttgagaccaggccacagacttacgtcgatcacatggatggctcctatagcctctcggccctccctttctcccaaatgtctgagctcctgaccagggcagaagagcgggttctggttaggccccacgagcctccgccccccccgccgatgcacggcgccggagacgctaaaccgataccgacttgcatcagctctgctacagggctgattgaaaatagaccgcagtctccggcgactgggcgcacaccagtgttcgtgtcccctaccccacctccacctcctcctcccctaccttcagccctctctacctctagcctgcgcgctagcatgacaagcacccccccaccacccgtccctccgccgccccctcctccagctacggccctccaggcccccgccgtgcctcccccgccagcaccactccagatcgccccaggggttttacaccccgccccccctccaattgcaccacccctggttcagccaagcccacctgtggctcgagctgcccccgtttgcgagactgtcccagtgcatccccttccacagggagaggtgcaggggttgccgccacccccaccaccaccaccccttccgccaccagggattagaccctctagccctgtcacggtgacagccctggcacatccgccttccggccttcaccccacccccagtaccgcacccggaccacacgtgcccctcatgcctccgtctcctccatctcaagtcattcccgccagtgagcccaaacgacatcccagcactctgccagttatttcggacgcgaggtccgtcctgttagaggccatcagaaaaggcattcagctcaggaaggtggaagaacaaagggaacaagaagcaaaacacgagagaatcgaaaatgacgtcgccacaatcctctccagaagaatcgctgtggaatactccgattctgaagatgattcagaatttgacgaagttgattggctggagtag

SEQ ID NO: 28160 - DNA, 1680 bp, Artificial Sequence
  derived and/or modified sequence
atgcccctggtgaagcggaacatcgacccccggcacctgtgccacaccgctcttcccagagggatcaagaatgaactggagtgtgtcacaaatatatctctcgccaacatcattcgccaactatccagcctgagtaagtatgccgaggacattttcggggagctatttaacgaagcacacagcttcagcttcagggtgaattccctgcaggagcgggttgaccgtttgtccgtcagcgtgactcaacttgatcctaaggaggaagagctgagcctgcaggatatcaccatgagaaaggcattccgctcctctacaattcaggaccagcaactattcgacaggaaaaccctccctatccctctccaggagacttacgacgtttgcgagcagccaccgccactgaacatccttaccccataccgcgacgacgggaaggaagggttaaagttctatactaatcctagctacttctttgacctatggaaagagaagatgttacaagatacagaagacaagcgcaaggaaaagcgcaagcaaaagcaaaagaacctggataggccgcacgaaccagaaaaggtgcctagggcccctcacgacaggagacgggagtggcagaaactggcccagggacccgaactggctgaggacgatgcgaatctgctgcacaagcatattgaggtggctaatgggcctgcttctcatttcgaaactcgaccccagacgtacgtggatcatatggacggcagctatagcctctcagcgttgcctttttcccagatgtccgagttgctgacccgcgcggaggaacgcgtgttggtgcgaccccatgagcccccccctccgcctccgatgcacggcgctggggacgcaaagcccatccctacttgtatcagcagcgctaccgggcttatcgagaaccggcctcagtccccagcaacggggaggactccagtcttcgttagtcccaccccccctccaccacctcctccactgccgagcgcactgagcacgtcatctctgcgggcctccatgacctctaccccacctcccccggtcccgccccctccacccccccctgcaactgcgcttcaggcacctgcagtgcctccacccccggccccacttcaaatagcgcccggtgtgcttcatcctgcaccacctcccatcgccccaccccttgtacaaccaagtcctcctgtggctagggcagcgcctgtatgcgaaaccgtgcctgtccacccactcccccagggagaggtacagggcctgccaccaccccctccgccaccccccctgcccccaccaggaattcgcccttccagtcctgtcaccgttacagcactcgcccatcctccgagcggactgcatccaaccccctcaacagcccctgggccacacgttcccttgatgcctccgtctcccccctctcaggtcatcccggcttctgagccgaagcgacaccctagcacattgcctgtaatctcggacgctcgcagtgtgttgctagaggccatcaggaagggaattcagcttcgcaaagtggaggagcaaagggagcaggaagctaaacacgagaggatcgagaatgatgtggctacaattctttccagacgcatcgcggtagaatacagcgactctgaggacgacagtgagtttgacgaggtggactggctggaatag

SEQ ID NO: 28161 - DNA, 1680 bp, Artificial Sequence
  derived and/or modified sequence
atgcccctggtgaagcggaacatcgacccccggcacctgtgccacaccgccctgccgcgaggaattaaaaacgagctcgaatgcgtgacaaatatttctttggccaacataattagacagttgtccagtctgtctaagtacgcagaggatatcttcggagaactgttcaacgaggcgcactcttttagtttcagagttaatagcctccaagaacgcgtggatcgactctcagtgtctgtaactcagcttgaccccaaggaagaggaactatctctgcaggacatcacgatgcgcaaggccttcaggtctagtactatccaggatcagcagttattcgatcggaaaaccttacccattcctctgcaggaaacatatgacgtttgcgagcagcctccgccacttaacatcctcaccccttatagagacgacggaaaggaagggttaaagttttacactaacccatcctacttctttgacctatggaaggaaaagatgttacaagacaccgaggacaagcggaaggaaaaacggaaacagaaacaaaaaaatttagacagaccacatgaacccgaaaaagtgccgcgcgccccccacgatcgcaggcgcgagtggcagaagttagcccagggacctgaactcgccgaggacgacgctaacttattacacaaacatattgaggtcgccaacgggcctgctagccacttcgaaaccagaccacagacatacgtagatcacatggatggctcatatagcttatccgcattgcctttctcccagatgagcgagctgttaacaagagccgaagagcgggttctggtgcgcccacacgaacccccccctcctcctcctatgcatggagctggagacgccaagccaatcccaacttgtatcagctctgctactggcctcattgagaacaggccacagtcaccagctactgggcgcacccctgtattcgtctccccgacacctcccccgcccccgcctcctctcccgtctgccctctcaacatccagtctgagagccagcatgacatctacaccccctccgcccgtcccgcccccaccacctccccccgcgactgccttgcaggccccagctgtgccgcctccaccagctcctctgcagatcgccccaggcgtgctccatccagccccccctcctattgcaccaccgctcgttcagccgtcccctcccgtggctagggcagccccagtctgtgagacggtacctgtgcacccactccctcagggcgaagtccaaggcctgccgccgcctccaccaccgccccccctaccacctcctggcattagaccctcctccccagtaactgtcactgccctcgcgcacccacccagtggcctccaccccactccctccactgccccaggcccacatgtgccgttaatgcctccctcacctccttcccaggtgattcctgcctcagaaccaaagcggcacccatctacactccccgtcatctcagatgcccgatctgttctgctggaggcaatcaggaagggaatccaactacgtaaggtagaagagcagcgggaacaggaggccaaacacgagcgcattgagaatgacgtggcaactattctgtcccgcaggattgcggtggaatatagcgactcagaggatgactccgagtttgatgaggtcgactggctggaatag

SEQ ID NO: 28162 - DNA, 1680 bp, Artificial Sequence
  derived and/or modified sequence
atgccacttgttaaacggaacattgatcccaggcacctgtgtcatactgcccttcctcgaggcataaagaacgagctggagtgtgttactaacatcagtctagcgaacattatccgacagctgtcaagcttgtctaagtacgctgaagacattttcggggaactttttaatgaagcccactctttttcctttcgcgttaactctctccaggaaagggtggatcggctgagcgtctctgtgacccagctggaccccaaagaggaagagctgagcctccaagacatcacaatgcgtaaggcattccgatcatctaccatccaggaccagcagctgttcgatcggaagacccttcctatacccttgcaggagacttacgacgtgtgtgagcagcccccacctctgaatattttaaccccataccgagatgacggtaaagaagggcttaagttctatacgaatccatcgtactttttcgatctgtggaaagagaagatgctccaagacaccgaggacaagcgcaaagagaagcggaaacagaagcagaagaacttggatcggcctcacgaacccgaaaaagtgcccagagcccctcacgacagacgcagggagtggcaaaaactcgctcagggcccagagctcgctgaagatgacgccaacctgctacataaacacatcgaagtggcaaatgggccagcctcgcacttcgagactcgacctcagacctatgtcgatcacatggacggtagttacagtctgtcggctctaccctttagccagatgtctgagcttctgactagagcggaggagagagttttagtgcggcctcatgaacctcctcccccacccccaatgcacggtgccggagatgctaagccgatccccacgtgcatatctagcgccactggcctcattgagaatagaccacagagcccagccacgggaagaacgccagtcttcgtgtccccaactcctccaccacctcctcccccactaccgtctgccctgtctacgtccagcctgcgggctagcatgaccagcaccccaccgccaccggtcccacctcctccaccccctccggctacggctctccaagcgcctgctgttccaccaccacccgctccgctccagattgcccctggcgtgctgcaccccgctccaccacctatcgcaccaccactggtccagccctctcccccagtggcccgagccgcacccgtgtgcgagactgttccagtccatcctctgccgcagggagaagtgcagggcctccccccaccacccccacctccacccctccctccgccaggaatcagacccagctccccagtgaccgttaccgctctcgcccacccgccttccgggcttcacccaactccctccactgcccctggaccccacgtccccctgatgcctccatcacccccatcacaggtcatacctgccagcgaacccaagcgtcatccctcaacactacctgtcatcagtgacgcgagatccgtgttacttgaggccattagaaagggcatccaactccggaaggtggaggaacagagggagcaggaagctaagcacgagcggattgaaaacgatgtggcaacaatcctatcccgcaggattgcagtggagtatagtgacagcgaggatgatagcgagtttgatgaggtggattggctggaatag

SEQ ID NO: 28163 - DNA, 1680 bp, Artificial Sequence
  derived and/or modified sequence
atgccactcgtgaagcggaatatcgatcccagacacctttgccatacagccctcccgcgtgggataaagaacgaactggagtgcgtgacaaatatctcacttgccaacatcatcaggcaactcagctcgctctctaagtatgcggaagacatattcggggagttgtttaacgaggcgcattctttttcgtttagagtcaattctctacaagagagggtagatcggctgtcagtatccgtgacccagctcgacccgaaggaggaggaattgtctctgcaggacatcacgatgaggaaggctttccgcagttctaccatccaggaccagcagctgttcgacagaaagaccttgcccattccattgcaggagacctacgacgtgtgtgaacagcccccacctctgaatatcttgacaccctatcgcgacgatggcaaagagggcctgaaattttacacaaacccttcatattttttcgacttgtggaaggagaaaatgctacaggataccgaggataagcggaaggagaaaagaaaacagaaacagaaaaatctggacaggccgcacgaacccgagaaggtcccacgcgcacctcatgaccggcgaagggagtggcaaaaactggcccaggggccagagctcgctgaggatgacgcgaatctcctgcacaagcacatcgaggtggcaaacggcccagcatcccattttgagacccgtcctcaaacgtatgtcgaccacatggacggaagctatagcctgtccgccctcccattctctcagatgtctgaactcctgacacgtgctgaggaacgcgtacttgtgcgaccccacgaaccacctccgcctcccccaatgcacggggcaggggacgcaaaaccaattccgacctgtatctctagtgcaacgggcctcatcgagaatcgacctcagtctcctgcaactgggcgaacacctgtctttgtttcccccacacctcctcccccacctccaccccttccaagcgctctgagcacctcatctctcagggcttcaatgacatccaccccccctccgcctgttccccctccacctcctccacccgcaactgctttacaggccccagcagtgcccccaccaccggcaccacttcagatcgccccaggggtgttacacccagccccacctccaatcgcacccccattggtgcaaccatcgcccccagtggctcgcgcagccccagtgtgcgaaactgtgcctgtgcaccccctgcctcagggggaagtgcaggggctgcctcccccaccccctcctcctcctctgcctcctcccggaattcgccctagtagtcctgtcacagtgaccgccttggcccatcccccttccgggctgcacccaacaccttccaccgccccaggacctcatgttccacttatgccgccttctcctccaagccaggtgatccccgcaagcgaacccaaaagacacccttctacgctccctgtgattagtgatgccagaagcgtgctgctggaggcaattaggaagggaattcagctgcgcaaagtggaggagcagcgggagcaggaagctaagcacgaaaggattgaaaacgatgtggcaaccattctctcgcgtcgcatagctgtggagtatagcgattcggaagatgattcagagtttgatgaagtggactggcttgagtag

SEQ ID NO: 28164 - DNA, 1680 bp, Artificial Sequence
  derived and/or modified sequence
atgcccctcgtgaaaagaaatatcgatccgagacacctctgtcataccgctctgccgagggggattaagaacgagttagagtgcgtgactaacatatccctggccaacatcatccgacaactgtcgtcccttagtaaatacgcggaagatatattcggagaactgtttaatgaagcccacagtttctcgttccgggtgaacagcctgcaggaacgcgtcgatcgactgtcagtttctgtcactcagcttgatccaaaggaagaagagctgagtctgcaagacattaccatgagaaaggcgtttcgttcttcgacaatacaggaccagcagctgttcgacaggaaaactctgccgatccccctgcaggaaacctatgatgtatgcgagcagcctccaccattgaatattttaacaccatatagggacgacgggaaggaggggttaaagttttacacaaaccccagctacttttttgacctgtggaaggagaaaatgttgcaggacacagaagacaagcgtaaagaaaagagaaaacagaagcagaaaaatctagacagaccacacgaacctgaaaaggtacctcgggcaccccacgaccgaaggcgtgaatggcaaaagctcgcgcaggggcctgagctggccgaagatgatgcaaacttactgcataaacatatcgaggtggccaacggccctgcttcacacttcgagaccagaccacagacttacgttgaccacatggacgggtcttacagcctgagcgccttaccctttagtcaaatgtccgagctcttgacaagggccgaggaaagagtccttgtcaggccgcatgaaccacctcctcctcccccaatgcacggggctggggatgcgaagccgatcccaacctgcatttcatcagccactgggcttattgagaatagacctcaatcaccagccacgggacgaacaccagtgtttgtcagcccaactcctcccccaccccctcctcctttgccttctgcactgtcaaccagtagtctgcgggctagtatgacaagcactcctccccctcccgtgccaccacctcctcctcccccagccactgccctgcaggcgccagccgttcccccaccccctgcacccctgcagatcgcaccaggcgttttgcaccccgctcccccacccatagcaccccctttagttcagcccagcccacccgtcgcacgcgcagcccctgtctgcgaaactgtacctgtgcatccactgccacagggcgaggttcagggactgccacctccacctccaccccctccactcccgccaccaggtattcgtccatcctcccccgtaacagtgacggctttagcacatcctccgagtggcctccaccccactcccagcactgctcccggacctcacgtcccccttatgcccccaagcccgccaagtcaggtaattccagccagtgaacctaagagacatccaagtaccctgccggtgatcagtgacgcccgatcagtgctgttggaagccatcagaaaaggaatccagcttcgcaaagttgaggaacagagggaacaggaggctaaacacgagaggatcgagaacgacgttgccacaattttgagcagaagaatagccgtggagtattcagacagcgaggacgactccgaattcgacgaggtagattggctggagtag

SEQ ID NO: 28165 - DNA, 1680 bp, Artificial Sequence
  derived and/or modified sequence
atgcccctcgtgaagcggaacattgatccgcgtcacctctgccataccgcgctccccagaggcatcaaaaatgagctggagtgtgtgaccaatatatcgcttgcaaatataatcaggcaactgtccagcctgtccaagtacgccgaggatatatttggagaactcttcaatgaggcacattcatttagcttcagagttaactcccttcaagaaagggtagataggctgtcagtaagcgtaacgcagttggaccctaaagaagaggagttaagcttacaggatataaccatgaggaaggcttttcgcagttccacaatccaagatcagcagttattcgatcgtaaaacactgcctattccacttcaggaaacctacgacgtgtgtgagcagccccctcctctgaatatactcacaccctatcgggatgacggcaaagaaggtctcaagttctacacgaaccctagctatttctttgatttgtggaaagagaagatgctgcaggataccgaggataaacgaaaggagaagcgaaagcaaaaacagaaaaacctggacaggccgcacgagcctgaaaaagttccgagggcccctcacgacaggagacgggagtggcaaaagctagcacagggcccagaactcgccgaagatgacgctaatttactccacaagcatatagaagttgccaacggtccggcatcgcacttcgagacccgtccacagacctatgtcgaccacatggacggcagctactctctttcagcattgccgttcagccagatgagcgagctgctcacccgcgctgaagaacgagtgctggtgcgcccacacgagccaccccctccacccccaatgcacggcgcaggggacgctaaacccatccctacctgcattagtagtgccacaggcctaatcgagaacagaccacagtctcccgcaaccggacgcacccctgtgttcgtatcccctactccaccacccccacctccccctctcccaagcgctctctcgacatcctccctccgagctagcatgacctccacgccccctcccccagttcctccccctccaccacccccagcaacggccctgcaagccccagctgtgccccctccacccgctcctctacaaatagcgcctggagttcttcatcctgcgcctccgcctatcgcacctccccttgtccagccttccccaccagtggctagggctgccccagtctgcgagactgtgcccgtccacccactgccgcaaggagaggtgcagggtttgccccctccaccaccaccccctcctctgccacccccagggatccgcccttcctcccctgtgacagttacggccctagcccatcccccatccggtctccaccccacgccctccacggccccaggccctcatgtcccactgatgccgccttcacctccatctcaggtgatccctgctagcgaaccgaagcggcacccatcaactctgccagtcatcagcgatgcacgttccgtcctcctggaagcaattaggaagggtatccagctccggaaagtcgaagagcagcgtgaacaggaggccaagcacgagaggatcgaaaatgatgtggctacaatactgtctcgcaggatcgctgtcgaatacagcgattctgaggacgactccgagtttgacgaggtggactggctggaatag

SEQ ID NO: 28166 - DNA, 1680 bp, Artificial Sequence
  derived and/or modified sequence
atgcccctggtgaagcgcaatattgaccccaggcacctctgtcatacagctctgcctcgcggaatcaagaacgagctcgaatgcgtaacaaatatttcattagcgaatataatccgacagttgagttctctgagtaaatatgcagaggacatttttggtgagctatttaacgaggcccacagctttagcttccgtgtgaatagtctgcaggagagagtggatcgtctgtccgtcagtgttacacagctggaccccaaggaggaggagctctcattacaggatatcacgatgagaaaagcatttagatcatctacgatccaggatcagcagctgttcgaccgtaaaactttgccaatccccctgcaagagacgtacgatgtctgcgaacagccaccccctctaaacatcttaaccccctatcgcgatgatggaaaagagggcctcaagttctacacaaatcccagctatttctttgacctctggaaggaaaagatgttgcaggacaccgaagataagaggaaggagaagcggaaacagaagcagaaaaacctggacaggccgcacgagcccgagaaggtgcctcgggcaccacacgatcggaggagggaatggcagaagttggcccagggtcccgaactagcggaggacgacgccaacttgctgcacaagcatatagaggtggctaatggaccagcctcccattttgaaactaggccacaaacctacgtcgatcacatggacgggagttatagtttgagcgcgctccccttctcacaaatgagtgagttgctaacacgtgccgaggaaagagtgttggtgcgccctcacgaaccacctcccccaccacccatgcacggagccggagacgcaaaacccatcccaacttgtatcagtagcgcaacaggcctgatcgaaaaccggccacagagtcctgcgacagggaggaccccagttttcgtctcccccacaccccctcctccgcctcccccactgccttccgcactcagcacctcatcactgcgtgcaagcatgacctccacccctccacccccagtgccaccaccaccgcctccacccgcaacggctctgcaagcccctgccgtaccccctccacctgcgccattgcagatcgccccaggagtgttgcatcccgcaccccctcccattgctcccccactcgtccaacccagcccacccgtcgccagagcggctccagtgtgtgagactgtccccgtgcaccctttaccccagggcgaagtccagggtctgcctccccctcccccacccccaccattacctcctcccggtatcagacctagcagcccagtcaccgtcaccgccctagctcaccccccaagtgggctccaccctactccgtcaaccgctcccggaccccacgtccctttgatgcccccttcaccgccaagccaggtgatcccggcttccgaacccaagcggcacccctcaacattgcctgtcattagcgatgcacggagcgtactgctcgaagcaatccggaaaggaattcagctgcggaaggttgaggaacaacgggagcaggaggccaagcacgagaggattgaaaacgacgtggccactattctaagcaggagaattgctgtggagtattcagacagtgaagacgacagtgaattcgacgaagtcgactggctcgaatag

SEQ ID NO: 28167 - DNA, 3075 bp, Artificial Sequence
  derived and/or modified sequence
agcagtgttctcttcgtccccctcccccaaactgaggattgggcaataccacagaacctcaggaaaggggggaagagcgagcttcggccccactaatgggggagtgggcggaggctggatttcccacctcggctgcacctgggcactggaggctgaagaggaaagtgagaatctgaagttttgagacctctgactggccaggaatagctcctggggcggggggcaaggatgggaccataggcggaaagagtctcgcggtcccccctgcttctggcgcgggtccctgcgcccggttgtggagcgtctcgcgcggggagggggcggggggaacggcagctcgcggtgttgttcactcgcgcgtcgagcacacggtgggtccggcggcgggttggcgccccaggcggcgttccctgtggcctggcgcctgggccgctgccctgagcgggttccgccccagagcccgaccctcctgggggctctaggcggagtcccgcgagccgagggggaccggcgaccgctgccgaagcatgaagaaggggtaaggcgtgagcccccaagatttcacgtgttggagaaatcagcatgttaaaacaactgttgatgatagctgttggagtaaagttgcagtggaagctatggctgcaaaatcgttaaaatcttcaaggtgaactggcacaaaggttaatctcaagatgccgctagtgaaaagaaacatcgatcctaggcacttgtgccacacagcactgcctagaggcattaagaatgaactggaatgtgtaaccaatatttccttggcaaatataattagacaactaagtagcctaagtaaatatgctgaagatatatttggagaattattcaatgaagcacatagtttttccttcagagtcaactcattgcaagaacgtgtggaccgtttatctgttagtgttacacagcttgatccaaaggaagaagaattgtctttgcaagatataacaatgaggaaagctttccgaagttctacaattcaagaccagcagcttttcgatcgcaagactttgcctattccattacaggagacgtacgatgtttgtgaacagcctccacctctcaatatactcactccttatagagatgatggtaaagaaggtctgaagttttataccaatccttcgtatttctttgatctatggaaagaaaaaatgttgcaagatacagaggataagaggaaggaaaagaggaagcagaagcagaaaaatctagatcgtcctcatgaaccagaaaaagtgccaagagcacctcatgacaggcggcgagaatggcagaagctggcccaaggtccagagctggctgaagatgatgctaatctcttacataagcatattgaagttgctaatggcccagcctctcattttgaaacaagacctcagacatacgtggatcatatggatggatcttactcactttctgccttgccatttagtcagatgagtgagcttctgactagagctgaggaaagggtattagtcagaccacatgaaccacctccacctccaccaatgcatggagcaggagatgcaaaaccgatacccacctgtatcagttctgctacaggtttgatagaaaatcgccctcagtcaccagctacaggcagaacacctgtgtttgtgagccccactcccccacctcctccaccacctcttccatctgccttgtcaacttcctcattaagagcttcaatgacttcaactcctccccctccagtacctcccccacctccacctccagccactgctttgcaagctccagcagtaccaccacctccagctcctcttcagattgcccctggagttcttcacccagctcctcctccaattgcacctcctctagtacagccctctccaccagtagctagagctgccccagtatgtgagactgtaccagttcatccactcccacaaggtgaagttcaggggctgcctccacccccaccaccgcctcctctgcctccacctggcattcgaccatcatcacctgtcacagttacagctcttgctcatcctccctctgggctacatccaactccatctactgccccaggtccccatgttccattaatgcctccatctcctccatcacaagttatacctgcttctgagccaaagcgccatccatcaaccctacctgtaatcagtgatgccaggagtgtgctactggaagcaatacgaaaaggtattcagctacgcaaagtagaagagcagcgtgaacaggaagctaagcatgaacgcattgaaaacgatgttgccaccatcctgtctcgccgtattgctgttgaatatagtgattcggaagatgattcagaatttgatgaagtagattggttggagtaagaaaaatgcattgataaatattacaaaactgaatgcaaatgtcctttgtggtgcttgttccttgaaaatgtttggtcattctagtgttttgctttcttttccttataataaatgacccttttcctccataacttttgatttctaaggaaaatattagcatacatttcaaactaaatgttttacagtggcttatcttttttttccccctgaaaagactaatttggtcaaataaaccactaagtattaagcatggacagctgttgttagagtagcagattcagttttttgatatatcttaattgtgtactttgtgaattttaatttaaagaaagcaactgaaattgaaatcttgagggcagctgtgtctactaatgagccttattccatttcctgatgttttaaaagaagaaacactgccttgattatacgaatacactcagaaagtacatttagcttgtagtgttgaattctcttaaaggaatgcttgaattttttcattattgttttattgtttttatatacttgccttatttgaatgtttagcagtatccccttcccacttatatattgtgtgatatgattttgcttgcctataggagttaaaaacttttccatgtgaaatactctgacttaaacatacatgtaacttacataactgttaagaataacagtctgatttaataaatggttcattttaaaagtt

SEQ ID NO: 28168 - DNA, 2815 bp, Artificial Sequence
  derived and/or modified sequence
agtgttctcttcgtccccctcccccaaactgaggattgggcaataccacagaacctcaggaaaggggggaagagcgagcttcggccccactaatgggggagtgggcggaggctggatttcccacctcggctgcacctgggcactggaggctgaagaggaaacatgccccctagcttcggtactctgacaccttctcttgcacttgcggatgatgaactggaataacgatgaaagaaagcacatccgatctcaacattcacgtcctgccctataaccgattaattaattgatccccagctagactagtgttggagaaatcagcatgttaaaacaactgttgatgatagctgttggagtaaagttgcagtggaagctatggctgcaaaatcgttaaaatcttcaaggtgaactggcacaaaggttaatctcaagatgccgctagtgaaaagaaacatcgatcctaggcacttgtgccacacagcactgcctagaggcattaagaatgaactggaatgtgtaaccaatatttccttggcaaatataattagacaactaagtagcctaagtaaatatgctgaagatatatttggagaattattcaatgaagcacatagtttttccttcagagtcaactcattgcaagaacgtgtggaccgtttatctgttagtgttacacagcttgatccaaaggaagaagaattgtctttgcaagatataacaatgaggaaagctttccgaagttctacaattcaagaccagcagcttttcgatcgcaagactttgcctattccattacaggagacgtacgatgtttgtgaacagcctccacctctcaatatactcactccttatagagatgatggtaaagaaggtctgaagttttataccaatccttcgtatttctttgatctatggaaagaaaaaatgttgcaagatacagaggataagaggaaggaaaagaggaagcagaagcagaaaaatctagatcgtcctcatgaaccagaaaaagtgccaagagcacctcatgacaggcggcgagaatggcagaagctggcccaaggtccagagctggctgaagatgatgctaatctcttacataagcatattgaagttgctaatggcccagcctctcattttgaaacaagacctcagacatacgtggatcatatggatggatcttactcactttctgccttgccatttagtcagatgagtgagcttctgactagagctgaggaaagggtattagtcagaccacatgaaccacctccacctccaccaatgcatggagcaggagatgcaaaaccgatacccacctgtatcagttctgctacaggtttgatagaaaatcgccctcagtcaccagctacaggcagaacacctgtgtttgtgagccccactcccccacctcctccaccacctcttccatctgccttgtcaacttcctcattaagagcttcaatgacttcaactcctccccctccagtacctcccccacctccacctccagccactgctttgcaagctccagcagtaccaccacctccagctcctcttcagattgcccctggagttcttcacccagctcctcctccaattgcacctcctctagtacagccctctccaccagtagctagagctgccccagtatgtgagactgtaccagttcatccactcccacaaggtgaagttcaggggctgcctccacccccaccaccgcctcctctgcctccacctggcattcgaccatcatcacctgtcacagttacagctcttgctcatcctccctctgggctacatccaactccatctactgccccaggtccccatgttccattaatgcctccatctcctccatcacaagttatacctgcttctgagccaaagcgccatccatcaaccctacctgtaatcagtgatgccaggagtgtgctactggaagcaatacgaaaaggtattcagctacgcaaagtagaagagcagcgtgaacaggaagctaagcatgaacgcattgaaaacgatgttgccaccatcctgtctcgccgtattgctgttgaatatagtgattcggaagatgattcagaatttgatgaagtagattggttggagtaagaaaaatgcattgataaatattacaaaactgaatgcaaatgtcctttgtggtgcttgttccttgaaaatgtttggtcattctagtgttttgctttcttttccttataataaatgacccttttcctccataacttttgatttctaaggaaaatattagcatacatttcaaactaaatgttttacagtggcttatcttttttttccccctgaaaagactaatttggtcaaataaaccactaagtattaagcatggacagctgttgttagagtagcagattcagttttttgatatatcttaattgtgtactttgtgaattttaatttaaagaaagcaactgaaattgaaatcttgagggcagctgtgtctactaatgagccttattccatttcctgatgttttaaaagaagaaacactgccttgattatacgaatacactcagaaagtacatttagcttgtagtgttgaattctcttaaaggaatgcttgaattttttcattattgttttattgtttttatatacttgccttatttgaatgtttagcagtatccccttcccacttatatattgtgtgatatgattttgcttgcctataggagttaaaaacttttccatgtgaaatactctgacttaaacatacatgtaacttacataactgttaagaataacagtctgatttaataaatggttcattttaaaagtt

SEQ ID NO: 28169 - DNA, 2675 bp, Artificial Sequence
  derived and/or modified sequence
gtctcgcgcggggagggggcggggggaacggcagctcgcggtgttgttcactcgcgcgtcgagcacacggtgggtccggcggcgggttggcgccccaggcggcgttccctgtggcctggcgcctgggccgctgccctgagcgggttccgccccagagcccgaccctcctgggggctctaggcggagtcccgcgagccgagggggaccggcgaccgctgccgaagcatgaagaaggggtaaggcgtgagcccccaagatttcacggtgaactggcacaaaggttaatctcaagatgccgctagtgaaaagaaacatcgatcctaggcacttgtgccacacagcactgcctagaggcattaagaatgaactggaatgtgtaaccaatatttccttggcaaatataattagacaactaagtagcctaagtaaatatgctgaagatatatttggagaattattcaatgaagcacatagtttttccttcagagtcaactcattgcaagaacgtgtggaccgtttatctgttagtgttacacagcttgatccaaaggaagaagaattgtctttgcaagatataacaatgaggaaagctttccgaagttctacaattcaagaccagcagcttttcgatcgcaagactttgcctattccattacaggagacgtacgatgtttgtgaacagcctccacctctcaatatactcactccttatagagatgatggtaaagaaggtctgaagttttataccaatccttcgtatttctttgatctatggaaagaaaaaatgttgcaagatacagaggataagaggaaggaaaagaggaagcagaagcagaaaaatctagatcgtcctcatgaaccagaaaaagtgccaagagcacctcatgacaggcggcgagaatggcagaagctggcccaaggtccagagctggctgaagatgatgctaatctcttacataagcatattgaagttgctaatggcccagcctctcattttgaaacaagacctcagacatacgtggatcatatggatggatcttactcactttctgccttgccatttagtcagatgagtgagcttctgactagagctgaggaaagggtattagtcagaccacatgaaccacctccacctccaccaatgcatggagcaggagatgcaaaaccgatacccacctgtatcagttctgctacaggtttgatagaaaatcgccctcagtcaccagctacaggcagaacacctgtgtttgtgagccccactcccccacctcctccaccacctcttccatctgccttgtcaacttcctcattaagagcttcaatgacttcaactcctccccctccagtacctcccccacctccacctccagccactgctttgcaagctccagcagtaccaccacctccagctcctcttcagattgcccctggagttcttcacccagctcctcctccaattgcacctcctctagtacagccctctccaccagtagctagagctgccccagtatgtgagactgtaccagttcatccactcccacaaggtgaagttcaggggctgcctccacccccaccaccgcctcctctgcctccacctggcattcgaccatcatcacctgtcacagttacagctcttgctcatcctccctctgggctacatccaactccatctactgccccaggtccccatgttccattaatgcctccatctcctccatcacaagttatacctgcttctgagccaaagcgccatccatcaaccctacctgtaatcagtgatgccaggagtgtgctactggaagcaatacgaaaaggtattcagctacgcaaagtagaagagcagcgtgaacaggaagctaagcatgaacgcattgaaaacgatgttgccaccatcctgtctcgccgtattgctgttgaatatagtgattcggaagatgattcagaatttgatgaagtagattggttggagtaagaaaaatgcattgataaatattacaaaactgaatgcaaatgtcctttgtggtgcttgttccttgaaaatgtttggtcattctagtgttttgctttcttttccttataataaatgacccttttcctccataacttttgatttctaaggaaaatattagcatacatttcaaactaaatgttttacagtggcttatcttttttttccccctgaaaagactaatttggtcaaataaaccactaagtattaagcatggacagctgttgttagagtagcagattcagttttttgatatatcttaattgtgtactttgtgaattttaatttaaagaaagcaactgaaattgaaatcttgagggcagctgtgtctactaatgagccttattccatttcctgatgttttaaaagaagaaacactgccttgattatacgaatacactcagaaagtacatttagcttgtagtgttgaattctcttaaaggaatgcttgaattttttcattattgttttattgtttttatatacttgccttatttgaatgtttagcagtatccccttcccacttatatattgtgtgatatgattttgcttgcctataggagttaaaaacttttccatgtgaaatactctgacttaaacatacatgtaacttacataactgttaagaataacagtctgatttaataaatggttcattttaaaagtt

SEQ ID NO: 28170 - DNA, 3122 bp, Artificial Sequence
  derived and/or modified sequence
agcagtgttctcttcgtccccctcccccaaactgaggattgggcaataccacagaacctcaggaaaggggggaagagcgagcttcggccccactaatgggggagtgggcggaggctggatttcccacctcggctgcacctgggcactggaggctgaagaggaaagtgagaatctgaagttttgagacctctgactggccaggaatagctcctggggcggggggcaaggatgggaccataggcggaaagagtctcgcggtcccccctgcttctggcgcgggtccctgcgcccggttgtggagcgtctcgcgcggggagggggcggggggaacggcagctcgcggtgttgttcactcgcgcgtcgagcacacggtgggtccggcggcgggttggcgccccaggcggcgttccctgtggcctggcgcctgggccgctgccctgagcgggttccgccccagagcccgaccctcctgggggctctaggcggagtcccgcgagccgagggggaccggcgaccgctgccgaagcatgaagaaggggtaaggcgtgagcccccaagatttcacgcatgccccctagcttcggtactctgacaccttctcttgcacttgcggatgatgaactggaataacgatgaaagaaagcacatccgatctcaacattcacgtcctgccctataaccgattaattaattgatccccagctagactaggtgaactggcacaaaggttaatctcaagatgccgctagtgaaaagaaacatcgatcctaggcacttgtgccacacagcactgcctagaggcattaagaatgaactggaatgtgtaaccaatatttccttggcaaatataattagacaactaagtagcctaagtaaatatgctgaagatatatttggagaattattcaatgaagcacatagtttttccttcagagtcaactcattgcaagaacgtgtggaccgtttatctgttagtgttacacagcttgatccaaaggaagaagaattgtctttgcaagatataacaatgaggaaagctttccgaagttctacaattcaagaccagcagcttttcgatcgcaagactttgcctattccattacaggagacgtacgatgtttgtgaacagcctccacctctcaatatactcactccttatagagatgatggtaaagaaggtctgaagttttataccaatccttcgtatttctttgatctatggaaagaaaaaatgttgcaagatacagaggataagaggaaggaaaagaggaagcagaagcagaaaaatctagatcgtcctcatgaaccagaaaaagtgccaagagcacctcatgacaggcggcgagaatggcagaagctggcccaaggtccagagctggctgaagatgatgctaatctcttacataagcatattgaagttgctaatggcccagcctctcattttgaaacaagacctcagacatacgtggatcatatggatggatcttactcactttctgccttgccatttagtcagatgagtgagcttctgactagagctgaggaaagggtattagtcagaccacatgaaccacctccacctccaccaatgcatggagcaggagatgcaaaaccgatacccacctgtatcagttctgctacaggtttgatagaaaatcgccctcagtcaccagctacaggcagaacacctgtgtttgtgagccccactcccccacctcctccaccacctcttccatctgccttgtcaacttcctcattaagagcttcaatgacttcaactcctccccctccagtacctcccccacctccacctccagccactgctttgcaagctccagcagtaccaccacctccagctcctcttcagattgcccctggagttcttcacccagctcctcctccaattgcacctcctctagtacagccctctccaccagtagctagagctgccccagtatgtgagactgtaccagttcatccactcccacaaggtgaagttcaggggctgcctccacccccaccaccgcctcctctgcctccacctggcattcgaccatcatcacctgtcacagttacagctcttgctcatcctccctctgggctacatccaactccatctactgccccaggtccccatgttccattaatgcctccatctcctccatcacaagttatacctgcttctgagccaaagcgccatccatcaaccctacctgtaatcagtgatgccaggagtgtgctactggaagcaatacgaaaaggtattcagctacgcaaagtagaagagcagcgtgaacaggaagctaagcatgaacgcattgaaaacgatgttgccaccatcctgtctcgccgtattgctgttgaatatagtgattcggaagatgattcagaatttgatgaagtagattggttggagtaagaaaaatgcattgataaatattacaaaactgaatgcaaatgtcctttgtggtgcttgttccttgaaaatgtttggtcattctagtgttttgctttcttttccttataataaatgacccttttcctccataacttttgatttctaaggaaaatattagcatacatttcaaactaaatgttttacagtggcttatcttttttttccccctgaaaagactaatttggtcaaataaaccactaagtattaagcatggacagctgttgttagagtagcagattcagttttttgatatatcttaattgtgtactttgtgaattttaatttaaagaaagcaactgaaattgaaatcttgagggcagctgtgtctactaatgagccttattccatttcctgatgttttaaaagaagaaacactgccttgattatacgaatacactcagaaagtacatttagcttgtagtgttgaattctcttaaaggaatgcttgaattttttcattattgttttattgtttttatatacttgccttatttgaatgtttagcagtatccccttcccacttatatattgtgtgatatgattttgcttgcctataggagttaaaaacttttccatgtgaaatactctgacttaaacatacatgtaacttacataactgttaagaataacagtctgatttaataaatggttcattttaaaagtt

SEQ ID NO: 28171 - DNA, 3220 bp, Artificial Sequence
  derived and/or modified sequence
agcagtgttctcttcgtccccctcccccaaactgaggattgggcaataccacagaacctcaggaaaggggggaagagcgagcttcggccccactaatgggggagtgggcggaggctggatttcccacctcggctgcacctgggcactggaggctgaagaggaaagtgagaatctgaagttttgagacctctgactggccaggaatagctcctggggcggggggcaaggatgggaccataggcggaaagagtctcgcggtcccccctgcttctggcgcgggtccctgcgcccggttgtggagcgtctcgcgcggggagggggcggggggaacggcagctcgcggtgttgttcactcgcgcgtcgagcacacggtgggtccggcggcgggttggcgccccaggcggcgttccctgtggcctggcgcctgggccgctgccctgagcgggttccgccccagagcccgaccctcctgggggctctaggcggagtcccgcgagccgagggggaccggcgaccgctgccgaagcatgaagaaggggtaaggcgtgagcccccaagatttcacgcatgccccctagcttcggtactctgacaccttctcttgcacttgcggatgatgaactggaataacgatgaaagaaagcacatccgatctcaacattcacgtcctgccctataaccgattaattaattgatccccagctagactagtgttggagaaatcagcatgttaaaacaactgttgatgatagctgttggagtaaagttgcagtggaagctatggctgcaaaatcgttaaaatcttcaaggtgaactggcacaaaggttaatctcaagatgccgctagtgaaaagaaacatcgatcctaggcacttgtgccacacagcactgcctagaggcattaagaatgaactggaatgtgtaaccaatatttccttggcaaatataattagacaactaagtagcctaagtaaatatgctgaagatatatttggagaattattcaatgaagcacatagtttttccttcagagtcaactcattgcaagaacgtgtggaccgtttatctgttagtgttacacagcttgatccaaaggaagaagaattgtctttgcaagatataacaatgaggaaagctttccgaagttctacaattcaagaccagcagcttttcgatcgcaagactttgcctattccattacaggagacgtacgatgtttgtgaacagcctccacctctcaatatactcactccttatagagatgatggtaaagaaggtctgaagttttataccaatccttcgtatttctttgatctatggaaagaaaaaatgttgcaagatacagaggataagaggaaggaaaagaggaagcagaagcagaaaaatctagatcgtcctcatgaaccagaaaaagtgccaagagcacctcatgacaggcggcgagaatggcagaagctggcccaaggtccagagctggctgaagatgatgctaatctcttacataagcatattgaagttgctaatggcccagcctctcattttgaaacaagacctcagacatacgtggatcatatggatggatcttactcactttctgccttgccatttagtcagatgagtgagcttctgactagagctgaggaaagggtattagtcagaccacatgaaccacctccacctccaccaatgcatggagcaggagatgcaaaaccgatacccacctgtatcagttctgctacaggtttgatagaaaatcgccctcagtcaccagctacaggcagaacacctgtgtttgtgagccccactcccccacctcctccaccacctcttccatctgccttgtcaacttcctcattaagagcttcaatgacttcaactcctccccctccagtacctcccccacctccacctccagccactgctttgcaagctccagcagtaccaccacctccagctcctcttcagattgcccctggagttcttcacccagctcctcctccaattgcacctcctctagtacagccctctccaccagtagctagagctgccccagtatgtgagactgtaccagttcatccactcccacaaggtgaagttcaggggctgcctccacccccaccaccgcctcctctgcctccacctggcattcgaccatcatcacctgtcacagttacagctcttgctcatcctccctctgggctacatccaactccatctactgccccaggtccccatgttccattaatgcctccatctcctccatcacaagttatacctgcttctgagccaaagcgccatccatcaaccctacctgtaatcagtgatgccaggagtgtgctactggaagcaatacgaaaaggtattcagctacgcaaagtagaagagcagcgtgaacaggaagctaagcatgaacgcattgaaaacgatgttgccaccatcctgtctcgccgtattgctgttgaatatagtgattcggaagatgattcagaatttgatgaagtagattggttggagtaagaaaaatgcattgataaatattacaaaactgaatgcaaatgtcctttgtggtgcttgttccttgaaaatgtttggtcattctagtgttttgctttcttttccttataataaatgacccttttcctccataacttttgatttctaaggaaaatattagcatacatttcaaactaaatgttttacagtggcttatcttttttttccccctgaaaagactaatttggtcaaataaaccactaagtattaagcatggacagctgttgttagagtagcagattcagttttttgatatatcttaattgtgtactttgtgaattttaatttaaagaaagcaactgaaattgaaatcttgagggcagctgtgtctactaatgagccttattccatttcctgatgttttaaaagaagaaacactgccttgattatacgaatacactcagaaagtacatttagcttgtagtgttgaattctcttaaaggaatgcttgaattttttcattattgttttattgtttttatatacttgccttatttgaatgtttagcagtatccccttcccacttatatattgtgtgatatgattttgcttgcctataggagttaaaaacttttccatgtgaaatactctgacttaaacatacatgtaacttacataactgttaagaataacagtctgatttaataaatggttcattttaaaagtt

SEQ ID NO: 28172 - protein, 1312 aa, Artificial Sequence
  derived and/or modified sequence
MGDPAPARSLDDIDLSALRDPAGIFELVEVVGNGTYGQVYKGRHVKTGQLAAIKVMDVTEDEEEEIKQEINMLKKYSHHRNIATYYGAFIKKSPPGNDDQLWLVMEFCGAGSVTDLVKNTKGNALKEDCIAYICREILRGLAHLHAHKVIHRDIKGQNVLLTENAEVKLVDFGVSAQLDRTVGRRNTFIGTPYWMAPEVIACDENPDATYDYRSDIWSLGITAIEMAEGAPPLCDMHPMRALFLIPRNPPPRLKSKKWSKKFIDFIDTCLIKTYLSRPPTEQLLKFPFIRDQPTERQVRIQLKDHIDRSRKKRGEKEETEYEYSGSEEEDDSHGEEGEPSSIMNVPGESTLRREFLRLQQENKSNSEALKQQQQLQQQQQRDPEAHIKHLLHQRQRRIEEQKEERRRVEEQQRREREQRKLQEKEQQRRLEDMQALRREEERRQAEREQEYKRKQLEEQRQSERLQRQLQQEHAYLKSLQQQQQQQQLQKQQQQQLLPGDRKPLYHYGRGMNPADKPAWAREVEERTRMNKQQNSPLAKSKPGSTGPEPPIPQASPGPPGPLSQTPPMQRPVEPQEGPHKSLQDQPTRNLAAFPASHDPDPAIPAPTATPSARGAVIRQNSDPTSEGPGPSPNPPAWVRPDNEAPPKVPQRTSSIATALNTSGAGGSRPAQAVRARPRSNSAWQIYLQRRAERGTPKPPGPPAQPPGPPNASSNPDLRRSDPGWERSDSVLPASHGHLPQAGSLERNRVGVSSKPDSSPVLSPGNKAKPDDHRSRPGRPADFVLLKERTLDEAPRPPKKAMDYSSSSEEVESSEDDEEEGEGGPAEGSRDTPGGRSDGDTDSVSTMVVHDVEEITGTQPPYGGGTMVVQRTPEEERNLLHADSNGYTNLPDVVQPSHSPTENSKGQSPPSKDGSGDYQSRGLVKAPGKSSFTMFVDLGIYQPGGSGDSIPITALVGGEGTRLDQLQYDVRKGSVVNVNPTNTRAHSETPEIRKYKKRFNSEILCAALWGVNLLVGTENGLMLLDRSGQGKVYGLIGRRRFQQMDVLEGLNLLITISGKRNKLRVYYLSWLRNKILHNDPEVEKKQGWTTVGDMEGCGHYRVVKYERIKFLVIALKSSVEVYAWAPKPYHKFMAFKSFADLPHRPLLVDLTVEEGQRLKVIYGSSAGFHAVDVDSGNSYDIYIPVHIQSQITPHAIIFLPNTDGMEMLLCYEDEGVYVNTYGRIIKDVVLQWGEMPTSVAYICSNQIMGWGEKAIEIRSVETGHLDGVFMHKRAQRLKFLCERNDKVFFASVRSGGSSQVYFMTLNRNCIMNW

SEQ ID NO: 28173 - DNA, 3939 bp, Artificial Sequence
  derived and/or modified sequence
atgggagacccagctcccgcccggtctcttgacgatatagacctgtccgccctgagagacccagcggggatttttgaactggtcgaggttgtcggtaacggaacctatgggcaggtgtataaggggagacatgttaaaacgggtcagctggcagcgataaaagtgatggacgtgactgaggatgaagaagaggagattaagcaagaaattaacatgcttaagaagtactctcatcaccggaatatcgccacatactacggggcattcattaaaaagtcacctcccggaaatgacgatcaactgtggctcgtgatggaattctgcggtgctggaagcgtaaccgaccttgtcaaaaacaccaaggggaacgctcttaaagaagattgtatcgcctacatctgcagagagatcctgcgcgggctggcccacttacacgcgcacaaggtgatccatcgggacattaagggccagaatgtgttgctcaccgagaacgcagaagttaaattggtggactttggggtcagcgcccaactcgacaggactgtgggcagaagaaacaccttcatagggaccccctactggatggcaccagaagtgatagcctgcgacgagaatcctgatgccacgtatgattataggagtgatatctggtcactgggcatcacggctatagagatggctgaaggcgcgccaccactgtgcgatatgcacccgatgcgggctcttttcttgattccacgaaaccctcctcctcggctgaaatcaaagaaatggtccaagaagtttatcgacttcattgacacatgcctgatcaagacctatctgagcaggccccccaccgagcagctgttgaagtttcctttcattcgcgaccaaccgactgaaagacaggtacgtatccagctgaaagaccacatcgaccggtcaaggaagaagcggggggagaaagaggaaacagagtatgaatactctggatcagaggaagaggacgactcgcatggcgaggagggcgaaccctcttcaatcatgaacgtccctggggaaagcacactgcggcgagaattcctgcgtctgcaacaagagaacaagtctaactctgaggctcttaaacagcagcaacaactccaacaacaacagcagcgcgaccctgaagcccacataaaacacttgctccatcaacgtcagaggaggatcgaggaacagaaagaggagcggcggcgagtggaagagcaacagcgcagagaacgagagcagcgcaaactgcaggaaaaagagcagcagcggagactagaggacatgcaggccctgcgccgcgaggaggagcgtaggcaggccgagcgtgaacaagaatacaagcgcaagcaattagaggagcagcgtcagtcagagcgcctacaaaggcagttgcagcaggaacacgcctaccttaaaagtctgcagcagcaacagcagcaacagcagctgcagaaacagcaacagcaacagctgctgcccggtgacaggaaacccctgtatcattatggcaggggcatgaaccctgcagacaagcccgcttgggccagggaagtagaagagcggacaagaatgaataaacaacagaacagccccttggccaagtcaaagccaggatctaccggccccgagccgcccatcccacaagccagtcccggcccaccgggtccactgagccagacccccccaatgcagcggcccgttgagccgcaggaggggccccataaaagcctccaggaccagcctacgagaaatttagccgcattccccgccagtcacgatcccgatcccgcgatccctgcgcctaccgctacaccttccgcacgtggggcagttattagacagaatagcgatcctacctcagaggggcccggcccgtcccccaatccgcccgcctgggtgcgccctgacaacgaggccccacctaaggtgccccaacgcacgagctcaatcgccaccgccctaaatacatccggagccggaggttcacggccagctcaggccgtgagggcaaggcctagatcgaattcagcctggcagatatatctgcaacgaagagctgagcggggtacacctaagcccccgggtccacccgcacagcccccaggaccccccaatgcctctagcaatcccgacttaaggcgatccgatccaggctgggagcggtccgactcagtgttacctgcatctcacggacatctgccccaagctggttcgttggaaagaaacagagtcggcgtcagcagcaaaccagacagcagtcctgtcctgagccctggcaacaaggcgaagccagacgaccaccgcagtcgacccggtagacctgctgacttcgtgttgctgaaagaaagaacactggacgaagcgcctcgacctcccaaaaaagctatggattactccagctcatctgaggaagtggagagtagcgaagacgacgaagaggaaggagaggggggcccagcggaaggttccagggatacgcctggcggacgttccgacggggacaccgactcagtgagcactatggtcgttcacgatgtggaggagataaccggaacccagcctccttatggcggtggcaccatggtggtgcagaggacaccagaggaagaacgcaacctgcttcacgccgactccaacggctacaccaatctgcctgatgtggtacaaccgagccactcccccactgagaactcaaaaggccagagcccgcctagcaaagacggaagcggagactaccagagccgcgggttggtaaaggcacctggcaagagcagtttcacgatgtttgtcgacctcgggatttaccagcccggcgggagcggggatagtatccctataacagccctggtcggcggcgaagggaccaggctagatcagctgcagtacgatgtgcggaagggttcggtagtgaatgtaaaccctactaatactcgggcgcactcagagacccccgagattaggaagtacaaaaagcgctttaatagtgagatactttgtgcagccctgtggggcgtgaaccttttggtcggcacagagaatggactaatgctgctcgacagatccggccagggtaaagtgtatggcttgatcggccgtaggagatttcagcaaatggacgtcttggaaggacttaatctcctgataacaatttcaggcaaacgtaataaattgagggtgtactacctcagctggctccgcaacaagatcctgcacaacgacccagaggtggagaaaaaacagggctggacaacagtgggagatatggagggatgtggtcactaccgggtggtaaaatacgagagaattaaatttcttgtcatcgccttgaaatcttccgtagaggtgtacgcgtgggccccaaagccgtaccacaagttcatggctttcaaatccttcgcggacttaccacataggccccttctcgtcgacctgactgtggaagagggtcagcggcttaaggtgatttacggttcaagcgccggttttcacgctgtggatgtagatagcggcaattcgtacgatatctatattccagtacatatccagtctcagattaccccacacgccatcatttttttgcccaataccgacggtatggagatgctgctttgttacgaggacgagggcgtgtatgttaatacctacggtcgcataatcaaggatgtcgtgctccagtggggcgaaatgcccacatcagtggcctacatctgctctaatcaaataatggggtggggggagaaagcaatcgagatacggagcgtggagactggccatctggatggcgtgttcatgcacaagcgggctcaaaggctgaagttcctctgcgagaggaatgataaagtgttcttcgcatccgtccggagtggcgggtcaagccaagtgtatttcatgaccctgaatcgcaactgtataatgaattggtag

SEQ ID NO: 28174 - DNA, 3939 bp, Artificial Sequence
  derived and/or modified sequence
atgggagaccctgccccagcccggagcctggatgacatcgacctgagcgccctgcgggaccctgctggcatctttgagctggtggaggtggtgggcaatggcacctacggccaggtgtacaagggccgccacgtgaagacaggccagctggccgccatcaaggtgatggatgtgacagaagatgaggaggaggagatcaagcaggagatcaacatgctgaagaagtacagccaccacaggaacatcgccacctactacggggccttcatcaagaagagccccccaggaaatgatgaccagctgtggctggtgatggagttctgtggggccggctctgtgacagacctggtgaagaacaccaagggaaatgccctgaaggaggactgcatcgcctacatctgccgggagatcctgcggggcctggcccacctgcacgcccacaaggtgatccaccgggacatcaagggccagaatgtgctgctgacagaaaatgctgaggtgaagctggtggactttggagtgtctgcccagctggacagaacagtgggcagaagaaacaccttcatcggcaccccctactggatggcccctgaggtgattgcctgtgatgagaacccagatgccacctatgactacagaagtgacatctggagcctgggcatcacagccatcgagatggccgagggcgccccacccctgtgtgacatgcaccccatgagggccctcttcctgatccccagaaatcctccaccccggctgaagagcaagaagtggagcaagaagttcatcgacttcatcgacacctgcctgatcaagacctacctgagccggcccccaacagagcagctgctgaagttccccttcatccgggaccagcccacagagcggcaggtgcgcatccagctgaaggaccacatcgacaggagcaggaagaagagaggagagaaggaggagacagaatatgagtacagcggcagcgaggaggaggatgacagccatggagaggagggggagcccagcagcatcatgaatgtgcctggagagagcaccctgcggcgggagttcctgcggctgcagcaggagaacaagagcaacagcgaggccctgaagcagcagcagcagctgcagcagcagcagcagagggaccctgaggcccacatcaagcacctgctgcaccagaggcagaggcgcatcgaggagcagaaggaggagcggcggcgggtggaggagcagcagaggcgggagcgggagcagaggaagctgcaggagaaggagcagcagaggcggctggaggacatgcaggccctgcggcgggaggaggagcggcggcaggccgagcgggagcaggagtacaagaggaagcagctggaggagcagaggcagagcgagcggctgcagaggcagctgcagcaggagcacgcctacctgaagagcctgcagcagcagcagcagcagcagcagctgcagaagcagcagcagcagcagctgctgcccggggacaggaagcccctgtaccactacggccggggcatgaacccagctgacaagccagcctgggcccgggaggtggaggagaggaccaggatgaacaagcagcagaacagccccctggccaagagcaagccaggcagcactggacctgagccccccatcccccaggccagccctggccccccaggccccctgagccagaccccacccatgcagaggcctgtggagccccaggagggcccccacaagagcctgcaggaccagcccaccaggaacctggccgccttccctgccagccatgaccctgaccctgccatcccagcccccacagccaccccatctgcccggggagctgtgatccggcagaacagcgaccccaccagcgagggccctggccccagccccaaccccccagcctgggtgcggccagacaatgaggccccacccaaggtgccccagaggaccagcagcatcgccacagccctgaacaccagcggggccggcggcagcaggcctgcccaggccgtgcgggcccggcccaggagcaacagcgcctggcagatctacctgcagaggagagctgagcggggcacccccaagcccccaggccccccagcccagcccccaggccccccaaatgccagcagcaacccagacctgcggcggagtgaccccggctgggagaggagtgacagcgtgctgcctgccagccacggccacctgccccaggccggcagcctggagaggaacagagtgggcgtgagcagcaagccagacagcagccctgtgctgagccctggcaacaaggccaagccagatgaccacaggagccggcccggccggcctgctgactttgtgctgctgaaggagaggaccctggatgaggccccccggccccccaagaaggccatggactacagcagcagcagcgaggaggtggagagcagtgaagatgatgaggaggagggggagggcggccctgctgagggcagccgggacacccctgggggccgcagtgatggagacacagacagcgtgtccaccatggtggtgcatgatgtggaggagatcaccggcacccagcccccctatggaggcggcaccatggtggtgcagaggaccccagaggaggagaggaacctgctgcatgctgacagcaatggctacaccaacctgcctgatgtggtgcagcccagccacagccccacagagaacagcaagggccagagcccccccagcaaggatggcagcggggactaccagagccggggcctggtgaaggcccctgggaagagcagcttcaccatgtttgtggacctgggcatctaccagcccggcggcagcggggacagcatccccatcacagccctggtgggcggggagggcacccggctggaccagctgcagtatgatgtgaggaaaggatctgtggtgaatgtgaaccccaccaacacccgggcccacagcgagaccccagagatcaggaagtacaagaagcgcttcaacagcgagatcctgtgtgccgccctgtggggcgtgaacctgctggtgggcacagaaaatggcctgatgctgctggacaggagcggccagggcaaggtgtatggcctgattggaagaagacgcttccagcagatggatgtgctggagggcctgaacctgctgatcaccatcagcggcaagaggaacaagctgcgggtgtactacctgtcctggctgaggaacaagatcctgcacaatgaccctgaggtggagaagaagcagggctggaccaccgtgggggacatggagggctgcggccactacagagtggtgaagtatgaaagaatcaagttcctggtgattgccctgaagagctctgtggaggtgtatgcctgggcccccaagccctaccacaagttcatggccttcaagagctttgctgacctgccccaccggcccctgctggtggacctgactgtggaggagggccagaggctgaaggtgatctacggcagcagcgctggcttccacgctgtggatgtggacagcggcaacagctatgacatctacatccctgtgcacatccagagccagatcacccctcatgccatcatcttcctgcccaacacagatggcatggagatgctgctgtgctatgaagatgagggcgtgtatgtgaacacctacggccgcatcatcaaggatgtggtgctgcagtggggcgagatgcccacctctgtggcctacatctgcagcaaccagatcatgggctggggcgagaaggccatcgagatccgctctgtggagaccggccacctggatggagtcttcatgcacaagagggcccagaggctgaagttcctgtgtgaaagaaatgacaaggtgttctttgcctctgtgcgcagcggcggcagcagccaggtgtacttcatgaccctgaacagaaactgcatcatgaactggtag

SEQ ID NO: 28175 - DNA, 4956 bp, Artificial Sequence
  derived and/or modified sequence
agtgcgcggtcgctccgcgcctgcgcaggagaggtggtaggctcgggtggctggctccggggagatagcgcctgtcagtcggtgggtcggtcctcgcgccggccctccccctccccggtctccgggggaggcgcggtggagtccgcccccggggttctccgatgggggagaagcggcgacggcggcagtggagtaaccgagccggagcgtgagcggccccggtgccccgttccccacggaggccatgggcgacccagcccccgcccgcagcctggacgacatcgacctgtccgccctgcgggaccctgctgggatctttgagcttgtggaggtggtcggcaatggaacctacggacaggtgtacaagggtcggcatgtcaagacggggcagctggctgccatcaaggtcatggatgtcacggaggacgaggaggaagagatcaaacaggagatcaacatgctgaaaaagtactctcaccaccgcaacatcgccacctactacggagccttcatcaagaagagccccccgggaaacgatgaccagctctggctggtgatggagttctgtggtgctggttcagtgactgacctggtaaagaacacaaaaggcaacgccctgaaggaggactgtatcgcctatatctgcagggagatcctcaggggtctggcccatctccatgcccacaaggtgatccatcgagacatcaaggggcagaatgtgctgctgacagagaatgctgaggtcaagctagtggattttggggtgagtgctcagctggaccgcaccgtgggcagacggaacactttcattgggactccctactggatggctccagaggtcatcgcctgtgatgagaaccctgatgccacctatgattacaggagtgatatttggtctctaggaatcacagccatcgagatggcagagggagccccccctctgtgtgacatgcaccccatgcgagccctcttcctcattcctcggaaccctccgcccaggctcaagtccaagaagtggtctaagaagttcattgacttcattgacacatgtctcatcaagacttacctgagccgcccacccacggagcagctactgaagtttcccttcatccgggaccagcccacggagcggcaggtccgcatccagcttaaggaccacattgaccgatcccggaagaagcggggtgagaaagaggagacagaatatgagtacagcggcagcgaggaggaagatgacagccatggagaggaaggagagccaagctccatcatgaacgtgcctggagagtcgactctacgccgggagtttctccggctccagcaggaaaataagagcaactcagaggctttaaaacagcagcagcagctgcagcagcagcagcagcgagaccccgaggcacacatcaaacacctgctgcaccagcggcagcggcgcatagaggagcagaaggaggagcggcgccgcgtggaggagcaacagcggcgggagcgggagcagcggaagctgcaggagaaggagcagcagcggcggctggaggacatgcaggctctgcggcgggaggaggagcggcggcaggcggagcgcgagcaggaatacaagcggaagcagctggaggagcagcggcagtcagaacgtctccagaggcagctgcagcaggagcatgcctacctcaagtccctgcagcagcagcaacagcagcagcagcttcagaaacagcagcagcagcagctcctgcctggggacaggaagcccctgtaccattatggtcggggcatgaatcccgctgacaaaccagcctgggcccgagaggtagaagagagaacaaggatgaacaagcagcagaactctcccttggccaagagcaagccaggcagcacggggcctgagccccccatcccccaggcctccccagggcccccaggacccctttcccagactcctcctatgcagaggccggtggagccccaggagggaccgcacaagtccctgcaggaccagcccacccgaaacctggctgccttcccagcctcccatgaccccgaccctgccatccccgcacccactgccacgcccagtgcccgaggagctgtcatccgccagaattcagaccccacctctgaaggacctggccccagcccgaatcccccagcctgggtccgcccagataacgaggccccacccaaggtgcctcagaggacctcatctatcgccactgcccttaacaccagtggggccggagggtcccggccagcccaggcagtccgtgccagacctcgcagcaactccgcctggcaaatctatctgcaaaggcgggcagagcggggcaccccaaagcctccagggccccctgctcagccccctggcccgcccaacgcctctagtaaccccgacctcaggaggagcgaccctggctgggaacgctcggacagcgtccttccagcctctcacgggcacctcccccaggctggctcactggagcggaaccgcgtgggagtctcctccaaaccggacagctcccctgtgctctcccctgggaataaagccaagcccgacgaccaccgctcacggccaggccggcccgcagactttgtgttgctgaaagagcggactctggacgaggcccctcggcctcccaagaaggccatggactactcgtcgtccagcgaggaggtggaaagcagtgaggacgacgaggaggaaggcgaaggcgggccagcagaggggagcagagatacccctgggggccgcagcgatggggatacagacagcgtcagcaccatggtggtccacgacgtcgaggagatcaccgggacccagcccccatacgggggcggcaccatggtggtccagcgcacccctgaagaggagcggaacctgctgcatgctgacagcaatgggtacacaaacctgcctgacgtggtccagcccagccactcacccaccgagaacagcaaaggccaaagcccaccctcgaaggatgggagtggtgactaccagtctcgtgggctggtaaaggcccctggcaagagctcgttcacgatgtttgtggatctagggatctaccagcctggaggcagtggggacagcatccccatcacagccctagtgggtggagagggcactcggctcgaccagctgcagtacgacgtgaggaagggttctgtggtcaacgtgaatcccaccaacacccgggcccacagtgagacccctgagatccggaagtacaagaagcgattcaactccgagatcctctgtgcagccctttggggggtcaacctgctggtgggcacggagaacgggctgatgttgctggaccgaagtgggcagggcaaggtgtatggactcattgggcggcgacgcttccagcagatggatgtgctggaggggctcaacctgctcatcaccatctcagggaaaaggaacaaactgcgggtgtattacctgtcctggctccggaacaagattctgcacaatgacccagaagtggagaagaagcagggctggaccaccgtgggggacatggagggctgcgggcactaccgtgttgtgaaatacgagcggattaagttcctggtcatcgccctcaagagctccgtggaggtgtatgcctgggcccccaaaccctaccacaaattcatggccttcaagtcctttgccgacctcccccaccgccctctgctggtcgacctgacagtagaggaggggcagcggctcaaggtcatctatggctccagtgctggcttccatgctgtggatgtcgactcggggaacagctatgacatctacatccctgtgcacatccagagccagatcacgccccatgccatcatcttcctccccaacaccgacggcatggagatgctgctgtgctacgaggacgagggtgtctacgtcaacacgtacgggcgcatcattaaggatgtggtgctgcagtggggggagatgcctacttctgtggcctacatctgctccaaccagataatgggctggggtgagaaagccattgagatccgctctgtggagacgggccacctcgacggggtcttcatgcacaaacgagctcagaggctcaagttcctgtgtgagcggaatgacaaggtgttttttgcctcagtccgctctgggggcagcagccaagtttacttcatgactctgaaccgtaactgcatcatgaactggtgacggggccctgggctggggctgtcccacactggacccagctctccccctgcagccaggcttcccgggccgcccctctttcccctccctgggcttttgcttttactggtttgatttcactggagcctgctgggaacgtgacctctgacccctgatgctttcgtgatcacgtgaccatcctcttccccaacatgtcctcttcccaaaactgtgcctgtccccagcttctggggagggacacagcttccccttcccaggaattgagtgggcctagcccctccccccttttctccatttgagaggagagtgcttggggcttgaaccccttaccccactgctgctgactgggcagggccctggacccctttatttgcacgtcaggggagccggctccccccttgaatgtaccagaccctggggggggtcactgggccctagatttttggggggtcaccagccactccaggggcagggaccatttcttcattttctgaaagcactttaatgattccccttcccccaaactccagggaatggaggggggaccccgccagccaaaacattccccccattcccgacccccctctcctcttctagcccatgcccttccccggtggagggagggagcagggagccctcactctccacgccccttgcttgcatctgtatatagtgtgagcagcaagtaacccttctccctccccccccacccctcctcaatgtagtggccttggatatcctgtttgttaataaagacaattcaaccagctcccacc

SEQ ID NO: 28176 - DNA, 3939 bp, Artificial Sequence
  derived and/or modified sequence
atgggcgaccccgcccccgcccggagcctggacgacatcgacctgtcagccctgcgggatccggctggaatttttgaactcgtcgaagtagtgggcaatgggacttatgggcaggtgtataagggtcggcatgttaaaactgggcaactggcagccattaaggttatggacgtcaccgaggacgaggaagaagaaatcaagcaggagatcaatatgcttaagaagtacagtcaccacaggaacattgctacctattacggagcttttattaaaaagagcccaccaggcaatgacgatcaactgtggctcgtaatggagttctgcggtgcaggatctgtgacagatctagtgaaaaatactaagggaaatgcactcaaagaagactgtatagcttacatttgtcgcgagatactgaggggcctggcccatctgcatgcccacaaggtgattcacagggatatcaagggccagaatgtgctcctgaccgaaaatgctgaggtcaagctggtcgacttcggtgttagcgcccagctcgacaggacagtcggtcgccggaacacattcatcgggacaccatattggatggccccggaggtgattgcctgcgacgagaacccagatgccacatatgattatcggtccgacatctggtcgctgggcatcacagcaatagagatggctgaaggcgcccccccgctttgcgacatgcaccccatgcgggccctctttctgatcccaagaaatcctcccccgcgtttaaaaagtaagaagtggtccaaaaagtttattgattttatcgatacttgtttgattaagacctacctatctaggcctcccacagaacagctgctgaaatttcctttcattagagaccaaccaaccgagcggcaggtccgaattcaactgaaggatcatatcgataggtccaggaagaaacgcggcgaaaaagaggaaactgaatacgaatattcaggcagcgaggaggaagatgactctcatggagaagaaggggagccctccagcattatgaacgttcctggtgaatctaccctcagaagggagtttcttcgtctacaacaagaaaataagtcgaattctgaagccctcaagcagcagcagcaactgcagcagcagcaacagagggaccccgaggctcacattaaacacctgctgcaccagcgacagcggcgcattgaagagcagaaggaagaacggaggcgtgtggaagagcagcagcggcgcgaacgggagcagcggaaactgcaggaaaaggagcagcagcggagactggaggatatgcaggcactcagacgcgaggaagagcgccgccaagccgagcgtgagcaagaatacaagcgcaaacagcttgaagaacagcgtcagagcgagcgcctgcaaagacagctgcagcaagaacatgcatatctgaaaagcctccaacagcaacagcaacaacagcagctgcaaaagcaacaacagcagcagctgctccccggagacaggaagccattgtaccattacgggcgtgggatgaatccggccgataagccagcttgggcccgggaagtcgaagagagaacaaggatgaataagcagcagaactcacctttggcaaaatctaagcccgggtcaaccggccccgaacccccgatcccccaagcatccccaggtccccccggccccctttcacagactccccctatgcaacggcccgtggaaccgcaggagggcccacacaagagtttgcaagatcagcccacccgtaacctcgctgcatttccagcatcccacgaccccgatccggcaattccagcgccaacagccactcccagcgctagaggcgcggtaattcgccagaattccgatccaacttctgaggggcctggcccaagccccaacccacccgcatgggtgcgtcctgacaacgaggctccccctaaggtgcctcagcggacgagttctattgccactgcgctcaatacctcgggtgctggtggctcccgccccgctcaggctgtacgagcacgcccaagatctaattctgcttggcagatctacctgcagcgccgtgccgaacgcggaacgcctaaacctcctgggccgccggcccaacctcccggccctccaaatgcttcctccaatcctgatctgaggagatccgaccctggctgggaacgctctgacagcgtgctcccagcctcccatggtcatcttccacaagccggctctctcgaaagaaaccgtgtgggtgttagctcaaagcctgactccagtccagtgctatcccctggtaacaaagccaagcctgatgatcatcggtccaggccaggacgtcctgccgattttgtcctgctgaaggagagaacattggatgaagccccaagaccgcctaagaaagccatggattactctagctcttctgaagaagttgaatcttccgaggacgacgaagaagagggggagggagggcctgccgagggatcccgagacacacctggcgggcgctcagatggagacacagatagcgtttccacgatggtggttcatgacgtggaggagatcaccggtacgcagcccccttacggcgggggcacaatggtagtccagcgcacccccgaggaggaacggaatttactgcatgcggactctaacgggtacactaatctcccagatgtagtccagccctctcattcacctactgaaaacagcaagggccagtcccccccatcaaaggacggttcaggggactaccagtctagaggactggttaaggcccccgggaagagctcctttacaatgtttgtggatttaggaatctatcagcccggcggcagcggggatagtatacctattacagcactagtagggggcgaaggcacccggctcgatcagttacagtacgacgtcagaaagggcagcgtagtgaacgtaaatcccaccaacacaagggcacacagtgagactcccgaaatccgtaaatataagaagcggtttaatagcgagattctttgcgccgcactgtggggggtaaacctcttggttggaactgagaatggcctcatgctccttgaccggtccggtcagggtaaggtctacggtttgatcgggaggcgccggttccagcagatggatgtgctggaaggtctaaaccttttaatcaccatctccggtaagcgcaacaagctgcgcgtttactacttaagctggctgagaaacaagattcttcacaacgacccagaagtcgagaagaagcaggggtggactactgtgggggacatggaaggctgcgggcattaccgcgttgtgaaatacgaacgcatcaagttccttgtgatagccttaaagtcctctgtggaggtctatgcgtgggctcccaagccctaccacaaatttatggccttcaagtcattcgcagatcttcctcacagaccgttactggtagatctgacagtggaggaaggccagagactcaaggtgatttacggtagctctgcgggctttcacgcggtcgacgtcgactcaggcaacagctacgatatctatatccctgtgcatattcagagccagataactccccatgctattatcttcctgcctaacactgatgggatggagatgctcctgtgttacgaagatgagggagtctatgtaaacacctatggccgaattattaaggatgtcgtgctccagtggggcgaaatgccaacctcagtggcctacatctgtagcaaccagatcatggggtggggcgagaaagctattgagatccgatccgtcgagactgggcatctcgacggagtgtttatgcataagcgcgcccagcggcttaagtttttgtgcgagagaaacgataaggtgttcttcgcatccgtcagaagcggtgggagcagccaggtttactttatgactttgaacagaaattgtatcatgaactggtag

SEQ ID NO: 28177 - DNA, 3939 bp, Artificial Sequence
  derived and/or modified sequence
atgggggatcccgctcctgccagatcactggatgacattgatctctctgccctgagggatcccgcagggatctttgagctagttgaagttgtgggaaatggcacgtacggacaggtatataaaggcaggcacgtgaagaccggccagttggccgcaatcaaggtgatggacgtaacggaggatgaagaggaggaaatcaagcaggaaatcaacatgctcaaaaagtacagccaccacagaaacattgccacctactatggcgctttcatcaagaagtccccaccgggaaacgacgaccagctgtggctggttatggaattttgtggggctgggtctgttacagatctcgtcaaaaacaccaaaggcaacgccttaaaggaagactgcatcgcctacatatgccgagagatcttgagaggactggcccatctgcatgcacacaaggtgatccatcgcgacatcaagggccagaatgttctactaaccgaaaacgctgaagtgaagctggtcgattttggggtaagtgcccagctcgatcgcacggtcggtcgtcgcaacaccttcataggcacaccttactggatggcacccgaggtcatcgcctgtgatgagaaccccgatgccacctacgattatcggtctgatatctggagtctaggaatcactgccattgaaatggccgaaggagcacctcctctatgcgatatgcacccaatgcgagccctgtttctgatcccccgtaaccccccaccacgtttgaagagcaagaagtggtctaaaaaatttatcgacttcattgatacgtgtctgatcaagacctatctcagcagaccccctacggagcagctcctgaagtttccttttatccgggaccagcctacggaacgccaggttcgaatccaacttaaggatcatatagacagatcacgtaagaagagaggggagaaagaggagacggaatatgagtactctggctccgaggaggaagacgactcccatggtgaggaaggtgagcctagctctatcatgaatgttcccggtgaatcaacactgaggcgcgaattcctgagactccagcaggagaacaaatcaaatagcgaagccctaaagcagcagcaacagcttcagcagcagcagcagagagatccagaggcacacatcaaacacctcttgcaccagcggcaacgaaggatagaagaacaaaaggaagagcggagaagggttgaggagcagcagcggagagagagggaacaaaggaagctgcaggaaaaagagcagcagagacgccttgaagatatgcaagcactgcggcgtgaagaagaaaggcggcaggctgaaagagaacaagaatataagagaaaacagctggaggaacagagacagagcgagcggctacagagacagctgcaacaggagcatgcatacctgaagtctctgcaacagcaacagcagcagcaacagctgcagaagcaacaacagcagcaattactgcccggagacaggaagccactgtaccattatggcagaggcatgaaccctgcggacaagcctgcctgggcccgtgaggttgaggaacgaacccggatgaacaagcagcaaaactcacctttagctaaatccaagccagggagcacaggacccgaacccccaattcctcaggcttcccccggtccccctggacctctgtcacaaactccacccatgcaacgccctgtggaacctcaggaaggccctcacaagagtcttcaggaccagcctactcgcaacctggctgcatttcccgcttcccatgaccctgatccagccataccggcaccaaccgctactccgagcgcacgtggggcagttatacgtcagaactcagatcctacgtctgagggcccagggccttccccaaacccaccagcttgggttagaccagacaacgaggcgcctcccaaggtaccacaacggacctcctcaatcgcgacagcactgaatactagtggtgctgggggatctaggcccgctcaagctgttcgcgcacgcccaaggtctaatagcgcttggcaaatatatctgcagaggcgggcagaaaggggtacaccaaaaccgcctgggccacctgcacagcctcctggccctcccaacgcatcctctaatcccgacctgcggagaagcgaccccggttgggaacgaagtgatagtgtattgccggcttctcatggtcatctgccacaggccggatctctcgagcggaaccgcgtcggtgtttcaagcaagccagactcttcacctgtactttctccgggtaataaagcgaagcccgacgatcaccggagccgccctggtcgccctgctgactttgttctgctgaaggagaggacactggacgaagcaccaaggccgcctaaaaaagccatggattatagctcaagctctgaggaagtagagtcttctgaggacgatgaagaggaaggtgagggcggacctgcagagggaagccgagacactcctggcggacgcagcgacggtgacaccgattcagtgagcacaatggtggttcacgacgtggaagagatcacaggcacccagccaccctacggcggtggaaccatggtggtacagcgtaccccagaggaggagaggaacctgttacacgccgactctaatggatatactaacttaccagacgtggtccaaccgtcacacagcccgaccgagaactccaaagggcagtccccccctagcaaagacgggagtggagactatcagtcccggggactcgtcaaagcaccagggaagtcctcttttacaatgttcgtggatctcggaatctaccagccaggtggctctggagacagcatccctattacagccttagtcggcggagagggcactaggctggaccagctgcagtacgatgttcgaaaaggatcagtggttaatgtgaatcccacaaataccagggcacacagcgagacaccggagatcaggaaatataaaaagaggtttaactctgaaattctatgcgcagctctctggggtgtgaatctcctggtggggaccgagaatggactgatgctcctggacagaagtggccagggcaaagtgtacggccttatagggcgtagaaggtttcagcagatggatgtgctggaaggactcaacctccttattaccatttcaggcaagcgcaacaagctgagggtgtactatctctcctggctgagaaacaagatcctgcataatgatcccgaagtcgagaaaaagcagggctggacgacagtgggtgatatggagggctgcggccattatcgggtggtgaagtatgagcgcatcaagtttttggtgatcgcactgaagtcctctgtcgaggtttatgcatgggcacccaagccctatcacaaattcatggcattcaaatccttcgcagatctgcctcatcggcctctgctagttgacttgacagttgaagaggggcagcggctcaaagtcatctacggcagttcagccggttttcatgcagttgacgtagatagcggtaactcctatgatatatacatcccagtgcatatccaaagccagataaccccccatgcaattatattcttgcctaatacagatggaatggaaatgctgctgtgttatgaggacgagggcgtatacgttaacacctacggcagaataatcaaagatgtggtgctgcagtggggtgaaatgcctacatctgtcgcatacatctgctcaaatcagatcatgggctggggagagaaagcgatcgagatccgctcagttgagactgggcacctcgatggggtttttatgcacaagcgcgcacagaggttgaaatttctgtgtgagcggaatgacaaggtcttcttcgcctccgtgcggtccggaggatcatctcaggtctattttatgaccctgaatagaaattgtattatgaactggtag

SEQ ID NO: 28178 - DNA, 3939 bp, Artificial Sequence
  derived and/or modified sequence
atgggcgaccccgcccccgccagaagcctggacgacatcgacctgagcgccctgagagaccccgccggcatcttcgagctggtggaggtggtgggcaacggcacctacggccaggtgtacaagggcagacacgtgaagaccggccagctggccgccatcaaggtgatggacgtgaccgaggacgaggaggaggagatcaagcaggagatcaacatgctgaagaagtacagccaccacagaaacatcgccacctactacggcgccttcatcaagaagagcccccccggcaacgacgaccagctgtggctggtgatggagttctgcggcgccggcagcgtgaccgacctggtgaagaacaccaagggcaacgccctgaaggaggactgcatcgcctacatctgcagagagatcctgagaggcctggcccacctgcacgcccacaaggtgatccacagagacatcaagggccagaacgtgctgctgaccgagaacgccgaggtgaagctggtggacttcggcgtgagcgcccagctggacagaaccgtgggcagaagaaacaccttcatcggcaccccctactggatggcccccgaggtgatcgcctgcgacgagaaccccgacgccacctacgactacagaagcgacatctggagcctgggcatcaccgccatcgagatggccgagggcgccccccccctgtgcgacatgcaccccatgagagccctgttcctgatccccagaaaccccccccccagactgaagagcaagaagtggagcaagaagttcatcgacttcatcgacacctgcctgatcaagacctacctgagcagaccccccaccgagcagctgctgaagttccccttcatcagagaccagcccaccgagagacaggtgagaatccagctgaaggaccacatcgacagaagcagaaagaagagaggcgagaaggaggagaccgagtacgagtacagcggcagcgaggaggaggacgacagccacggcgaggagggcgagcccagcagcatcatgaacgtgcccggcgagagcaccctgagaagagagttcctgagactgcagcaggagaacaagagcaacagcgaggccctgaagcagcagcagcagctgcagcagcagcagcagagagaccccgaggcccacatcaagcacctgctgcaccagagacagagaagaatcgaggagcagaaggaggagagaagaagagtggaggagcagcagagaagagagagagagcagagaaagctgcaggagaaggagcagcagagaagactggaggacatgcaggccctgagaagagaggaggagagaagacaggccgagagagagcaggagtacaagagaaagcagctggaggagcagagacagagcgagagactgcagagacagctgcagcaggagcacgcctacctgaagagcctgcagcagcagcagcagcagcagcagctgcagaagcagcagcagcagcagctgctgcccggcgacagaaagcccctgtaccactacggcagaggcatgaaccccgccgacaagcccgcctgggccagagaggtggaggagagaaccagaatgaacaagcagcagaacagccccctggccaagagcaagcccggcagcaccggccccgagccccccatcccccaggccagccccggcccccccggccccctgagccagaccccccccatgcagagacccgtggagccccaggagggcccccacaagagcctgcaggaccagcccaccagaaacctggccgccttccccgccagccacgaccccgaccccgccatccccgcccccaccgccacccccagcgccagaggcgccgtgatcagacagaacagcgaccccaccagcgagggccccggccccagccccaacccccccgcctgggtgagacccgacaacgaggccccccccaaggtgccccagagaaccagcagcatcgccaccgccctgaacaccagcggcgccggcggcagcagacccgcccaggccgtgagagccagacccagaagcaacagcgcctggcagatctacctgcagagaagagccgagagaggcacccccaagccccccggcccccccgcccagccccccggcccccccaacgccagcagcaaccccgacctgagaagaagcgaccccggctgggagagaagcgacagcgtgctgcccgccagccacggccacctgccccaggccggcagcctggagagaaacagagtgggcgtgagcagcaagcccgacagcagccccgtgctgagccccggcaacaaggccaagcccgacgaccacagaagcagacccggcagacccgccgacttcgtgctgctgaaggagagaaccctggacgaggcccccagaccccccaagaaggccatggactacagcagcagcagcgaggaggtggagagcagcgaggacgacgaggaggagggcgagggcggccccgccgagggcagcagagacacccccggcggcagaagcgacggcgacaccgacagcgtgagcaccatggtggtgcacgacgtggaggagatcaccggcacccagcccccctacggcggcggcaccatggtggtgcagagaacccccgaggaggagagaaacctgctgcacgccgacagcaacggctacaccaacctgcccgacgtggtgcagcccagccacagccccaccgagaacagcaagggccagagcccccccagcaaggacggcagcggcgactaccagagcagaggcctggtgaaggcccccggcaagagcagcttcaccatgttcgtggacctgggcatctaccagcccggcggcagcggcgacagcatccccatcaccgccctggtgggcggcgagggcaccagactggaccagctgcagtacgacgtgagaaagggcagcgtggtgaacgtgaaccccaccaacaccagagcccacagcgagacccccgagatcagaaagtacaagaagagattcaacagcgagatcctgtgcgccgccctgtggggcgtgaacctgctggtgggcaccgagaacggcctgatgctgctggacagaagcggccagggcaaggtgtacggcctgatcggcagaagaagattccagcagatggacgtgctggagggcctgaacctgctgatcaccatcagcggcaagagaaacaagctgagagtgtactacctgagctggctgagaaacaagatcctgcacaacgaccccgaggtggagaagaagcagggctggaccaccgtgggcgacatggagggctgcggccactacagagtggtgaagtacgagagaatcaagttcctggtgatcgccctgaagagcagcgtggaggtgtacgcctgggcccccaagccctaccacaagttcatggccttcaagagcttcgccgacctgccccacagacccctgctggtggacctgaccgtggaggagggccagagactgaaggtgatctacggcagcagcgccggcttccacgccgtggacgtggacagcggcaacagctacgacatctacatccccgtgcacatccagagccagatcaccccccacgccatcatcttcctgcccaacaccgacggcatggagatgctgctgtgctacgaggacgagggcgtgtacgtgaacacctacggcagaatcatcaaggacgtggtgctgcagtggggcgagatgcccaccagcgtggcctacatctgcagcaaccagatcatgggctggggcgagaaggccatcgagatcagaagcgtggagaccggccacctggacggcgtgttcatgcacaagagagcccagagactgaagttcctgtgcgagagaaacgacaaggtgttcttcgccagcgtgagaagcggcggcagcagccaggtgtacttcatgaccctgaacagaaactgcatcatgaactggtag

SEQ ID NO: 28179 - protein, 496 aa, Artificial Sequence
  derived and/or modified sequence
MRALRRLIQGRILLLTICAAGIGGTFQFGYNLSIINAPTLHIQEFTNETWQARTGEPLPDHLVLLMWSLIVSLYPLGGLFGALLAGPLAITLGRKKSLLVNNIFVVSAAILFGFSRKAGSFEMIMLGRLLVGVNAGVSMNIQPMYLGESAPKELRGAVAMSSAIFTALGIVMGQVVGLRELLGGPQAWPLLLASCLVPGALQLASLPLLPESPRYLLIDCGDTEACLAALRRLRGSGDLAGELEELEEERAACQGCRARRPWELFQHRALRRQVTSLVVLGSAMELCGNDSVYAYASSVFRKAGVPEAKIQYAIIGTGSCELLTAVVSCVVIERVGRRVLLIGGYSLMTCWGSIFTVALCLQSSFPWTLYLAMACIFAFILSFGIGPAGVTGILATELFDQMARPAACMVCGALMWIMLILVGLGFPFIMEALSHFLYVPFLGVCVCGAIYTGLFLPETKGKTFQEISKELHRLNFPRRAQGPTWRSLEVIQSTEL

SEQ ID NO: 28180 - protein, 367 aa, Artificial Sequence
  derived and/or modified sequence
MRALRRLIQGRILLLTICAAGIGGTFQFGYNLSIINAPTLHIQEFTNETWQARTGEPLPDHLVLLMWSLIVSLYPLGGLFGALLAGPLAITLGRKKSLLVNNIFVVSAAILFGFSRKAGSFEMIMLGRLLVGVNAGVSMNIQPMYLGESAPKELRGAVAMSSAIFTALGIVMGQVVGLSTTAAPGLRGLGRGAGGAGGGARCLPGLPCRPWELFQHRALRRQVTSLVVLGSAMELCGNDSVYAYASSVFRKAGVPEAKIQYAIIGTGSCELLTAVVSVSLEGALPPPALWGGTPRSSALNQFTLQLMVLKCSEGPGAVAHACKPSTLGGRGGWITRSGVRDQPGQHSETPVSTKKYKKLSRRGGGRL

SEQ ID NO: 28181 - DNA, 1104 bp, Artificial Sequence
  derived and/or modified sequence
atgagagccctgagaagactgatccagggcagaatcctgctgctgaccatctgcgccgccggcatcggcggcaccttccagttcggctacaacctgagcatcatcaacgcccccaccctgcacatccaggagttcaccaacgagacctggcaggccagaaccggcgagcccctgcccgaccacctggtgctgctgatgtggagcctgatcgtgagcctgtaccccctgggcggcctgttcggcgccctgctggccggccccctggccatcaccctgggcagaaagaagagcctgctggtgaacaacatcttcgtggtgagcgccgccatcctgttcggcttcagcagaaaggccggcagcttcgagatgatcatgctgggcagactgctggtgggcgtgaacgccggcgtgagcatgaacatccagcccatgtacctgggcgagagcgcccccaaggagctgagaggcgccgtggccatgagcagcgccatcttcaccgccctgggcatcgtgatgggccaggtggtgggcctgagcaccaccgccgcccccggcctgagaggcctgggcagaggcgccggcggcgccggcggcggcgccagatgcctgcccggcctgccctgcagaccctgggagctgttccagcacagagccctgagaagacaggtgaccagcctggtggtgctgggcagcgccatggagctgtgcggcaacgacagcgtgtacgcctacgccagcagcgtgttcagaaaggccggcgtgcccgaggccaagatccagtacgccatcatcggcaccggcagctgcgagctgctgaccgccgtggtgagcgtgagcctggagggcgccctgcccccccccgccctgtggggcggcacccccagaagcagcgccctgaaccagttcaccctgcagctgatggtgctgaagtgcagcgagggccccggcgccgtggcccacgcctgcaagcccagcaccctgggcggcagaggcggctggatcaccagaagcggcgtgagagaccagcccggccagcacagcgagacccccgtgagcaccaagaagtacaagaagctgagcagaagaggcggcggcagactgtag

SEQ ID NO: 28182 - DNA, 1104 bp, Artificial Sequence
  derived and/or modified sequence
atgagagcgctgagaagactgatccagggtaggattttgctgctcaccatctgcgcagctggcatcggcggaaccttccaatttgggtataatctgagtatcatcaacgcaccgacactccacatccaggagttcacaaatgaaacgtggcaggcaaggactggcgagcctttacctgatcacttggtcctgctgatgtggtctctgattgtctcactctatccactcggggggctgttcggcgctctcctagctgggccacttgccataacattaggccgcaagaagagccttctggtgaacaatattttcgtggtgagtgccgccatcttatttggcttcagcagaaaggctggctcattcgagatgatcatgttaggcagactgctcgtaggcgtaaacgccggagtgtctatgaatatccagcccatgtacctgggagaatctgcccctaaagaactgaggggggctgttgccatgtcctcagccatctttaccgcactgggtatagtgatgggccaggtcgtcggactctctaccaccgctgctcctggtctccgtggcctcggccggggcgctggcggtgccggaggcggagccaggtgcctgccaggactgccctgtagaccctgggaactctttcagcatcgggctctgcgccgccaggtcactagcttagttgtgctgggttccgctatggagctgtgcggcaacgacagcgtgtatgcttatgcctccagcgtgttccgcaaggccggagtcccggaggcgaagatccagtacgcgataattggcacgggcagctgcgagctgctcactgctgtggtttcagtatctctggaaggggcattgcctccccctgcattatgggggggcactccccggagtagcgccctcaatcaattcaccttacaactgatggtcctcaaatgctctgaaggaccgggcgcggtcgcccacgcatgcaaaccctcaactttgggcggccgaggaggctggatcactcgcagtggagtgagggaccagcctgggcagcacagtgagacccccgtgtctaccaaaaaatacaaaaagctgagccgtaggggaggtggccgattatag

SEQ ID NO: 28183 - DNA, 1104 bp, Artificial Sequence
  derived and/or modified sequence
atgagggccctgcggcggctcatccagggccgcatcctgctgctgaccatctgtgccgccggcatcggcggcaccttccagtttggctacaacctgagcatcatcaatgcccccaccctgcacatccaggagttcaccaatgagacctggcaggccaggactggagagcccctgcctgaccacctggtgctgctgatgtggagcctcatcgtgtccctgtaccccctgggcggcctgtttggagccctgctggccggccccctggccatcaccctgggcaggaagaagagcctgctggtgaacaacatctttgtggtgtctgctgccatcctgtttggcttcagcaggaaggccggcagctttgagatgatcatgctgggccgcctgctggtgggcgtgaatgccggcgtgtccatgaacatccagcccatgtacctgggggagagcgcccccaaggagctgcggggagctgtggccatgagcagcgccatcttcaccgccctgggcatcgtgatgggccaggtggtgggcctgagcaccacagctgcccctggcctgcggggcctgggcagaggagctggaggagctgggggcggggcccgctgcctgcccggcctgccctgccggccctgggagctgttccagcaccgggccctgcggcggcaggtgaccagcctggtggtgctgggcagcgccatggagctgtgtggaaatgacagcgtgtatgcctatgccagctctgtgttcaggaaggccggcgtgcctgaggccaagatccagtatgccatcatcggcaccggcagctgtgagctgctgacagctgtggtgtctgtgtccctggagggcgccctgcccccaccagccctgtggggcggcacccccaggagcagcgccctgaaccagttcaccctgcagctgatggtgctgaagtgcagcgagggccctggagctgtggcccacgcctgcaagcccagcaccctgggcggccggggcggctggatcaccaggtctggagtgcgggaccagcccggccagcacagcgagacccctgtgtccaccaagaagtacaagaagctgagcagaagaggaggcggccgcctgtag

SEQ ID NO: 28184 - DNA, 1104 bp, Artificial Sequence
  derived and/or modified sequence
atgcgggccctgcggcggctgatccagggccggatcctgctgctgactatttgcgcagcaggtattggcggtacttttcaattcgggtataacttgtctatcataaacgccccaactctgcatattcaggagttcaccaacgaaacctggcaggcacggactggagagcctctgccagaccatctggttctcttgatgtggtccctgatcgtatctctgtatccacttggaggtctgtttggcgctctattagccggaccccttgccataaccctgggtagaaagaagagtctgctggtgaacaatatcttcgtggtttcagctgcaatcctctttggtttttccaggaaggccggatcattcgagatgatcatgctagggagactcttagtcggcgtgaacgccggcgtaagcatgaatattcagcctatgtatctcggggagagcgctcccaaagaactgcgtggggccgtggcaatgagtagcgcaatctttaccgccctaggcatcgtaatggggcaggtggtgggactgtctaccacagcagcccctggtttaaggggactcggccgtggagcaggaggagccggtggaggagctaggtgtctccccggactgccgtgccggccatgggagttgttccagcaccgcgccctgcgtaggcaagtcacgtcgctggtcgtgctcggatctgccatggaactgtgtggaaatgactccgtatacgcgtatgcttcaagcgtcttccggaaagcaggcgtgcctgaagctaaaatccagtatgctattatagggactggaagttgtgaattactgaccgcagtggtgtctgtgagcctggagggggcattgccacctcctgcactctggggcggaacaccgagaagctccgctcttaaccagtttacactgcagctcatggttctgaagtgttctgaaggccctggggccgttgcacatgcatgcaagcccagtaccctgggcgggagagggggatggatcaccaggtctggggtgcgtgaccagcccggacagcacagcgagactccagtgtcgacaaaaaagtataaaaaactttcacgcagagggggaggcaggctttag

SEQ ID NO: 28185 - DNA, 1104 bp, Artificial Sequence
  derived and/or modified sequence
atgagagccctacggagactgatccaagggaggatcttgctgttaactatttgtgcagccggaattggcggaacgttccaattcggatataatcttagcatcattaatgcccctacactgcatatacaagagtttacgaatgagacgtggcaggccagaacaggcgaacctctcccggaccacttggtcctgcttatgtggtcactgatcgtgtcactctaccctctggggggtctgtttggtgccctcctcgctggacccctggccattaccctggggagaaaaaaaagtctcctcgtcaacaacatcttcgttgtttccgctgccatcctttttggcttttcacgaaaggccggaagttttgagatgattatgttaggaagattactagtgggtgtgaacgcgggagtgagcatgaacattcagccaatgtacctcggcgagtctgccccaaaagaactccggggagccgtggccatgtcatcagctatattcacagctctggggatcgtgatgggacaggtggtaggactgagtactaccgctgcacctggcctccgcggactggggcgtggtgccggtggcgctgggggaggagctaggtgtttaccaggcctgccttgtaggccttgggaactcttccaacaccgggcactgcgacgtcaggtcacaagccttgtcgtgctggggtccgcaatggaactgtgcggaaacgactcagtttatgcttatgcatcaagcgttttcaggaaggcaggggtcccagaggccaagattcagtatgccatcatcggcaccggaagctgtgagctcctaaccgccgtggtgtccgtctcgctcgagggtgccctacctcctcctgcgctttggggcggaacgccgagaagctccgccctcaaccagttcactcttcagctcatggtattgaaatgttccgaaggccctggggcagtggcgcatgcatgcaagccttccaccctgggcggacgtggaggttggataacgaggtcaggtgtcagagaccagccagggcaacactctgagacgccagttagcactaaaaagtataaaaaactttctaggagaggaggcggaagattgtag

SEQ ID NO: 28186 - DNA, 1203 bp, Artificial Sequence
  derived and/or modified sequence
cggacctgcctctcacgcaatggatcccctggcggcaacccgagaccggttctcctacccgcattccgccaagtctctcgctctgcccaggacgcacagatgagagcgctccgaagactgattcagggcaggatcctgctcctgaccatctgcgctgccggcattggtgggacttttcagtttggctataacctctctatcatcaatgccccgaccttgcacattcaggaattcaccaatgagacatggcaggcgcgtactggagagccactgcccgatcacctagtcctgcttatgtggtccctcatcgtgtctctgtatcccctgggaggcctctttggagcactgcttgcaggtcccttggccatcacgctgggaaggaagaagtccctcctggtgaataacatctttgtggtgtcagcagcaatcctgtttggattcagccgcaaagcaggctcctttgagatgatcatgctgggaagactgctcgtgggagtcaatgcaggtgtgagcatgaacatccagcccatgtacctgggggagagcgcccctaaggagctccgaggagctgtggccatgagctcagccatctttacggctctggggatcgtgatgggacaggtggtcggactcagcactacggcggctccggggctccggggacttggcaggggagctggaggagctggaggaggagcgcgctgcctgccagggctgccgtgccgcccatgggagctgttccagcatcgggccctgaggagacaggtgacaagcctcgtggttctgggcagtgccatggagctctgcgggaatgactcggtgtacgcctacgcctcctccgtgttccggaaggcaggagtgccggaagcgaagatccagtacgcgatcatcgggactgggagctgcgagctgctcacggcggttgttagtgtgagtctggagggtgcccttcctccaccagccctgtggggagggacccccaggtcctctgcattaaaccagtttacactccagcttatggtgttaaaatgcagtgaggggccaggtgcggtggctcatgcctgtaagcccagcactttgggaggccgaggtgggtggatcacaaggtcaggagttcgagaccagcctggccaacacagtgaaacccccgtctctactaaaaaatacaaaaaattatcccggcgtggtggcgggcgcctgtaa

SEQ ID NO: 28187 - protein, 499 aa, Artificial Sequence
  derived and/or modified sequence
MLHALLRSRMIQGRILLLTICAAGIGGTFQFGYNLSIINAPTLHIQEFTNETWQARTGEPLPDHLVLLMWSLIVSLYPLGGLFGALLAGPLAITLGRKKSLLVNNIFVVSAAILFGFSRKAGSFEMIMLGRLLVGVNAGVSMNIQPMYLGESAPKELRGAVAMSSAIFTALGIVMGQVVGLRELLGGPQAWPLLLASCLVPGALQLASLPLLPESPRYLLIDCGDTEACLAALRRLRGSGDLAGELEELEEERAACQGCRARRPWELFQHRALRRQVTSLVVLGSAMELCGNDSVYAYASSVFRKAGVPEAKIQYAIIGTGSCELLTAVVSCVVIERVGRRVLLIGGYSLMTCWGSIFTVALCLQSSFPWTLYLAMACIFAFILSFGIGPAGVTGILATELFDQMARPAACMVCGALMWIMLILVGLGFPFIMEALSHFLYVPFLGVCVCGAIYTGLFLPETKGKTFQEISKELHRLNFPRRAQGPTWRSLEVIQSTEL

SEQ ID NO: 28188 - DNA, 1500 bp, Artificial Sequence
  derived and/or modified sequence
atgctgcacgccctgctgagaagcagaatgatccagggcagaatcctgctgctgaccatctgcgccgccggcatcggcggcaccttccagttcggctacaacctgagcatcatcaacgcccccaccctgcacatccaggagttcaccaacgagacctggcaggccagaaccggcgagcccctgcccgaccacctggtgctgctgatgtggagcctgatcgtgagcctgtaccccctgggcggcctgttcggcgccctgctggccggccccctggccatcaccctgggcagaaagaagagcctgctggtgaacaacatcttcgtggtgagcgccgccatcctgttcggcttcagcagaaaggccggcagcttcgagatgatcatgctgggcagactgctggtgggcgtgaacgccggcgtgagcatgaacatccagcccatgtacctgggcgagagcgcccccaaggagctgagaggcgccgtggccatgagcagcgccatcttcaccgccctgggcatcgtgatgggccaggtggtgggcctgagagagctgctgggcggcccccaggcctggcccctgctgctggccagctgcctggtgcccggcgccctgcagctggccagcctgcccctgctgcccgagagccccagatacctgctgatcgactgcggcgacaccgaggcctgcctggccgccctgagaagactgagaggcagcggcgacctggccggcgagctggaggagctggaggaggagagagccgcctgccagggctgcagagccagaagaccctgggagctgttccagcacagagccctgagaagacaggtgaccagcctggtggtgctgggcagcgccatggagctgtgcggcaacgacagcgtgtacgcctacgccagcagcgtgttcagaaaggccggcgtgcccgaggccaagatccagtacgccatcatcggcaccggcagctgcgagctgctgaccgccgtggtgagctgcgtggtgatcgagagagtgggcagaagagtgctgctgatcggcggctacagcctgatgacctgctggggcagcatcttcaccgtggccctgtgcctgcagagcagcttcccctggaccctgtacctggccatggcctgcatcttcgccttcatcctgagcttcggcatcggccccgccggcgtgaccggcatcctggccaccgagctgttcgaccagatggccagacccgccgcctgcatggtgtgcggcgccctgatgtggatcatgctgatcctggtgggcctgggcttccccttcatcatggaggccctgagccacttcctgtacgtgcccttcctgggcgtgtgcgtgtgcggcgccatctacaccggcctgttcctgcccgagaccaagggcaagaccttccaggagatcagcaaggagctgcacagactgaacttccccagaagagcccagggccccacctggagaagcctggaggtgatccagagcaccgagctgtag

SEQ ID NO: 28189 - DNA, 1491 bp, Artificial Sequence
  derived and/or modified sequence
atgagagccctgagaagactgatccagggcagaatcctgctgctgaccatctgcgccgccggcatcggcggcaccttccagttcggctacaacctgagcatcatcaacgcccccaccctgcacatccaggagttcaccaacgagacctggcaggccagaaccggcgagcccctgcccgaccacctggtgctgctgatgtggagcctgatcgtgagcctgtaccccctgggcggcctgttcggcgccctgctggccggccccctggccatcaccctgggcagaaagaagagcctgctggtgaacaacatcttcgtggtgagcgccgccatcctgttcggcttcagcagaaaggccggcagcttcgagatgatcatgctgggcagactgctggtgggcgtgaacgccggcgtgagcatgaacatccagcccatgtacctgggcgagagcgcccccaaggagctgagaggcgccgtggccatgagcagcgccatcttcaccgccctgggcatcgtgatgggccaggtggtgggcctgagagagctgctgggcggcccccaggcctggcccctgctgctggccagctgcctggtgcccggcgccctgcagctggccagcctgcccctgctgcccgagagccccagatacctgctgatcgactgcggcgacaccgaggcctgcctggccgccctgagaagactgagaggcagcggcgacctggccggcgagctggaggagctggaggaggagagagccgcctgccagggctgcagagccagaagaccctgggagctgttccagcacagagccctgagaagacaggtgaccagcctggtggtgctgggcagcgccatggagctgtgcggcaacgacagcgtgtacgcctacgccagcagcgtgttcagaaaggccggcgtgcccgaggccaagatccagtacgccatcatcggcaccggcagctgcgagctgctgaccgccgtggtgagctgcgtggtgatcgagagagtgggcagaagagtgctgctgatcggcggctacagcctgatgacctgctggggcagcatcttcaccgtggccctgtgcctgcagagcagcttcccctggaccctgtacctggccatggcctgcatcttcgccttcatcctgagcttcggcatcggccccgccggcgtgaccggcatcctggccaccgagctgttcgaccagatggccagacccgccgcctgcatggtgtgcggcgccctgatgtggatcatgctgatcctggtgggcctgggcttccccttcatcatggaggccctgagccacttcctgtacgtgcccttcctgggcgtgtgcgtgtgcggcgccatctacaccggcctgttcctgcccgagaccaagggcaagaccttccaggagatcagcaaggagctgcacagactgaacttccccagaagagcccagggccccacctggagaagcctggaggtgatccagagcaccgagctgtag

SEQ ID NO: 28190 - DNA, 1500 bp, Artificial Sequence
  derived and/or modified sequence
atgcttcacgcgctgctacggagtaggatgattcaggggcgcatcctactcctgaccatatgtgccgcgggaattggcggaacattccaatttggctacaacctatctattattaacgcccccactctacatatccaggagtttacaaatgaaacctggcaggctaggacgggggagccgctgccagaccatctagtgttgctgatgtggagtctgatcgtaagtctttatccattgggcggattgttcggggcgctcctcgcaggccctctcgccattacattaggacggaagaagtctctcctggtaaataacatatttgttgtgtctgctgccatcttgtttgggttctccaggaaggccggctcctttgagatgataatgttgggtcgccttctcgtaggcgtaaacgccggggttagcatgaacatccaaccaatgtatctcggcgagagcgctccaaaggaactccgtggcgccgtagccatgagctccgcaatctttaccgccctcgggatcgtgatggggcaggtggtcggcttgcgagagctgctgggtggcccacaggcatggcctcttcttctggcaagctgcctggtcccaggagccctgcagctggcttccctacccctccttccggagtcaccaagatacctgttaatcgattgtggcgataccgaggcctgcttggcagcgctgagacgcctgcgtggctctggcgatcttgccggggaactcgaggagctggaggaggagcgtgccgcgtgtcagggctgccgggccagacggccttgggaactgttccagcaccgagctctccgccgccaggtgacctctcttgtggtgctgggttccgccatggaactgtgtggcaatgatagtgtttacgcttatgcatcgtcagttttccggaaagcaggggtgcccgaggccaaaatacaatatgcaatcatagggaccggcagctgtgagctcttaactgcagtcgtttcatgcgttgtaatcgaaagggtgggccggcgtgtccttttgatcggaggatatagtttgatgacttgttggggtagtatcttcaccgtagccctctgtcttcagtctagcttcccttggacactctaccttgccatggcatgcattttcgcatttatcctcagcttcggcatcggccctgccggcgtgaccggaattctagccaccgaactgttcgatcagatggctagacccgccgcctgcatggtgtgcggcgcactgatgtggatcatgctcattctggtggggctggggttcccctttattatggaggcgttgtctcacttcctgtacgtgccttttcttggcgtttgcgtgtgtggtgctatctacacagggctttttcttcccgagactaagggaaagacctttcaggagatcagtaaagaactacatcggctcaactttcctaggagagctcagggacctacatggaggagtttggaagtgatacagtccaccgagctgtag

SEQ ID NO: 28191 - DNA, 1491 bp, Artificial Sequence
  derived and/or modified sequence
atgcgggctttgagaagattaatccaggggcgtatactcctgttgacaatctgtgccgccggcatcgggggaacctttcaattcgggtataatctatctatcatcaacgcacctactttgcatatccaggagttcacgaatgagacatggcaggcgcggacaggagagcccctcccagatcacttggtgttattgatgtggtcactaattgtaagtctctatccgctgggagggctgtttggagccttgctcgcgggccctttagcgattaccctggggcggaagaaaagtttgcttgtgaacaatatcttcgtcgtcagtgctgctattcttttcggcttctccaggaaggctggctccttcgaaatgattatgttaggtagactactggtgggagtcaacgcaggcgtgtcaatgaatatacaacccatgtatctgggggagtcagcccctaaagagctgcgcggagccgtcgccatgagttccgcgatattcacagcactcggcatcgtgatggggcaggtcgttggcctgcgagagctactgggtgggccacaggcctggcctctgctgctcgcttcctgcctggttcctggcgccctccagctggcctcattaccccttctccctgagagtcctagatatctgttgatcgactgcggtgacactgaggcttgtctcgccgctctaagacggctgcgggggtcgggagatttggctggagagctcgaggagctggaggaagagcgcgctgcctgtcagggatgcagagcccgccggccctgggagttgtttcaacacagggctctgaggcgacaggttacttccttggttgtcttagggtctgctatggaactctgcggcaacgactctgtctatgcttatgcgagctctgtgtttcgcaaggctggggtgcccgaagcaaaaatccaatacgcaattatcgggaccggttcatgcgaactcctgaccgcggtggtctcttgcgtggtcatcgagagagtggggaggagagtcctcttgatcgggggatattccctgatgacgtgctggggttcgatctttacagtggctctctgcctgcaaagttcctttccatggaccctctatctagcgatggcgtgcattttcgcctttatcctgagttttggaataggtccggcaggggtaaccgggatcctagccactgagctgttcgatcaaatggccaggcctgccgcatgcatggtttgcggtgcactgatgtggatcatgctcattctggtcggattggggtttccctttattatggaggccctgagccactttctttatgtcccctttcttggagtctgcgtgtgcggcgccatctatacaggactgtttctgccggaaacaaagggtaagacattccaagaaatctccaaagaactacacagactgaatttccctagaagggctcaagggcccacctggcgcagcctcgaggtaatccagtcgacggaactgtag

SEQ ID NO: 28192 - DNA, 1500 bp, Artificial Sequence
  derived and/or modified sequence
atgctgcacgccctgctgcggagcaggatgatccagggccgcatcctgctgctgaccatctgtgccgccggcattggaggcaccttccagtttggctacaacctgagcatcatcaatgcccccaccctgcacatccaggagttcaccaatgagacctggcaggccaggactggagagcccctgcctgaccacctggtgctgctgatgtggagcctgattgtgtccctgtaccccctgggcggcctgtttggagccctgctggccggccccctggccatcaccctgggcaggaagaagagcctgctggtgaacaacatctttgtggtgtctgctgccatcctgtttggcttcagcaggaaggccggcagctttgagatgatcatgctgggccgcctgctggtgggcgtgaatgctggggtgtccatgaacatccagcccatgtacctgggggagagcgcccccaaggagctgcggggagctgtggccatgagcagcgccatcttcaccgccctgggcatcgtgatgggccaggtggtgggcctgcgggagctgctgggcggcccccaggcctggcccctgctgctggccagctgcctggtgcctggggccctgcagctggccagcctgcccctgctgcctgagagcccccgctacctgctgattgactgtggggacacagaggcctgcctggccgccctgcggcggctgcggggcagcggggacctggccggggagctggaggagctggaggaggagcgggccgcctgccagggctgccgggcccggcggccctgggagctgttccagcaccgggccctgcggcggcaggtgaccagcctggtggtgctgggcagcgccatggagctgtgtggaaatgacagcgtgtatgcctatgccagctctgtgttcaggaaggccggcgtgcctgaggccaagatccagtatgccatcatcggcaccggcagctgtgagctgctgacagctgtggtgtcctgtgtggtgattgagcgggtgggccggcgggtgctgctgattggaggctacagcctgatgacctgctggggcagcatcttcaccgtggccctgtgcctgcagagcagcttcccctggaccctgtacctggccatggcctgcatctttgccttcatcctgagctttggcatcggccctgctggggtgacaggcatcctggccacagagctgtttgaccagatggcccggcctgctgcctgcatggtgtgtggggccctgatgtggatcatgctgatcctggtgggcctgggcttccccttcatcatggaggccctgagccacttcctgtatgtgcccttcctgggcgtgtgtgtgtgtggggccatctacacaggcctcttcctgcctgagaccaagggcaagaccttccaggagatcagcaaggagctgcaccggctgaacttcccccggcgggcccagggccccacctggaggagcctggaggtgatccagagcacagagctgtag

SEQ ID NO: 28193 - DNA, 1491 bp, Artificial Sequence
  derived and/or modified sequence
atgagggccctgcggcggctcatccagggccgcatcctgctgctgaccatctgtgccgccggcatcggcggcaccttccagtttggctacaacctgagcatcatcaatgcccccaccctgcacatccaggagttcaccaatgagacctggcaggccaggactggagagcccctgcctgaccacctggtgctgctgatgtggagcctcatcgtgtccctgtaccccctgggcggcctgtttggagccctgctggccggccccctggccatcaccctgggcaggaagaagagcctgctggtgaacaacatctttgtggtgtctgctgccatcctgtttggcttcagcaggaaggccggcagctttgagatgatcatgctgggccgcctgctggtgggcgtgaatgccggcgtgtccatgaacatccagcccatgtacctgggggagagcgcccccaaggagctgcggggagctgtggccatgagcagcgccatcttcaccgccctgggcatcgtgatgggccaggtggtgggcctgcgggagctgctgggcggcccccaggcctggcccctgctgctggccagctgcctggtgcctggggccctgcagctggccagcctgcccctgctgcctgagagcccccgctacctgctgattgactgtggggacacagaggcctgcctggccgccctgcggcggctgcggggcagcggggacctggccggggagctggaggagctggaggaggagagagctgcctgccagggctgccgggcccggcggccctgggagctgttccagcaccgggccctgcggcggcaggtgaccagcctggtggtgctgggcagcgccatggagctgtgtggaaatgattctgtgtatgcctatgccagcagcgtcttcaggaaggccggcgtgcctgaggccaagatccagtatgccatcattggaacaggcagctgtgagctgctgacagctgtggtgtcctgtgtggtgattgaaagagtgggcagaagagtgctgctgattggaggctacagcctgatgacctgctggggcagcatcttcaccgtggccctgtgcctgcagagcagcttcccctggaccctgtacctggccatggcctgcatctttgccttcatcctgagctttggaattggccctgctggggtgacaggcatcctggccacagagctgtttgaccagatggcccggcctgctgcctgcatggtgtgtggggccctgatgtggatcatgctgatcctggtgggcctgggcttccccttcatcatggaggccctgagccacttcctgtatgtgcccttcctgggcgtgtgtgtgtgtggggccatctacacaggcctcttcctgcctgagaccaagggcaagaccttccaggagatcagcaaggagctgcaccggctgaacttcccccggcgggcccagggccccacctggaggagcctggaggtgatccagagcacagagctgtag

SEQ ID NO: 28194 - DNA, 1500 bp, Artificial Sequence
  derived and/or modified sequence
atgctgcacgccctgctgcggagccggatgatccagggccggatcctacttttgaccatctgtgccgccgggataggagggactttccaattcgggtataacctgtccatcattaacgcgcccaccctccatattcaagaattcacaaatgagacctggcaggcccgcactggggaaccactccccgatcacctggtgctccttatgtggtccttaattgtgagtctttaccccttgggggggctctttggggcgctgttagccggtccattggctattacgctcggacgcaaaaaaagtctgcttgttaataatattttcgtcgtttctgcggccattctttttggattcagccggaaggccgggagtttcgagatgatcatgcttggcagattgcttgtgggggtcaatgccggggtgtctatgaatattcagcctatgtaccttggggagtctgccccaaaggagttaagaggcgcagtcgcaatgtcctctgccatcttcacagcattggggattgtgatgggccaggtggttggccttcgagagctgcttgggggcccgcaggcgtggcctctgctgttagcatcatgcctcgtccccggggcgctccaactcgcatcattgcccctgctccccgagagtcctcgctatctcctaatagattgtggagatactgaggcgtgtctcgccgcccttaggcggcttcgagggtcgggggacttggctggggaactcgaggagcttgaggaagaacgcgccgcttgccagggatgtagggcacgcaggccttgggaattgtttcagcatagagcacttagaaggcaagtcacgagcttagtcgtgctggggagcgcaatggagctgtgcggaaatgactctgtgtatgcctatgcctccagcgtgttcaggaaagcgggcgtcccggaggcaaaaatacagtacgcaattatcggcaccggctcatgcgagctcttgactgcggtggtgagctgcgtggtgattgaacgagtcggaagacgcgttctgctgatcggcggctattcacttatgacctgttggggttccatcttcacggtggccctgtgcttgcaaagctcgttcccatggactctctacctggcaatggcatgcatcttcgccttcatactgtccttcggaataggtcccgcgggcgtgacaggaattctggccacagaactcttcgatcagatggcacgccctgcagcttgtatggtatgtggggcgctgatgtggatcatgctgattctggtgggtctgggcttccctttcatcatggaggctttgtctcactttttgtacgtacctttccttggagtctgcgtgtgtggagccatctataccggcctgttcctgcctgagaccaaaggtaagacatttcaagagatttctaaggaactgcatcggttgaactttccccgccgcgctcagggaccgacgtggcgcagcctcgaggtgattcagagcaccgagctttag

SEQ ID NO: 28195 - DNA, 1491 bp, Artificial Sequence
  derived and/or modified sequence
atgcgggccctgcggcggctgatccagggccggatcctgctgctgacaatatgtgccgcaggcattggaggtacctttcagtttgggtacaacctatccatcatcaacgcacccacgctacatatccaggagtttacgaatgaaacgtggcaggctaggaccggtgaaccattacctgatcaccttgtcctgcttatgtggagcttgatcgtgagtctatatccactggggggcctgttcggagcactcctggctggccctcttgctattaccctgggccggaaaaaaagccttttggtgaataatatctttgttgtttctgcagctatcttgttcgggttctctcgcaaagcaggttcttttgagatgatcatgctcggccgtctgctggtgggggttaacgccggcgtgagtatgaacatccagcccatgtacctcggcgaatctgcccctaaagagctgcgcggggctgttgcgatgtcaagcgcgattttcacagccctcggaatagtgatgggccaggtggttgggctaagggagctcctgggcggaccccaggcttggcccttactgctggcctcctgcctggtgcccggcgccctgcagttggctagtcttcctcttttgcctgaatcaccacgctacctgctaatcgattgcggagacactgaagcttgcttggccgccttacggcggctgagagggtcaggcgatttagcgggcgaacttgaggaattggaagaggaaagagcggcttgccaggggtgtagggccagacggccgtgggagctgtttcagcacagggccctgaggcgtcaggttacaagtttggtagtgcttggaagtgccatggaactctgcggaaacgattctgtgtacgcctacgcatcttccgtgttccggaaagccggagttcctgaggccaaaattcagtatgcgattatcggcactggcagctgcgaactcctgacagctgtcgtgtcttgcgtggttattgaacgcgtgggccggagggttctgctgattggcggctactcactgatgacctgctggggcagcatttttactgtagccctttgtttacagagcagcttcccatggacactttatctagctatggcctgtatattcgcctttatcctatcctttggaattggtcccgctggcgtcacaggcatcctggccacagagttgtttgatcagatggctaggcctgccgcctgcatggtctgcggcgcactgatgtggattatgcttattctcgtggggctgggattcccctttatcatggaggccctttcccacttcctgtatgtgcccttcctgggcgtgtgtgtgtgcggagccatctacacgggcctctttctcccagaaacgaaggggaagacctttcaggagatcagcaaggagctgcatcgactgaatttcccccgacgggcccagggaccaacatggcggtctctggaggtgatccaatccaccgaattgtag

SEQ ID NO: 28196 - DNA, 1500 bp, Artificial Sequence
  derived and/or modified sequence
atgctccacgccctgctaaggagccgcatgatccaaggccgtatcctcctgctgacgatatgtgccgctgggataggtggcacattccagtttggttacaatttatctattatcaacgcccctacacttcatattcaggaatttaccaacgaaacttggcaggccaggacaggagagcccctcccagaccatcttgtactgcttatgtggagcctgatagttagtttgtatccactgggaggactgttcggggctctgctcgctggaccactggctatcactctgggtcggaagaagtcactgttagtgaataacatatttgtcgtttcagcggctatcctctttggattctccaggaaggccggatcattcgaaatgatcatgctcgggaggctccttgtcggagttaacgctggagtgtcaatgaatattcaacccatgtatttaggggaatcagccccaaaagaattacgcggagccgtggcaatgagctctgccatctttacggccctgggcatagtgatgggccaagtggttgggcttcgcgaactcctggggggtcctcaggcatggcccttattgctggcaagctgtttagtgccaggtgcgcttcagctcgcctcgctcccacttcttccggagtcaccacggtatctgctgatcgactgtggcgacaccgaagcctgtctggctgccctccgcagactcagaggctcgggtgacctggccggtgagctagaagagttggaggaagagagagctgcatgtcagggttgccgcgcacggaggccttgggagctgttccagcacagagcactcagacgacaggtgacaagcttggtggtcctcgggtccgctatggaactctgtggaaatgactccgtgtacgcatatgcctctagtgtgttccgaaaagccggtgttccagaggccaagattcagtatgcgatcatcggcaccgggtcatgcgaactgctgacggcagtagtctcatgtgtggtgattgagagagttgggaggagagtgcttctcattggaggctactcgttgatgacatgttgggggagcatttttacagtcgccctttgtctgcagtctagcttcccatggaccctgtacctcgctatggcctgcattttcgcgttcattctgtcatttgggatcggcccagcaggggtcacgggcatcttggctaccgagctgtttgatcagatggctaggccggctgcctgcatggtgtgcggtgcgctgatgtggattatgctgatcctcgtgggtctgggctttccatttattatggaagcacttagtcactttctttacgtaccattcctcggggtttgcgtgtgcggggcaatctacacaggattgtttctaccagagaccaagggcaaaacttttcaagagattagtaaggagctgcatcggctgaactttcccaggcgggctcaaggaccaacttggcggagcttggaggtaatccagtcgacggagctgtag

SEQ ID NO: 28197 - DNA, 1491 bp, Artificial Sequence
  derived and/or modified sequence
atgagagcacttagaaggctgattcagggcagaatcttactactgacaatttgtgcagcaggaatcgggggtacctttcagtttggatataatttgtctattatcaacgctccgacactccatatacaagagttcaccaatgaaacctggcaagccagaaccggcgaacctctacctgatcatctcgtactcctgatgtggtctctgatagtgtccctgtacccgctcgggggactctttggagccctcttggcagggccactcgcgattacattgggaaggaaaaagagtctgctggtgaacaatatatttgtggtgtcagcagccattctgttcggattctcccggaaggctggatcgttcgagatgataatgttgggcaggttgctggtgggcgttaatgccggagtttccatgaatattcagccgatgtatcttggcgagtcagcccctaaggagctgcgaggagcagtggcgatgagttctgccatttttactgccctgggaattgtgatgggtcaggttgttggccttcgagagctgcttggcggacctcaggcttggccactgctgcttgccagctgcctggtgcctggggctttgcaactggcctctctaccccttttgcctgagtctcccagatatttactgattgattgtggcgatacagaggcctgcctggccgcactgcgacgactccgcggatccggagatttagccggagagctggaggaattggaggaggagcgagctgcgtgccagggatgccgtgccagacggccttgggaactgtttcagcaccgcgctctacgtaggcaagtcacaagccttgtcgtgctgggcagcgcaatggagttatgcgggaacgacagtgtgtatgcttacgcttcttctgtttttcgcaaggctggcgttcccgaggccaagattcagtatgctattataggaaccggcagctgcgaactgctcaccgccgtggtatcctgtgtcgtcattgagcgagtgggcaggcgcgtgctcttgattggcggttactcactcatgacctgctggggctccatcttcaccgtagcactctgcttacagtcttctttcccatggaccttatacctggctatggcctgcatcttcgcttttattctcagtttcggaatcggacctgcaggggtcacgggaatcctggctacagaactcttcgatcagatggcgaggcccgctgcctgtatggtctgcggagccttgatgtggatcatgctgatcctagtgggtctggggttcccctttataatggaggctctgtctcatttcctgtatgtcccatttctaggggtgtgcgtatgcggtgccatctacactggcctctttctacctgaaaccaaagggaaaactttccaagagatctcaaaagagctccatcgtcttaattttccaagacgagcgcagggccctacatggaggagcctcgaggtgattcagagtaccgagctctag

SEQ ID NO: 28198 - DNA, 1555 bp, Artificial Sequence
  derived and/or modified sequence
tgggacagcaagacctccgctcaggcccctctttcgaatgctccacgccctcctgcgatctagaatgattcagggcaggatcctgctcctgaccatctgcgctgccggcattggtgggacttttcagtttggctataacctctctatcatcaatgccccgaccttgcacattcaggaattcaccaatgagacatggcaggcgcgtactggagagccactgcccgatcacctagtcctgcttatgtggtccctcatcgtgtctctgtatcccctgggaggcctctttggagcactgcttgcaggtcccttggccatcacgctgggaaggaagaagtccctcctggtgaataacatctttgtggtgtcagcagcaatcctgtttggattcagccgcaaagcaggctcctttgagatgatcatgctgggaagactgctcgtgggagtcaatgcaggtgtgagcatgaacatccagcccatgtacctgggggagagcgcccctaaggagctccgaggagctgtggccatgagctcagccatctttacggctctggggatcgtgatgggacaggtggtcggactcagggagctcctaggtggccctcaggcctggcccctgctgctggccagctgcctggtgcccggggcgctccagctcgcctccctgcctctgctccctgaaagcccgcgctacctcctcattgactgtggagacaccgaggcctgcctggcagcactacggcggctccggggctccggggacttggcaggggagctggaggagctggaggaggagcgcgctgcctgccagggctgccgtgcccggcgcccatgggagctgttccagcatcgggccctgaggagacaggtgacaagcctcgtggttctgggcagtgccatggagctctgcgggaatgactcggtgtacgcctacgcctcctccgtgttccggaaggcaggagtgccggaagcgaagatccagtacgcgatcatcgggactgggagctgcgagctgctcacggcggttgttagttgtgtggtaatcgagagggtgggtcggcgcgtgctgctcatcggtgggtacagcctgatgacctgctgggggagcatcttcactgtggccctgtgcctgcagagctccttcccctggacactctacctggccatggcctgcatctttgccttcatcctcagctttggcattggccctgccggagtgacggggatcctggccacagagctgtttgaccagatggccaggcctgctgcctgcatggtctgcggggcgctcatgtggatcatgctcatcctggtcggcctgggatttccctttatcatggaggccttgtcccacttcctctatgtccctttccttggtgtctgtgtctgtggggccatctacactggcctgttccttcctgagaccaaaggcaagaccttccaagagatctccaaggaattacacagactcaacttccccaggcgggcccagggccccacgtggaggagcctggaggttatccagtcaacagaactctagtcccaaaggggtggccag

SEQ ID NO: 28199 - DNA, 2446 bp, Artificial Sequence
  derived and/or modified sequence
ctatgtttctgtgaccacaaatagcatctttggcaagtctagtttcagttggtctttgtccagctcctggattcctccatgcagggcctgagaagccctgagggataaaagattaatccggttcagtggactctgtggttcctcaactccaagtgcccccagcataagtcggacctgcctctcacgcaatggatcccctggcggcaacccgagaccggttctcctacccgcattccgccaagtctctcgctctgcccaggacgcacagatgagagcgctccgaagactgattcagggcaggatcctgctcctgaccatctgcgctgccggcattggtgggacttttcagtttggctataacctctctatcatcaatgccccgaccttgcacattcaggaattcaccaatgagacatggcaggcgcgtactggagagccactgcccgatcacctagtcctgcttatgtggtccctcatcgtgtctctgtatcccctgggaggcctctttggagcactgcttgcaggtcccttggccatcacgctgggaaggaagaagtccctcctggtgaataacatctttgtggtgtcagcagcaatcctgtttggattcagccgcaaagcaggctcctttgagatgatcatgctgggaagactgctcgtgggagtcaatgcaggtgtgagcatgaacatccagcccatgtacctgggggagagcgcccctaaggagctccgaggagctgtggccatgagctcagccatctttacggctctggggatcgtgatgggacaggtggtcggactcagggagctcctaggtggccctcaggcctggcccctgctgctggccagctgcctggtgcccggggcgctccagctcgcctccctgcctctgctccctgaaagcccgcgctacctcctcattgactgtggagacaccgaggcctgcctggcagcactacggcggctccggggctccggggacttggcaggggagctggaggagctggaggaggagcgcgctgcctgccagggctgccgtgcccggcgcccatgggagctgttccagcatcgggccctgaggagacaggtgacaagcctcgtggttctgggcagtgccatggagctctgcgggaatgactcggtgtacgcctacgcctcctccgtgttccggaaggcaggagtgccggaagcgaagatccagtacgcgatcatcgggactgggagctgcgagctgctcacggcggttgttagttgtgtggtaatcgagagggtgggtcggcgcgtgctgctcatcggtgggtacagcctgatgacctgctgggggagcatcttcactgtggccctgtgcctgcagagctccttcccctggacactctacctggccatggcctgcatctttgccttcatcctcagctttggcattggccctgccggagtgacggggatcctggccacagagctgtttgaccagatggccaggcctgctgcctgcatggtctgcggggcgctcatgtggatcatgctcatcctggtcggcctgggatttccctttatcatggaggccttgtcccacttcctctatgtccctttccttggtgtctgtgtctgtggggccatctacactggcctgttccttcctgagaccaaaggcaagaccttccaagagatctccaaggaattacacagactcaacttccccaggcgggcccagggccccacgtggaggagcctggaggttatccagtcaacagaactctagtcccaaaggggtggccagagccaaagccagctactgtcctgtcctctgcttcctgccagggccctggtcctcactccctcctgcattcctcatttaaggagtgtttattgagcaccctttgtgtgcagacatggctccaggtgcttagcaatcaatggtgagcgtggtattccaggctaaaggtaattaactgacagaaaatcagtaacaacataattacaggctggttgtggcagctcatgactgtaatcccagcactttgggaggccaaggtgggaggatcaattgaggccagagtttgaaaccagcctaggtaacatagtgagaccccctatctctacaaaaaattttaaacattagctgggcatggtggtatgtgctaacagctctagctactcaggaggctgaggcagcaggatcacttgagtccaagagttcaaggtagcagtaagctacaatcacaccactgcatgccagactgggtgacagagggagacttcatctctttaaaacataataataataattacagactcaggaaatgcagtgaaagaaaaatacaggttggccaggtgaggtggctgatgcctgtaatcccagcactttgggaggccaagatgggaagattgctttgagaccagaagtttgagaccagcctgggccacatagtaagatcctgtttctacc

SEQ ID NO: 28200 - protein, 477 aa, Artificial Sequence
  derived and/or modified sequence
MEAVELARKLQEEATCSICLDYFTDPVMTTCGHNFCRACIQLSWEKARGKKGRRKRKGSFPCPECREMSPQRNLLPNRLLTKVAEMAQQHPGLQKQDLCQEHHEPLKLFCQKDQSPICVVCRESREHRLHRVLPAEEAVQGYKLKLEEDMEYLREQITRTGNLQAREEQSLAEWQGKVKERRERIVLEFEKMNLYLVEEEQRLLQALETEEEETASRLRESVACLDRQGHSLELLLLQLEERSTQGPLQMLQDMKEPLSRKNNVSVQCPEVAPPTRPRTVCRVPGQIEVLRGFLEDVVPDATSAYPYLLLYESRQRRYLGSSPEGSGFCSKDRFVAYPCAVGQTAFSSGRHYWEVGMNITGDALWALGVCRDNVSRKDRVPKCPENGFWVVQLSKGTKYLSTFSALTPVMLMEPPSHMGIFLDFEAGEVSFYSVSDGSHLHTYSQATFPGPLQPFFCLGAPKSGQMVISTVTMWVKG

SEQ ID NO: 28201 - protein, 175 aa, Artificial Sequence
  derived and/or modified sequence
MEAVELARKLQEEATCSICLDYFTDPVMTTCGHNFCRACIQLSWEKARGKKGRRKRKGSFPCPECREMSPQRNLLPNRLLTKVAEMAQQHPGLQKQDLCQEHHEPLKLFCQKDQSPICVVCRESREHRLHRVLPAEEAVQGYKLKLEEDMEYLREQITRTGNLQAREEQSLAEWQ

SEQ ID NO: 28202 - DNA, 2085 bp, Artificial Sequence
  derived and/or modified sequence
accacatcctccccaccgcccagtcagcacccgctgcgcctgtccccggctcgtccagagccttccaccccctgccgccttccttccccaagccacccccaacctctcctaagaggcgccgccccagtcccggccgccgaacactccctcgcccagcattcccctcccccgccgccccccagcccccgctgacgccacaaagtccctaggcctcccgaccccaggtccccacgccccgggccgggccgcagcctcctgggcttcgtgggggcagacccagcctttcccggcagcgagcgctcggccaggtgcactaggcgctgtgcgggccccccttccccgcgagtccctcaagcgggaacctgcctcgtgtctcccaggagccatggaggctgtggaactcgccagaaaactgcaggaggaagctacgtgctccatctgtctggattacttcacagaccctgtgatgaccacctgtggccacaacttctgccgagcctgcatccagctgagctgggaaaaggcgaggggcaagaaggggaggcggaagcggaagggctccttcccctgccccgagtgcagagagatgtccccgcagaggaacctgctgcccaaccggctgctgaccaaggtggccgagatggcgcagcagcatcctggtctgcagaagcaagacctgtgccaggagcaccacgagcccctcaagcttttctgccagaaggaccagagccccatctgtgtggtgtgcagggagtcccgggagcaccggctgcacagggtgctgcccgccgaggaggcagtgcaggggtacaagttgaagctggaggaggacatggagtaccttcgggagcagatcaccaggacagggaatctgcaggccagggaggagcagagcttagccgagtggcagggcaaggtgaaggagcggagagaacgcattgtgctggagtttgagaagatgaacctctacctggtggaagaagagcagaggctcctccaggctctggagacggaagaagaggagactgccagcaggctccgggagagcgtggcctgcctggaccggcagggtcactctctggagctgctgctgctgcagctggaggagcggagcacacaggggcccctccagatgctgcaggacatgaaggaacccctgagcaggaagaacaacgtgagtgtgcagtgcccagaggttgcccccccaaccagacccaggactgtgtgcagagttcccggacagattgaagtgctaagaggctttctagaggatgtggtgcctgatgccacctccgcgtacccctacctcctcctgtatgagagccgccagaggcgctacctcggctcttcgccggagggcagtgggttctgcagcaaggaccgatttgtggcttacccctgtgctgtgggccagacggccttctcctctgggaggcactactgggaggtgggcatgaacatcaccggggacgcgttgtgggccctgggtgtgtgcagggacaacgtgagccggaaagacagggtccccaagtgccccgaaaacggcttctgggtggtgcagctgtccaaggggaccaagtacttatccaccttctctgccctaaccccggtcatgctgatggagcctcccagccacatgggcatcttcctggacttcgaagccggggaagtgtccttctacagtgtaagcgatgggtcccacctgcacacctactcccaggccaccttcccaggccccctgcagcctttcttctgcctgggggctccgaagtctggtcagatggtcatctccacagtgaccatgtgggtgaaaggatagacacagaccgggggactcgggcactgctcctggctctgcagaaggtgtgggccttctgcttactgcaggccacctgccagggttctctggcatcacgctggcagccattagacacacaggggggtttctcaaattctaaatataattgtgattagaactgtcaaacattaagagggtatactgacagatgcttcctagaggaaacttttgaaagcccctgcgttctgagtggaccgatttctaaatccatacctacacaccaggaa

SEQ ID NO: 28203 - DNA, 1434 bp, Artificial Sequence
  derived and/or modified sequence
atggaggccgtggagctggccagaaagctgcaggaggaggccacctgcagcatctgcctggactacttcaccgaccccgtgatgaccacctgcggccacaacttctgcagagcctgcatccagctgagctgggagaaggccagaggcaagaagggcagaagaaagagaaagggcagcttcccctgccccgagtgcagagagatgagcccccagagaaacctgctgcccaacagactgctgaccaaggtggccgagatggcccagcagcaccccggcctgcagaagcaggacctgtgccaggagcaccacgagcccctgaagctgttctgccagaaggaccagagccccatctgcgtggtgtgcagagagagcagagagcacagactgcacagagtgctgcccgccgaggaggccgtgcagggctacaagctgaagctggaggaggacatggagtacctgagagagcagatcaccagaaccggcaacctgcaggccagagaggagcagagcctggccgagtggcagggcaaggtgaaggagagaagagagagaatcgtgctggagttcgagaagatgaacctgtacctggtggaggaggagcagagactgctgcaggccctggagaccgaggaggaggagaccgccagcagactgagagagagcgtggcctgcctggacagacagggccacagcctggagctgctgctgctgcagctggaggagagaagcacccagggccccctgcagatgctgcaggacatgaaggagcccctgagcagaaagaacaacgtgagcgtgcagtgccccgaggtggccccccccaccagacccagaaccgtgtgcagagtgcccggccagatcgaggtgctgagaggcttcctggaggacgtggtgcccgacgccaccagcgcctacccctacctgctgctgtacgagagcagacagagaagatacctgggcagcagccccgagggcagcggcttctgcagcaaggacagattcgtggcctacccctgcgccgtgggccagaccgccttcagcagcggcagacactactgggaggtgggcatgaacatcaccggcgacgccctgtgggccctgggcgtgtgcagagacaacgtgagcagaaaggacagagtgcccaagtgccccgagaacggcttctgggtggtgcagctgagcaagggcaccaagtacctgagcaccttcagcgccctgacccccgtgatgctgatggagccccccagccacatgggcatcttcctggacttcgaggccggcgaggtgagcttctacagcgtgagcgacggcagccacctgcacacctacagccaggccaccttccccggccccctgcagcccttcttctgcctgggcgcccccaagagcggccagatggtgatcagcaccgtgaccatgtgggtgaagggctag

SEQ ID NO: 28204 - DNA, 1434 bp, Artificial Sequence
  derived and/or modified sequence
atggaggctgttgaactagccaggaaacttcaggaggaggcaacttgtagtatctgcctggattacttcactgaccctgtcatgacaacttgcggtcacaacttttgcagagcctgcatacagttgtcctgggagaaagcaaggggaaagaaagggcgacgcaaaagaaagggttcctttccctgcccagagtgccgagaaatgtcaccacaaaggaatcttttgcctaaccgtctgctcacaaaggttgccgagatggctcagcagcatcctgggctgcagaagcaggacctatgccaggagcaccatgagcctctcaaactgttctgtcaaaaagaccagagcccaatctgcgtagtttgcagggagtcccgcgaacacagactgcaccgcgtcctgcccgccgaggaggccgttcagggctataaactgaaattggaggaagacatggagtacctacgcgaacagattaccaggaccggcaacctgcaagcaagagaagagcagagcctcgccgaatggcaggggaaggtcaaagaaagaagagagcgcatagtactggagttcgagaaaatgaatctctatcttgtggaggaggagcagaggctgttgcaagccctagagactgaggaggaggagacagcaagtcggctgcgcgaaagtgtcgcctgtctggatcggcagggccactctctagagttactcctgctgcagctcgaggagcgcagcacgcaagggcccctgcagatgctgcaggacatgaaggagccactctcacgaaagaacaatgttagtgtgcagtgcccggaggttgcaccccccaccagacctcgcactgtttgccgcgtgcctggccaaatcgaggttttgaggggctttctagaggatgtggtccctgacgccactagtgcatacccataccttctgctgtatgaaagtaggcaaagacgttacttaggttcctcacccgagggcagcgggttttgcagtaaggataggtttgtggcctacccttgtgccgtcgggcagacagcttttagcagcggccgccattactgggaagtgggtatgaacatcacaggagacgccctttgggccctgggagtctgtcgggataacgtcagccgcaaggaccgagtcccgaagtgtccagagaatgggttctgggtagtccagctcagtaagggcaccaagtacctgagcacattctctgctttgacccctgtcatgttaatggagccaccctcccacatgggaattttcctcgacttcgaagcaggcgaggtgtcattttactccgtcagcgatggatcccatcttcacacatattctcaggcaaccttccctgggcctttacaaccattcttctgtctgggggccccgaagtcaggtcagatggtgatcagcactgtcacaatgtgggtgaagggatag

SEQ ID NO: 28205 - DNA, 1434 bp, Artificial Sequence
  derived and/or modified sequence
atggaagccgtggagcttgcgcgcaaactccaggaagaggccacatgcagcatatgcttagattatttcactgacccggtgatgacaacctgtggccacaacttttgccgcgcttgcattcaactaagctgggagaaggctagaggcaagaagggacgaaggaaaagaaagggcagcttcccctgcccagagtgccgggaaatgtccccacagaggaatcttctacccaacagactgctgactaaggtcgctgaaatggcccagcaacaccctgggctccagaaacaggacctgtgccaggagcatcatgagcctctgaagctgttctgccagaaggatcagtcgccgatctgcgtcgtttgccgcgaatctagagaacacaggctgcatagggtgttgccagccgaagaggctgtgcaaggctacaagcttaagctcgaagaagatatggagtacctccgcgaacagatcacacgaaccgggaacctccaagctcgggaggagcagagccttgctgagtggcagggtaaagtgaaggaaagacgtgagcgcattgtactcgagttcgaaaaaatgaacctgtacctcgtcgaagaggagcagcgactcctccaggccctggaaaccgaggaggaggagaccgcctcgcgacttagggaatccgttgcctgtcttgaccggcagggccattcactggagctcctgctgttgcagctagaggagcggtcaacccagggacctctccagatgctgcaggacatgaaggagccactaagtcggaagaataacgtgagcgtccagtgcccagaggtggccccgcccacaaggcccaggaccgtgtgtagagtaccaggccagatagaagtgctccggggatttctggaggacgttgtccccgatgcaacatctgcttatccgtacctgttactctatgaaagccgccagagaagatacttgggctcatcccccgaaggctccggtttttgttctaaagatagattcgtggcctacccttgcgccgtggggcagacagcttttagttcaggtagacactactgggaggtgggcatgaacatcactggcgacgcgctttgggcccttggtgtctgtcgcgataacgtgtccaggaaagatagggttccaaagtgcccagaaaacgggttctgggtagtgcagctgagtaaaggcacaaaatatctgagtactttttccgcactgacacccgtgatgttgatggagcctccctctcatatgggcatcttcctggacttcgaggccggtgaagtatccttttacagcgttagcgacggaagccatcttcacacatatagccaggccacattcccagggcccctccagccgttcttctgccttggcgcacccaaatcggggcaaatggtgatctcaacagtgacaatgtgggttaaggggtag

SEQ ID NO: 28206 - DNA, 1434 bp, Artificial Sequence
  derived and/or modified sequence
atggaagctgtcgagctcgccaggaaactgcaggaagaggccacctgctcgatttgcctcgactattttacggatcccgtgatgactacctgtggccataatttctgtagggcttgcatccaactcagctgggaaaaggcccggggaaagaaggggaggcggaagaggaaaggatctttcccgtgccccgagtgtcgcgagatgtccccccagagaaatttgctgcccaaccgcctcttaactaaagtggccgagatggcacaacagcatccaggtctgcaaaagcaagacttgtgtcaggaacatcacgaacccctgaagctgttttgtcagaaagaccagtcccctatctgcgtcgtttgccgggagtctcgtgagcaccgcctgcaccgcgtgttgccagccgaagaggccgtccagggatataaactgaagctagaggaagacatggagtatctgagggagcagattacccggaccgggaacttgcaagcacgcgaggaacagagcctggctgagtggcaaggcaaagtgaaggagcggagagagcgcatagtgctggagttcgaaaaaatgaatttatacctggtggaggaagagcagagactgctgcaagccctagaaactgaggaggaggagaccgcttcaagactgcgagagtctgtggcttgccttgatcgccagggccacagcctggagttgttactcctccaactagaagagcgctctacccaaggaccccttcagatgctccaagatatgaaggaaccactgtcaagaaagaacaacgtttccgtgcagtgtcctgaagtcgcccccccaaccagacccaggaccgtctgtagggtacctggccagatcgaggtcctccgggggtttctcgaggatgtggtgcccgatgccactagcgcctatccctacctactgctgtacgaaagtcgacagcggcggtatttgggatcaagtcccgagggaagcggtttctgcagcaaagatcgcttcgtagcctacccgtgcgccgtgggccaaactgcgttttccagtggaaggcattactgggaggtgggtatgaatattaccggtgatgccctctgggctctaggtgtgtgtcgggataacgtttccagaaaagatagagttccaaagtgccctgagaatggtttctgggttgtgcaactgtccaagggcacaaagtaccttagcacattctccgccttaacacctgtaatgcttatggagccacctagccatatgggcatcttccttgacttcgaagccggagaggtgagtttttactccgtgagtgacggaagtcatctacacacgtactctcaggcaacctttccaggcccgctgcagccctttttctgcttaggggcaccaaagagtggtcagatggtgatcagcacggtaaccatgtgggtgaaaggatag

SEQ ID NO: 28207 - DNA, 1434 bp, Artificial Sequence
  derived and/or modified sequence
atggaggccgtggagctggccaggaagctgcaggaggaggccacctgcagcatctgcctggactacttcacagatcctgtgatgaccacctgtggccacaacttctgccgggcctgcatccagctgtcctgggagaaggcccggggcaagaagggccgcaggaagaggaagggcagcttcccctgcccagagtgccgggagatgagcccccagaggaacctgctgcccaaccggctgctgaccaaggtggccgagatggcccagcagcaccctggcctgcagaagcaggacctgtgccaggagcaccacgagcccctgaagctgttctgccagaaggaccagagccccatctgtgtggtgtgccgggagagccgggagcaccggctgcaccgggtgctgcctgctgaggaggccgtgcagggctacaagctgaagctggaggaggacatggagtacctgcgggagcagatcaccaggacaggcaacctgcaggcccgggaggagcagagcctggccgagtggcagggcaaggtgaaggagcggcgggagagaattgtgctggagtttgagaagatgaacctgtacctggtggaggaggagcagaggctgctgcaggccctggagacagaggaggaggagacagccagccggctgcgggagagcgtggcctgcctggaccggcagggccacagcctggagctgctgctgctgcagctggaggagaggagcacccagggccccctgcagatgctgcaggacatgaaggagcccctgagcaggaagaacaacgtgtctgtgcagtgcccagaggtggccccacccacccggcccaggacagtgtgccgggtgcccggccagatcgaggtgctgcggggcttcctggaggatgtggtgcctgatgccaccagcgcctacccctacctgctgctgtatgagagccggcagaggcgctacctgggcagcagccctgagggcagcggcttctgcagcaaggacagatttgtggcctacccctgtgctgtgggccagacagccttcagcagcggccgccactactgggaggtgggcatgaacatcactggagatgccctgtgggccctgggcgtgtgccgggacaacgtgtccaggaaggacagagtgcccaagtgcccagaaaatggcttctgggtggtgcagctgagcaagggcaccaagtacctgagcaccttcagcgccctgacccctgtgatgctgatggagccccccagccacatgggcatcttcctggactttgaggccggggaggtgtccttctacagcgtgtctgatggcagccacctgcacacctacagccaggccaccttccctggccccctgcagcccttcttctgcctgggcgcccccaagagcggccagatggtgatcagcacagtgaccatgtgggtgaagggctag

SEQ ID NO: 28208 - DNA, 1434 bp, Artificial Sequence
  derived and/or modified sequence
atggaggccgtggagctggcccggaagctgcaggaggaggccacctgttcaatctgtctcgattactttactgacccagtgatgaccacgtgcgggcacaacttttgtagagcttgcattcaactttcttgggaaaaagcccgcgggaaaaaaggtcgtcggaaacggaagggatcttttccttgccccgaatgtcgtgagatgtctccgcagcgcaacctcctcccaaatagactgttgacaaaggtggcggaaatggctcaacagcatcccggtcttcaaaagcaggacctatgtcaggagcatcatgagccactaaaactcttctgccagaaggaccagtcacccatctgcgtcgtttgtagggaaagcagggagcatcggttacatcgcgtattacctgccgaagaagcagtccaaggttataaactcaagcttgaggaagacatggaatacctgagggagcagattactcgaaccggcaatctgcaggctcgcgaagagcaaagcctggctgaatggcaaggtaaggttaaggaacgaagagagcgaatagtgctagagtttgaaaaaatgaacctgtacctggtcgaggaagaacagagattgttgcaggccttggagacagaggaagaagagacagccagccgtctcagagagtccgtggcttgtctcgataggcaaggacactcattggagctactgttgttgcagttagaggagcggagcacgcagggcccactgcaaatgctccaggatatgaaagaacctcttagcaggaagaataatgttagtgttcagtgtccagaagtcgccccaccaacccggcctcgtaccgtttgccgcgttccagggcagatagaagttttgcggggcttcctcgaggatgtagttcccgatgctacaagtgcttacccctacctcctcctttatgagagccgacagagacgataccttggttcttccccagaaggttctggattttgctctaaggatcgctttgtggcctacccctgcgccgtggggcagactgccttctcatctggtaggcattactgggaggtgggcatgaacattaccggcgacgccctctgggccctaggggtttgtagggacaatgtgtccaggaaagaccgcgttcccaaatgtcccgaaaacggtttctgggtcgttcagctcagtaaaggcaccaagtatctctcaacgttctccgcccttaccccagttatgctgatggaacctccaagccacatgggcatcttccttgatttcgaagcaggcgaggtaagcttctacagtgttagcgatgggtctcatttgcatacctatagccaagccactttccctgggccacttcagcctttcttctgtttaggcgccccaaagtccggtcagatggtgatatccacagtgacgatgtgggtgaaggggtag

SEQ ID NO: 28209 - DNA, 1434 bp, Artificial Sequence
  derived and/or modified sequence
atggaggccgtggagctggcccggaagctgcaggaggaggccacctgttcaatatgtctcgactattttacagaccccgtgatgacaacttgcgggcataacttttgccgtgcatgcattcagctttcctgggaaaaagcccgaggcaagaaaggccggagaaaacgaaagggaagctttccatgtccagaatgcagggagatgagtcctcaaaggaacctgctgcctaatcgcctcctgacaaaagtggcagagatggcacaacagcatcctggtctgcagaaacaagatttgtgtcaagaacatcacgagccattgaagctgttctgccaaaaggaccagtcgcctatttgtgtggtgtgccgcgagagtagagagcaccgccttcatagggtgctgcccgccgaagaagcggtacagggctataaattaaagctagaggaggatatggagtatctgcgggagcagatcacccggacaggcaacctccaggccagggaagaacagtccctagccgagtggcagggaaaagtcaaagaacgtagggaacgtatagtgctggaatttgagaaaatgaatttgtacctggtagaggaggaacagaggctgttgcaggcactcgaaaccgaagaagaggaaactgcttcgcggctacgagagtcagttgcttgtttggatagacagggccactctctcgagctgttgctgctacaactggaggaaagatcgacccagggaccattgcagatgttgcaggatatgaaggagcctctgtctcgtaagaataatgtttccgttcagtgtcctgaagtcgcaccccccactaggcctcgcacggtctgtagggttccaggccagatcgaagtgctgcgtgggtttcttgaggacgtggtgccagacgctacaagtgcgtatccgtacctcctgttatacgagagtcgacaaagacgatacctgggttcctccccagaggggtccggcttctgtagtaaggaccggttcgtggcctacccctgtgctgtaggccaaacggcattcagtagtggcagacactattgggaggtcggtatgaatatcacaggagacgcactgtgggccctgggggtctgccgggacaatgtgtcccgtaaagaccgggtgcccaaatgccccgaaaacggattctgggttgttcaattgagcaaggggaccaagtacctgtcaaccttcagcgcacttacaccagtgatgctcatggaacctcccagccacatgggcatcttcctggatttcgaggccggggaggtgagcttttacagtgtgagcgacggaagccaccttcatacatactctcaagcgactttcccgggtcctctccagcccttcttctgcttaggagcccccaaaagcggacagatggtcattagcactgtgacaatgtgggtgaaaggctag

SEQ ID NO: 28210 - DNA, 1434 bp, Artificial Sequence
  derived and/or modified sequence
atggaggccgtggagctggcccggaagctgcaggaggaggccacctgttcaatatgtttggattatttcactgaccccgtgatgaccacatgcggacataacttctgccgggcttgtattcagctgtcttgggaaaaggctcgcggaaagaaaggacgtagaaaacgcaaagggtcctttccatgccctgaatgccgggagatgtccccgcagcggaacctgctgccaaaccgcttgctcactaaggtggcggagatggctcagcagcaccccggtctccagaagcaggatctctgccaggagcaccacgaacccctcaagcttttctgccagaaagatcagagcccaatctgtgtcgtgtgcagagaatccagagagcataggcttcaccgggtattacccgccgaggaggctgtgcagggctataagctgaaactggaggaggatatggaatacctcagagagcagattacaaggacgggtaaccttcaggccagagaggagcagagtctagccgagtggcaggggaaagtgaaggaacgcagggagaggattgtgctggagttcgagaaaatgaatctgtatcttgtggaggaggagcagcgcctactgcaagccctggagactgaggaagaggagactgcatcccggctgcgtgagtctgttgcatgcctcgatcgacaaggtcattccctagagctgctgctgttacagttggaggagcgatctacacagggcccgctccaaatgctccaggacatgaaagaacccctctccaggaagaacaacgtgtctgtgcagtgccccgaagtggcaccgcccaccaggccacgaaccgtctgccgcgtgccagggcagatcgaggtgctacgcggtttcctcgaagatgttgtgcctgatgctacatccgcctatccatatctcttactctacgagagccgacagcggaggtacctgggaagtagccccgaggggagcggcttttgctcaaaggatcggttcgttgcctacccttgtgcggtaggacagaccgcgttttcctccggacggcattactgggaagtgggcatgaacatcactggagacgctctgtgggccctgggcgtctgtcgagacaacgtctcccggaaggaccgcgtacccaagtgcccagagaatgggttctgggtggtgcagcttagcaaaggtaccaaatatctgtccacgttcagcgccctaacacccgtgatgctgatggaacctccctcccatatgggtatctttctagatttcgaagccggagaggtgtctttttacagcgtatctgacggatcacacctccacacatactcccaggccacatttccaggcccccttcaaccattcttttgcctgggggccccgaaatctggacagatggtcatctctacggtaaccatgtgggtgaaaggatag

SEQ ID NO: 28211 - DNA, 1434 bp, Artificial Sequence
  derived and/or modified sequence
atggaagctgtggagctggctagaaaattacaggaggaagctacctgcagtatctgtctggactattttactgatcccgtgatgaccacctgcggccacaacttctgcagggcatgtatccagttgagctgggaaaaggctcgcggaaagaaggggagacgtaaacgcaagggatccttcccctgtccagaatgtcgggaaatgagtccgcagcgaaacctgctccctaaccgtctgttaacaaaagtagcagagatggctcagcagcaccccggtctccaaaaacaggacctatgtcaggagcaccacgagcctctcaaattattctgccaaaaggaccaatcgccaatctgtgtcgtctgccgcgagtctcgggagcatcgcctgcatagagtgttgcctgctgaagaggcggtccaaggctacaagttgaaacttgaggaggatatggaataccttcgcgaacagattaccagaacgggaaacttgcaggccagagaagagcagtcactggctgagtggcagggcaaagtaaaggagaggcgggagcgaatcgtcctggagttcgagaagatgaacctgtaccttgtcgaggaagagcagaggctgcttcaagctctggagactgaagaagaagaaactgccagccggctcagggagtctgttgcttgtctggaccgccagggccactctctggagctcctgctactgcagcttgaagaacggagcactcagggcccattgcagatgcttcaggatatgaaagagcctttgtccagaaagaacaacgtgagcgtgcagtgcccagaggttgctccccctacccggccaagaacggtgtgccgcgtccccggtcaaatcgaggtcttacgcggatttctggaagatgtggtccctgacgcgacaagtgcctatccatatctcctcctgtatgaatccaggcagagacgctatctcggttcaagtcctgaggggtccggtttctgttcaaaggatagattcgtggcctatccatgcgccgttgggcagactgctttttccagcgggcgacactattgggaagttggaatgaatataaccggtgatgccctgtgggccctgggtgtgtgtagagacaatgtcagtagaaaagatagagtcccgaaatgccccgaaaacggcttctgggtggtgcagctcagcaaaggaacgaaatacctctcaactttcagcgccctcactcccgtgatgctcatggaacctccatcccatatgggtatattcctagattttgaagctggggaggtgtctttttatagcgtgtctgatgggagtcatctacatacgtacagtcaggccacgttcccaggccctcttcagccttttttctgtctgggagccccaaaatccggacagatggtaatctctacagttactatgtgggtgaaaggttag

SEQ ID NO: 28212 - DNA, 1434 bp, Artificial Sequence
  derived and/or modified sequence
atggaagccgtcgagctcgctcggaagctacaagaggaagcgacatgctcaatctgcctcgactatttcaccgacccagttatgaccacgtgcggtcacaacttctgtcgtgcctgcattcagttatcctgggaaaaagcaaggggcaagaaagggcgtcgtaaacggaaaggtagctttccgtgcccagagtgccgagagatgagccctcaacggaatcttctgccgaatagactcctcactaaagtggcggaaatggctcaacaacaccccggactgcagaagcaggacctgtgtcaagagcaccatgagcccctaaagctcttttgccagaaggaccagagccctatctgcgtagtatgtagggagtcccgggagcatcgcctgcatcgggtgcttcccgctgaggaggcagtccaggggtacaaactgaagctggaagaggacatggagtacctgcgcgagcagatcacacggacgggaaaccttcaggcacgggaagaacagagcctcgcggaatggcagggcaaggtcaaggaaaggagggagagaattgtgttagagttcgaaaaaatgaacctgtatctggttgaagaggaacagagattgctccaggcactggaaacagaagaagaggagactgcaagcagactgcgcgagtcagtggcatgtctggacagacaggggcatagtcttgagttgctgctgctgcagttggaagaacgcagtacgcagggacctttgcagatgttgcaggacatgaaagagcccctgagtagaaagaataatgtttccgtccagtgccccgaagtagcaccacctacccgtcctagaacagtttgtcgggtgcctggtcaaattgaggtccttcggggattcttggaggacgtggtgccggacgctaccagtgcctacccatacttgctgctgtatgagtccagacaacgaagatatctgggctcaagccctgaaggctccggcttttgcagcaaggatagatttgttgcctatccatgcgctgtaggtcagacggcattctcaagtgggagacactattgggaagtaggtatgaacattacaggagatgctctatgggctctcggggtttgtcgagacaacgtgtctcggaaggacagggtccctaaatgtcccgagaacggcttctgggtggtgcagctgtctaaggggaccaagtacctttcaaccttctccgcactcacccccgtgatgcttatggaacccccaagccacatgggcatcttcctggactttgaagctggtgaagtttcgttctactcagtcagcgacggaagccacctccatacctacagtcaggctacttttcccggtcccttacaacccttcttctgcctaggggcacccaagtcggggcagatggttatttcaacagtgaccatgtgggtgaaaggatag

SEQ ID NO: 28213 - DNA, 1434 bp, Artificial Sequence
  derived and/or modified sequence
atggaagccgttgaactggcacgcaaactgcaggaggaagcaacttgcagcatttgcttagactatttcaccgaccccgtgatgaccacttgtgggcataatttctgcagggcatgcatccagttgtcatgggagaaagcccgaggaaagaagggcagacggaagcgaaaggggtcttttccttgccctgagtgcagagagatgagtccccagaggaacctgttgccgaaccggcttcttacaaaagtggcagaaatggcccagcagcaccctggtctacagaaacaggatttgtgtcaggaacaccatgagcctctgaaactcttctgccaaaaggaccagtcgcctatttgtgtggtctgtcgtgagagtcgcgaacatcgattacaccgggtcctgccagccgaagaagccgtccagggctataaactgaaactggaggaggatatggagtaccttcgcgagcagattacacgcaccgggaacctgcaggcgcgagaggagcagagtttggccgagtggcaggggaaagtgaaggaacgcagggagaggatcgttctggagtttgagaaaatgaacctgtacctagttgaggaagaacaacggctgctgcaggccttagagactgaagaggaagaaactgcaagtagactgagggaatcagttgcatgtctagaccgccagggacattcgctggagcttctcctgctgcagttggaagagagatccacccagggacctctgcaaatgcttcaggacatgaaggaacctctttccagaaagaacaatgtgagtgtccagtgccctgaggtcgcacctccaacgaggccacggaccgtgtgtagagtgcccggacagattgaagtacttcggggttttttagaggacgtcgtcccagatgccacatccgcctacccttatctcctgctctacgaaagccggcagcggaggtatctgggatcgtcaccggagggctccggattctgctccaaggacaggtttgtagcttacccctgcgcagtgggccagacagccttctcttcaggccgtcactactgggaagtcggcatgaatatcacaggggatgctctctgggctctcggcgtgtgccgcgataacgtaagtcggaaagatagggtgcccaagtgtcccgagaatggcttttgggtggtacaactgtcaaaaggtacgaaatatttaagtacattttctgcactgactcctgtcatgttaatggaacctcctagccatatgggaatatttctcgactttgaggctggggaagtgtctttctactcagtatcggacgggtcccatctgcacacgtacagtcaggctacatttcctgggccactgcaaccatttttttgtctcggcgctcctaagtccggccagatggtcatttccacagtgacaatgtgggtgaagggttag

SEQ ID NO: 28214 - DNA, 1730 bp, Artificial Sequence
  derived and/or modified sequence
ccccaggtccccacgccccgggccgggccgcagcctcctgggcttcgtgggggcagacccagcctttcccggcagcgagcgctcggccaggtgcactaggcgctgtgcgggccccccttccccgcggagccatggaggctgtggaactcgccagaaaactgcaggaggaagctacgtgctccatctgtctggattacttcacagaccctgtgatgaccacctgtggccacaacttctgccgagcctgcatccagctgagctgggaaaaggcgaggggcaagaaggggaggcggaagcggaagggctccttcccctgccccgagtgcagagagatgtccccgcagaggaacctgctgcccaaccggctgctgaccaaggtggccgagatggcgcagcagcatcctggtctgcagaagcaagacctgtgccaggagcaccacgagcccctcaagcttttctgccagaaggaccagagccccatctgtgtggtgtgcagggagtcccgggagcaccggctgcacagggtgctgcccgccgaggaggcagtgcaggggtacaagttgaagctggaggaggacatggagtaccttcgggagcagatcaccaggacagggaatctgcaggccagggaggagcagagcttagccgagtggcagggcaaggtgaaggagcggagagaacgcattgtgctggagtttgagaagatgaacctctacctggtggaagaagagcagaggctcctccaggctctggagacggaagaagaggagactgccagcaggctccgggagagcgtggcctgcctggaccggcagggtcactctctggagctgctgctgctgcagctggaggagcggagcacacaggggcccctccagatgctgcaggacatgaaggaacccctgagcaggaagaacaacgtgagtgtgcagtgcccagaggttgcccccccaaccagacccaggactgtgtgcagagttcccggacagattgaagtgctaagaggctttctagaggatgtggtgcctgatgccacctccgcgtacccctacctcctcctgtatgagagccgccagaggcgctacctcggctcttcgccggagggcagtgggttctgcagcaaggaccgatttgtggcttacccctgtgctgtgggccagacggccttctcctctgggaggcactactgggaggtgggcatgaacatcaccggggacgcgttgtgggccctgggtgtgtgcagggacaacgtgagccggaaagacagggtccccaagtgccccgaaaacggcttctgggtggtgcagctgtccaaggggaccaagtacttatccaccttctctgccctaaccccggtcatgctgatggagcctcccagccacatgggcatcttcctggacttcgaagccggggaagtgtccttctacagtgtaagcgatgggtcccacctgcacacctactcccaggccaccttcccaggccccctgcagcctttcttctgcctgggggctccgaagtctggtcagatggtcatctccacagtgaccatgtgggtgaaaggatagacacagaccgggggactcgggcactgctcctggctctgcagaaggtgtgggccttctgcttactgcaggccacctgccagggttctctggcatcacgctggcagccattagacacacaggggggtttctcaaattctaaatataattgtgattagaactgtcaaa

SEQ ID NO: 28215 - DNA, 2652 bp, Artificial Sequence
  derived and/or modified sequence
agatctccactgcgtggggtcgcgagtgttgagattgcagggggcatctatgtgcatgcttgtgtgcctgtgcgtgtgtgcgcgcgtgtacctgtgtgtacatgcatgtatgtttaccgatatgtgcatctgtgcctgtgtgtgctgtgtttgtggatcagtgtttctgtgcgtacatgtttgtatttgtgtggtgtgtatgcgtgggtatgcgtgtgtgcacatgcacgtttgtatacatacatgggtatgtgtatgggtgttcgtctgtgcgtacatgcacacgcgtgttttttctgaaccccacctcactaccgaatggaagagagcttttttcctctgatagcccatcccttcttcctttggtgtacggggttttgttaaagaaaaaattctgacatttgaaaggctctttagtcaggctacttgcaatgggagagttgcgccagcaaagacagctggggatgtatgggggagttggagtggggatctgggtggggtcagtggatggaaagtgattaagggaaggctccaagggtaggggcttctccctaagctgacctagcaggcttctccagaaaggcaggttgaaggcctagccggcaacggtctgtcggggaggaggagctgatgagatgtggagctgggggtagccagcagcaggcggaagtggacgggtagggtccaggcccagtggagaggagaggcggaggggcctgcagagcattggtcagggagggtctgtgtagtttctggggaggcatctgtgtctgttgttgacaaggctaaaaatgatgactctggactctctaactggactgcagtcctagccctcctctgtaaagggaggctgtacaggacggttgcacactgccggcgcccagatcatcgggctgctccctccaactctctccagagtccctcaagcgggaacctgcctcgtgtctcccaggagccatggaggctgtggaactcgccagaaaactgcaggaggaagctacgtgctccatctgtctggattacttcacagaccctgtgatgaccacctgtggccacaacttctgccgagcctgcatccagctgagctgggaaaaggcgaggggcaagaaggggaggcggaagcggaagggctccttcccctgccccgagtgcagagagatgtccccgcagaggaacctgctgcccaaccggctgctgaccaaggtggccgagatggcgcagcagcatcctggtctgcagaagcaagacctgtgccaggagcaccacgagcccctcaagcttttctgccagaaggaccagagccccatctgtgtggtgtgcagggagtcccgggagcaccggctgcacagggtgctgcccgccgaggaggcagtgcaggggtacaagttgaagctggaggaggacatggagtaccttcgggagcagatcaccaggacagggaatctgcaggccagggaggagcagagcttagccgagtggcagggcaaggtgaaggagcggagagaacgcattgtgctggagtttgagaagatgaacctctacctggtggaagaagagcagaggctcctccaggctctggagacggaagaagaggagactgccagcaggctccgggagagcgtggcctgcctggaccggcagggtcactctctggagctgctgctgctgcagctggaggagcggagcacacaggggcccctccagatgctgcaggacatgaaggaacccctgagcaggaagaacaacgtgagtgtgcagtgcccagaggttgcccccccaaccagacccaggactgtgtgcagagttcccggacagattgaagtgctaagaggctttctagaggatgtggtgcctgatgccacctccgcgtacccctacctcctcctgtatgagagccgccagaggcgctacctcggctcttcgccggagggcagtgggttctgcagcaaggaccgatttgtggcttacccctgtgctgtgggccagacggccttctcctctgggaggcactactgggaggtgggcatgaacatcaccggggacgcgttgtgggccctgggtgtgtgcagggacaacgtgagccggaaagacagggtccccaagtgccccgaaaacggcttctgggtggtgcagctgtccaaggggaccaagtacttatccaccttctctgccctaaccccggtcatgctgatggagcctcccagccacatgggcatcttcctggacttcgaagccggggaagtgtccttctacagtgtaagcgatgggtcccacctgcacacctactcccaggccaccttcccaggccccctgcagcctttcttctgcctgggggctccgaagtctggtcagatggtcatctccacagtgaccatgtgggtgaaaggatagacacagaccgggggactcgggcactgctcctggctctgcagaaggtgtgggccttctgcttactgcaggccacctgccagggttctctggcatcacgctggcagccattagacacacaggggggtttctcaaattctaaatataattgtgattagaactgtcaaacattaagagggtatactgacagatgcttcctagaggaaacttttgaaagcccctgcgttctgagtggaccgatttctaaatccatacctacacacc

SEQ ID NO: 28216 - DNA, 1748 bp, Artificial Sequence
  derived and/or modified sequence
cgggccgggccgcagcctcctgggcttcgtgggggcagacccagcctttcccggcagcgagcgctcggccaggtgcactaggcgctgtgcgggccccccttccccgcgagtccctcaagcgggaacctgcctcgtgtctcccaggagccatggaggctgtggaactcgccagaaaactgcaggaggaagctacgtgctccatctgtctggattacttcacagaccctgtgatgaccacctgtggccacaacttctgccgagcctgcatccagctgagctgggaaaaggcgaggggcaagaaggggaggcggaagcggaagggctccttcccctgccccgagtgcagagagatgtccccgcagaggaacctgctgcccaaccggctgctgaccaaggtggccgagatggcgcagcagcatcctggtctgcagaagcaagacctgtgccaggagcaccacgagcccctcaagcttttctgccagaaggaccagagccccatctgtgtggtgtgcagggagtcccgggagcaccggctgcacagggtgctgcccgccgaggaggcagtgcaggggtacaagttgaagctggaggaggacatggagtaccttcgggagcagatcaccaggacagggaatctgcaggccagggaggagcagagcttagccgagtggcagggcaaggtgaaggagcggagagaacgcattgtgctggagtttgagaagatgaacctctacctggtggaagaagagcagaggctcctccaggctctggagacggaagaagaggagactgccagcaggctccgggagagcgtggcctgcctggaccggcagggtcactctctggagctgctgctgctgcagctggaggagcggagcacacaggggcccctccagatgctgcaggacatgaaggaacccctgagcaggaagaacaacgtgagtgtgcagtgcccagaggttgcccccccaaccagacccaggactgtgtgcagagttcccggacagattgaagtgctaagaggctttctagaggatgtggtgcctgatgccacctccgcgtacccctacctcctcctgtatgagagccgccagaggcgctacctcggctcttcgccggagggcagtgggttctgcagcaaggaccgatttgtggcttacccctgtgctgtgggccagacggccttctcctctgggaggcactactgggaggtgggcatgaacatcaccggggacgcgttgtgggccctgggtgtgtgcagggacaacgtgagccggaaagacagggtccccaagtgccccgaaaacggcttctgggtggtgcagctgtccaaggggaccaagtacttatccaccttctctgccctaaccccggtcatgctgatggagcctcccagccacatgggcatcttcctggacttcgaagccggggaagtgtccttctacagtgtaagcgatgggtcccacctgcacacctactcccaggccaccttcccaggccccctgcagcctttcttctgcctgggggctccgaagtctggtcagatggtcatctccacagtgaccatgtgggtgaaaggatagacacagaccgggggactcgggcactgctcctggctctgcagaaggtgtgggccttctgcttactgcaggccacctgccagggttctctggcatcacgctggcagccattagacacacaggggggtttctcaaattctaaatataattgtgattagaactgtcaaa

SEQ ID NO: 28217 - protein, 444 aa, Artificial Sequence
  derived and/or modified sequence
MASESGKLWGGRFVGAVDPIMEKFNASIAYDRHLWEVDVQGSKAYSRGLEKAGLLTKAEMDQILHGLDKVAEEWAQGTFKLNSNDEDIHTANERRLKELIGATAGKLHTGRSRNDQVVTDLRLWMRQTCSTLSGLLWELIRTMVDRAEAERDVLFPGYTHLQRAQPIRWSHWILSHAVALTRDSERLLEVRKRINVLPLGSGAIAGNPLGVDRELLRAELNFGAITLNSMDATSERDFVAEFLFWASLCMTHLSRMAEDLILYCTKEFSFVQLSDAYSTGSSLMPQKKNPDSLELIRSKAGRVFGREDKEAVFEVSDTMSAVLQVATGVISTLQIHQENMGQALSPDMLATDLAYYLVRKGMPFRQAHEASGKAVFMAETKGVALNQLSLQELQTISPLFSGDVICVWDYGHSVEQYGALGGTARSSVDWQIRQVRALLQAQQA

SEQ ID NO: 28218 - DNA, 1335 bp, Artificial Sequence
  derived and/or modified sequence
atggccagcgagagcggcaagctgtggggcggcagattcgtgggcgccgtggaccccatcatggagaagttcaacgccagcatcgcctacgacagacacctgtgggaggtggacgtgcagggcagcaaggcctacagcagaggcctggagaaggccggcctgctgaccaaggccgagatggaccagatcctgcacggcctggacaaggtggccgaggagtgggcccagggcaccttcaagctgaacagcaacgacgaggacatccacaccgccaacgagagaagactgaaggagctgatcggcgccaccgccggcaagctgcacaccggcagaagcagaaacgaccaggtggtgaccgacctgagactgtggatgagacagacctgcagcaccctgagcggcctgctgtgggagctgatcagaaccatggtggacagagccgaggccgagagagacgtgctgttccccggctacacccacctgcagagagcccagcccatcagatggagccactggatcctgagccacgccgtggccctgaccagagacagcgagagactgctggaggtgagaaagagaatcaacgtgctgcccctgggcagcggcgccatcgccggcaaccccctgggcgtggacagagagctgctgagagccgagctgaacttcggcgccatcaccctgaacagcatggacgccaccagcgagagagacttcgtggccgagttcctgttctgggccagcctgtgcatgacccacctgagcagaatggccgaggacctgatcctgtactgcaccaaggagttcagcttcgtgcagctgagcgacgcctacagcaccggcagcagcctgatgccccagaagaagaaccccgacagcctggagctgatcagaagcaaggccggcagagtgttcggcagagaggacaaggaggccgtgttcgaggtgagcgacaccatgagcgccgtgctgcaggtggccaccggcgtgatcagcaccctgcagatccaccaggagaacatgggccaggccctgagccccgacatgctggccaccgacctggcctactacctggtgagaaagggcatgcccttcagacaggcccacgaggccagcggcaaggccgtgttcatggccgagaccaagggcgtggccctgaaccagctgagcctgcaggagctgcagaccatcagccccctgttcagcggcgacgtgatctgcgtgtgggactacggccacagcgtggagcagtacggcgccctgggcggcaccgccagaagcagcgtggactggcagatcagacaggtgagagccctgctgcaggcccagcaggcctag

SEQ ID NO: 28219 - DNA, 1538 bp, Artificial Sequence
  derived and/or modified sequence
gacgggcgtggaggacgccgagcaccgtggcgcgcgctcacgtccgcgtccccaagggctgcgctccctcaagcgcagtgcccagaactcggagccagcccggcccgggggaccctgctggccaaggaggtcgtcagtccggtcttgtcttccagacccggaggaccgaagcttccggacgacgaggaaccgcccaacatggcctcggagagtgggaagctttggggtggccggtttgtgggtgcagtggaccccatcatggagaagttcaacgcgtccattgcctacgaccggcacctttgggaggtggatgttcaaggcagcaaagcctacagcaggggcctggagaaggcagggctcctcaccaaggccgagatggaccagatactccatggcctagacaaggtggctgaggagtgggcccagggcaccttcaaactgaactccaatgatgaggacatccacacagccaatgagcgccgcctgaaggagctcattggtgcaacggcagggaagctgcacacgggacggagccggaatgaccaggtggtcacagacctcaggctgtggatgcggcagacctgctccacgctctcgggcctcctctgggagctcattaggaccatggtggatcgggcagaggcggaacgtgatgttctcttcccggggtacacccatttgcagagggcccagcccatccgctggagccactggattctgagccacgccgtggcactgacccgagactctgagcggctgctggaggtgcggaagcggatcaatgtcctgcccctggggagtggggccattgcaggcaatcccctgggtgtggaccgagagctgctccgagcagaactcaactttggggccatcactctcaacagcatggatgccactagtgagcgggactttgtggccgagttcctgttctgggcttcgctgtgcatgacccatctcagcaggatggccgaggacctcatcctctactgcaccaaggaattcagcttcgtgcagctctcagatgcctacagcacgggaagcagcctgatgccccagaagaaaaaccccgacagtttggagctgatccggagcaaggctgggcgtgtgtttgggcgggaggacaaggaagctgtgtttgaagtgtcagacactatgagtgccgtgctccaggtggccactggcgtcatctctacgctgcagattcaccaagagaacatgggacaggctctcagccccgacatgctggccactgaccttgcctattacctggtccgcaaagggatgccattccgccaggcccacgaggcctccgggaaagctgtgttcatggccgagaccaagggggtcgccctcaaccagctgtcactgcaggagctgcagaccatcagccccctgttctcgggcgacgtgatctgcgtgtgggactacgggcacagtgtggagcagtatggtgccctgggcggcactgcgcgctccagcgtcgactggcagatccgccaggtgcgggcgctactgcaggcacagcaggcctaggtcct

SEQ ID NO: 28220 - DNA, 1335 bp, Artificial Sequence
  derived and/or modified sequence
atggctagtgagtcaggcaagctatggggcggaagattcgttggagcagtcgatcctattatggagaagtttaatgcaagtatcgcatacgatcggcacctctgggaagtcgacgtacagggcagtaaggcatactcaagggggctcgagaaggccggtctcctgaccaaagccgagatggaccagatactccatggattggacaaggtggctgaggagtgggcccagggcacattcaaacttaatagcaatgatgaggacattcatacagcgaatgaaaggaggctgaaggaacttatcggcgcaacagccggtaaactccacactggtaggagtcggaacgaccaagttgtgacagacctgaggctttggatgagacagacttgttctacactttccgggctgctgtgggagctaattcggacaatggtagatcgcgccgaggccgagcgggacgtgctcttcccaggttacactcatttgcagcgcgcgcagcccatcagatggagccactggatcttgtctcacgccgttgcacttaccagggattccgagcggctgttggaagtgagaaaaaggatcaatgttctgcctttagggagcggtgccattgcaggcaaccccctgggggttgatcgtgaactccttcgggcagagctgaactttggtgcaatcactctcaactctatggatgctacaagcgagcgtgactttgtcgctgagttcctgttttgggcctcactgtgcatgacgcacctgagtaggatggccgaagacctgatactgtactgcacaaaagaattctccttcgtgcagcttagtgacgcttattccacagggagtagtttaatgcctcagaagaagaacccagacagtctagagctgatccggtccaaagccggcagggtgttcgggagggaagacaaagaagcagtgttcgaagtatcagacaccatgtccgccgtattgcaggtagctacaggagttatttctacactgcagatccaccaggaaaacatgggtcaggcactgtcaccagacatgttggcaaccgatctcgcatattacttggtccgaaaaggtatgcctttccggcaggctcacgaggcctctggaaaagctgtatttatggccgagactaagggcgttgccctgaatcaactcagcctgcaggaactgcagaccatcagccctctgttctccggcgatgtgatttgcgtgtgggactatggtcactccgtggaacagtacggcgcgctggggggaaccgcacggtcttctgtggactggcaaatccgccaagttcgagctctcctgcaggctcagcaggcctag

SEQ ID NO: 28221 - DNA, 1335 bp, Artificial Sequence
  derived and/or modified sequence
atggccagcgagagcggcaagctgtggggcggccgctttgtgggcgctgtggaccccatcatggagaagttcaatgccagcatcgcctatgacagacacctgtgggaggtggatgtgcagggcagcaaggcctacagccggggcctggagaaggccggcctgctgaccaaggccgagatggaccagatcctgcacggcctggacaaggtggccgaggagtgggcccagggcaccttcaagctgaacagcaatgatgaggacatccacacagccaatgaaagaaggctgaaggagctgattggagccacagctgggaagctgcacacaggccgcagcagaaatgaccaggtggtgacagacctgcggctgtggatgaggcagacctgcagcaccctgagcggcctgctgtgggagctgatccgcaccatggtggacagagctgaggccgagagagatgtgctcttccctggctacacccacctgcagagggcccagcccatccgctggagccactggatcctgagccatgctgtggccctgacccgggacagcgagcggctgctggaggtgaggaagaggatcaacgtgctgcccctgggcagcggggccatcgccggcaaccccctgggcgtggaccgggagctgctgcgggcagagctgaactttggagccatcaccctgaacagcatggatgccaccagcgagcgggactttgtggccgagttcctgttctgggccagcctgtgcatgacccacctgagcaggatggccgaggacctgatcctgtactgcaccaaggagttctcctttgtgcagctgagtgatgcctacagcacaggcagcagcctgatgccccagaagaagaacccagacagcctggagctgatccgcagcaaggccggccgggtgtttggaagagaggacaaggaggccgtgtttgaggtgtctgacaccatgtctgctgtgctgcaggtggccactggagtcatcagcaccctgcagatccaccaggagaacatgggccaggccctgagcccagacatgctggccacagacctggcctactacctggtgaggaagggcatgcccttccggcaggcccacgaggccagcggcaaggctgtgttcatggccgagaccaagggcgtggccctgaaccagctgagcctgcaggagctgcagaccatcagccccctcttctctggagatgtgatctgtgtgtgggactatggccacagcgtggagcagtatggagccctgggcggcacagcccggagctctgtggactggcagatccggcaggtgcgggccctgctgcaggcccagcaggcctag

SEQ ID NO: 28222 - DNA, 1335 bp, Artificial Sequence
  derived and/or modified sequence
atggccagcgagagcggcaagctgtggggcggccggttcgtgggcgcggtggacccaatcatggaaaagttcaatgcctccatcgcctatgaccggcacctgtgggaggtagacgtgcaggggagtaaggcatactcacgaggattggaaaaagctggcctgctcactaaggccgagatggaccagattcttcatgggctcgataaagtcgcggaggagtgggcacagggaacattcaagcttaactccaatgacgaggacatacacaccgccaacgagcgaaggctcaaagagttgataggggctacagcaggcaaactgcacacagggcgtagtcgaaacgaccaggttgtgacagacctgcggctctggatgagacagacatgttccaccctcagcgggctgctgtgggagctaatccgcaccatggtcgaccgagcagaagcagaaagagatgtcctctttcctggctacacacacctgcagcgggcacagccaatacgatggtcacattggatactgtcacacgccgtggccctcactcgcgacagcgaacgactcttagaggtaaggaagcggattaatgtgctgcctctcgggagcggcgccatcgctgggaaccctctgggggtcgaccgggagttacttcgcgcggagctgaacttcggagcaatcacattgaatagcatggacgccacatccgagagagacttcgtggccgagttcctcttctgggcatccctctgcatgacccacctttcccgaatggcagaagatttaattctgtactgtactaaagaattctctttcgtccagttgtcagatgcatatagtacaggcagctcattgatgccccaaaaaaaaaatccagattcgttggaactgatccgatctaaagccggaagggtgtttggacgcgaggataaggaagccgtttttgaagtgagcgacactatgtctgccgtgctgcaggtggcaacaggagtgataagtaccctccaaattcaccaagagaatatgggccaggcactctccccagacatgctggcaacagacctcgcgtactacttagtgaggaaggggatgccgttccgacaggctcacgaggcctccggaaaggcggtttttatggctgagactaagggggtggcgcttaatcaattgtctctgcaagaactacagaccataagtcctctgttctccggagatgtgatttgtgtttgggattatggccacagcgtggaacagtatggggcgcttggcgggaccgcccggtcatcagtggactggcagatccggcaagtgcgagcactgctgcaggctcaacaggcgtag

SEQ ID NO: 28223 - DNA, 1335 bp, Artificial Sequence
  derived and/or modified sequence
atggcttctgagtcgggcaaattgtgggggggaaggtttgtgggggctgttgacccaattatggagaagtttaacgccagtatcgcatacgataggcacctgtgggaggtggacgttcaaggatcgaaggcatactcgcgcggtctggagaaagccggactattgacgaaggcagaaatggaccagatattacatggcctggataaggtggccgaagaatgggcacagggtaccttcaaacttaacagtaacgatgaggatattcatactgccaacgagagacgcttgaaggaacttatcggggctaccgctggaaaattgcataccggacgttcaaggaatgaccaggtcgtgaccgatctccgactgtggatgcgacaaacatgctcaactctctcagggctattgtgggagctcatccggactatggtggacagggcagaagcagagagggacgtgctgttccccggatatacacacctacagcgagcacaacccatcaggtggagccactggatcctgtcacacgccgtggccctaacccgtgactccgagaggctccttgaagtcaggaaacggattaacgtacttccattagggagcggtgcgatcgctgggaatccactaggggtggacagagaattgttgcgggctgagctgaatttcggcgcaatcacactgaactctatggacgctacttctgaaagagattttgtcgccgaattcctgttttgggcatccctgtgcatgacccatctcagcagaatggctgaagatttaattttgtattgcactaaggaattttcatttgtgcagctgagcgatgcctacagcaccggaagtagtttgatgccccagaagaagaatcctgattccttggagttaataagaagcaaagccggtcgggtctttggcagggaagacaaggaggcagttttcgaagttagtgacacaatgtcagccgtactgcaggttgccaccggggtgatttccacactgcagatccatcaggaaaacatgggacaggctctgagccctgatatgctggctaccgaccttgcctactatttagtgaggaaaggaatgccatttaggcaggcccacgaagcatcgggtaaagctgtgttcatggccgaaacaaagggggtcgcactgaaccagctttctctgcaggagttgcagacaatcagccccctctttagcggagatgttatatgtgtttgggactacggacactcagtcgaacagtacggagccctcggaggaaccgcgcgatctagcgttgactggcaaatacggcaggtgcgtgccctgctacaggcacagcaggcctag

SEQ ID NO: 28224 - protein, 438 aa, Artificial Sequence
  derived and/or modified sequence
MASESGKLWGGRFVGAVDPIMEKFNASIAYDRHLWEVDVQGSKAYSRGLEKAGLLTKAEMDQILHGLDKVAEEWAQGTFKLNSNDEDIHTANERRLKELIGATAGKLHTGRSRNDQVVTDLRLWMRQTCSTLSGLLWELIRTMVDRAEAERDVLFPGYTHLQRAQPIRWSHWILSGAIAGNPLGVDRELLRAELNFGAITLNSMDATSERDFVAEFLFWASLCMTHLSRMAEDLILYCTKEFSFVQLSDAYSTGSSLMPQKKNPDSLELIRSKAGRVFGRCAGLLMTLKGLPSTYNKDLQEDKEAVFEVSDTMSAVLQVATGVISTLQIHQENMGQALSPDMLATDLAYYLVRKGMPFRQAHEASGKAVFMAETKGVALNQLSLQELQTISPLFSGDVICVWDYGHSVEQYGALGGTARSSVDWQIRQVRALLQAQQA

SEQ ID NO: 28225 - protein, 98 aa, Artificial Sequence
  derived and/or modified sequence
MEKFNASIAYDRHLWEVDVQGSKAYSRGLEKAGLLTKAEMDQILHGLDKVAEEWAQGTFKLNSNDEDIHTANERRLKELIGATAGKLHTGRSRNDQVL

SEQ ID NO: 28226 - DNA, 1317 bp, Artificial Sequence
  derived and/or modified sequence
atggccagcgagagcggcaagctgtggggcggcagattcgtgggcgccgtggaccccatcatggagaagttcaacgccagcatcgcctacgacagacacctgtgggaggtggacgtgcagggcagcaaggcctacagcagaggcctggagaaggccggcctgctgaccaaggccgagatggaccagatcctgcacggcctggacaaggtggccgaggagtgggcccagggcaccttcaagctgaacagcaacgacgaggacatccacaccgccaacgagagaagactgaaggagctgatcggcgccaccgccggcaagctgcacaccggcagaagcagaaacgaccaggtggtgaccgacctgagactgtggatgagacagacctgcagcaccctgagcggcctgctgtgggagctgatcagaaccatggtggacagagccgaggccgagagagacgtgctgttccccggctacacccacctgcagagagcccagcccatcagatggagccactggatcctgagcggcgccatcgccggcaaccccctgggcgtggacagagagctgctgagagccgagctgaacttcggcgccatcaccctgaacagcatggacgccaccagcgagagagacttcgtggccgagttcctgttctgggccagcctgtgcatgacccacctgagcagaatggccgaggacctgatcctgtactgcaccaaggagttcagcttcgtgcagctgagcgacgcctacagcaccggcagcagcctgatgccccagaagaagaaccccgacagcctggagctgatcagaagcaaggccggcagagtgttcggcagatgcgccggcctgctgatgaccctgaagggcctgcccagcacctacaacaaggacctgcaggaggacaaggaggccgtgttcgaggtgagcgacaccatgagcgccgtgctgcaggtggccaccggcgtgatcagcaccctgcagatccaccaggagaacatgggccaggccctgagccccgacatgctggccaccgacctggcctactacctggtgagaaagggcatgcccttcagacaggcccacgaggccagcggcaaggccgtgttcatggccgagaccaagggcgtggccctgaaccagctgagcctgcaggagctgcagaccatcagccccctgttcagcggcgacgtgatctgcgtgtgggactacggccacagcgtggagcagtacggcgccctgggcggcaccgccagaagcagcgtggactggcagatcagacaggtgagagccctgctgcaggcccagcaggcctag

SEQ ID NO: 28227 - DNA, 297 bp, Artificial Sequence
  derived and/or modified sequence
atggagaagttcaacgccagcatcgcctacgacagacacctgtgggaggtggacgtgcagggcagcaaggcctacagcagaggcctggagaaggccggcctgctgaccaaggccgagatggaccagatcctgcacggcctggacaaggtggccgaggagtgggcccagggcaccttcaagctgaacagcaacgacgaggacatccacaccgccaacgagagaagactgaaggagctgatcggcgccaccgccggcaagctgcacaccggcagaagcagaaacgaccaggtgctgtag

SEQ ID NO: 28228 - DNA, 1765 bp, Artificial Sequence
  derived and/or modified sequence
cggcggccggatgggcgggacgggcgtggaggacgccgagcaccgtggcgcgcgctcacgtccgcgtccccaagggctgcgctccctcaagcgcagtgcccagaactcggagccagcccggcccgggggaccctgctggccaaggaggtcgtcagtccggtcttgtcttccagacccggaggaccgaagcttccggacgacgaggaaccgcccaacatggcctcggagagtgggaagctttggggtggccggtttgtgggtgcagtggaccccatcatggagaagttcaacgcgtccattgcctacgaccggcacctttgggaggtggatgttcaaggcagcaaagcctacagcaggggcctggagaaggcagggctcctcaccaaggccgagatggaccagatactccatggcctagacaaggtggctgaggagtgggcccagggcaccttcaaactgaactccaatgatgaggacatccacacagccaatgagcgccgcctgaaggagctcattggtgcaacggcagggaagctgcacacgggacggagccggaatgaccaggtggtcacagacctcaggctgtggatgcggcagacctgctccacgctctcgggcctcctctgggagctcattaggaccatggtggatcgggcagaggcggaacgtgatgttctcttcccggggtacacccatttgcagagggcccagcccatccgctggagccactggattctgagtggggccattgcaggcaatcccctgggtgtggaccgagagctgctccgagcagaactcaactttggggccatcactctcaacagcatggatgccactagtgagcgggactttgtggccgagttcctgttctgggcttcgctgtgcatgacccatctcagcaggatggccgaggacctcatcctctactgcaccaaggaattcagcttcgtgcagctctcagatgcctacagcacgggaagcagcctgatgccccagaagaaaaaccccgacagtttggagctgatccggagcaaggctgggcgtgtgtttgggcggtgtgccgggctcctgatgaccctcaagggacttcccagcacctacaacaaagacttacaggaggacaaggaagctgtgtttgaagtgtcagacactatgagtgccgtgctccaggtggccactggcgtcatctctacgctgcagattcaccaagagaacatgggacaggctctcagccccgacatgctggccactgaccttgcctattacctggtccgcaaagggatgccattccgccaggcccacgaggcctccgggaaagctgtgttcatggccgagaccaagggggtcgccctcaaccagctgtcactgcaggagctgcagaccatcagccccctgttctcgggcgacgtgatctgcgtgtgggactacgggcacagtgtggagcagtatggtgccctgggcggcactgcgcgctccagcgtcgactggcagatccgccaggtgcgggcgctactgcaggcacagcaggcctaggtcctcccacacctgccccctaataaagtgggcgcgagaggaggctgctgtgtgtttcctgccccagcctggctccctcgttgctgggctttcggggctggccagtggggacagtcagggactggagaggcagggcagggtggcctgtaatcccagcactttggaagggcaaggtgcgaggatgcttgaggccaggagtttgacacagcctgggcaacacagggagaccccc

SEQ ID NO: 28229 - DNA, 2205 bp, Artificial Sequence
  derived and/or modified sequence
gatgtgtcctggcttggagtagcaccttctgctaccacactaggcctccactctcctcagtgcccaaggggaggcacctcactctgatctccctgtggggtcctcttatgcctgccagtaaggataggagtttggttctagagcagagtggtctggcttccaacaagcccagtgttctaggtgacctcaggttgccccaggccttcctgtaggttggcactaattggtttggctgcagctccacttattaagtagttatttttattactaacaacctaggcagggtggcccaggagcccgctgggggaggcggtgccaggctcctggctgaggggcaggctggccccaattctgactggctggctccagtgatcaggaccagggccccacgtggtgctttgctggagatctaggcttggtggggcagctgtggggtaaggggcaggaccagctcaaagatggggtgggggcggaggctgcctctgcagggcagagtcctttggcagtcgggactgttgggcatagaggagtcagctcacagctcagggccagagcactggagaggtctctggggtgcatacaggaaccaggagtggagctgaagcatgtcctatcccctgccagccctcccttagtaacagctggcatttctcgagtccttcctgagcaccaggcaccgtgttatgtatgcaatttgcaaatattatctgattaaatgctcacaataaggctatcagagaggtactattattatccttatcttattattattattattattatttttaagaaggagtctgaggcaggagaatctcttgaacctgggaggcagagtttgcagtgagctgagatggcaccactgtactccagcctggccgacaaagtgagactctgtctcaaaaaaaaaaaaaaagaacccaaacttttggtgttcagccatgttcccatgctcactcccagggtggtgactctgggaaggtctcagcctccttgtctgcccagttagaatgatctgatgcccctgctaccatcagacttgataagtttcccaaagactctttgcaagaagcactgttctggagggtggaggagagactaattgttcttgctctcctggccagagtgggaagctttggggtggccggtttgtgggtgcagtggaccccatcatggagaagttcaacgcgtccattgcctacgaccggcacctttgggaggtggatgttcaaggcagcaaagcctacagcaggggcctggagaaggcagggctcctcaccaaggccgagatggaccagatactccatggcctagacaaggtggctgaggagtgggcccagggcaccttcaaactgaactccaatgatgaggacatccacacagccaatgagcgccgcctgaaggagctcattggtgcaacggcagggaagctgcacacgggacggagccggaatgaccaggtgctttagcccctccaccccctgctccgtgttgtcccaaccttgaggagcccagggggcagttagagttctgcagcggtcctggctcctcagggaagcaacacatcggcctccctgagcaccatctcctccttgcacaggtggtcacagacctcaggctgtggatgcggcagacctgctccacgctctcgggcctcctctgggagctcattaggaccatggtggatcgggcagaggcgtgagtcctacagggacacccagggggcagacagaggtgtgatggaagcctgaacaggagacctagggggcaggggtgaacagcgtgggggtgccaggccctgggggacaggggcatcccagaactccaggatcgaggcagagcagccaggagtgggccatttcctgcaggccccaatactcccatgccagtctagctcagcaggcagagaagactaacccttcgtggggctgggtgcggtggctcacgcctgtaatctcagcactttgggaggccgaggtgggtggatcacctgaggtcaggagttcgagaccagcctggccaacatgggaaaactctgtctctactaaaaatacaaaaattaggcaatgtggtggtgtgcgcctgtaatcccagctactcgggagcctgaggcagaagaactgcttgaacccgggaggaggaggttgcaatgagccgagatcgcgccattgcactccagcctgggctacagagcgagactcctgtctc

SEQ ID NO: 28230 - DNA, 1317 bp, Artificial Sequence
  derived and/or modified sequence
atggcgtctgagagcggcaaattatggggggggagatttgtaggagcagtggaccctattatggagaaattcaacgctagtattgcctatgacagacacctgtgggaagtagacgtccagggaagcaaggcatatagcaggggccttgagaaggccggactgctgaccaaagcagaaatggaccagatccttcacggcctcgataaagtggctgaagaatgggcccagggcaccttcaagctaaattctaacgacgaagatattcacacagcgaacgagcgacgactgaaggagctgattggagctactgccggtaagctgcatacaggaagatcacggaatgaccaagtggtcacggatcttagactttggatgaggcaaacgtgttcgactttgtctggtctcctgtgggaactcattagaactatggtggatagggccgaggccgagagagacgtgctctttcctggctatacacatcttcagagggcccagcctattcggtggagtcactggattttatccggagccattgcagggaaccctctgggtgtggaccgcgaactgctaagggcagagctgaacttcggcgccattacccttaattcaatggacgcgacgagcgagcgtgatttcgtcgcggagttccttttttgggcgtccctttgtatgacccatctatcacggatggccgaggaccttattctgtattgcacaaaggaattttcctttgttcagctgtctgatgcttattccacaggctcttcgctgatgcctcagaagaaaaatccggactctctggaattgatccggagcaaggccggccgcgttttcgggcgttgcgccgggctgctaatgactttgaagggattgccgtctacttataacaaggacctgcaggaagacaaagaggctgtgtttgaagtctccgacaccatgagtgccgttcttcaggtcgccactggagtaatctccacactgcagattcaccaagaaaacatggggcaagctctgtcacctgatatgctagctacggacctggcatactaccttgtccgcaaggggatgccctttcgacaggcccacgaggcttctggtaaagccgtcttcatggcagaaacgaagggggtggccttgaatcagttatctttacaggagctgcagactatttcaccactgttttctggcgacgtgatctgcgtctgggattacggtcatagcgtggagcagtatggcgcgctcggcggtaccgctcggtcttctgtggattggcaaattaggcaggttagagcccttctccaggctcagcaggcttag

SEQ ID NO: 28231 - DNA, 297 bp, Artificial Sequence
  derived and/or modified sequence
atggaaaagtttaacgcttcaattgcttatgacaggcatctctgggaggtagatgtacagggtagtaaggcctattctcggggacttgagaaggctgggctgctaaccaaggctgagatggaccagatattacacggtcttgataaagtggctgaggaatgggcacagggaacatttaagctgaattccaacgacgaagacatacatacagctaatgagcgtagactcaaagagctcatcggagccactgcggggaagctgcatactggccgctctcggaacgatcaggtgttatag

SEQ ID NO: 28232 - DNA, 1317 bp, Artificial Sequence
  derived and/or modified sequence
atggccagcgagagcggcaagctgtggggcggccgctttgtgggcgctgtggaccccatcatggagaagttcaatgccagcatcgcctatgacagacacctgtgggaggtggatgtgcagggcagcaaggcctacagccggggcctggagaaggccggcctgctgaccaaggccgagatggaccagatcctgcacggcctggacaaggtggccgaggagtgggcccagggcaccttcaagctgaacagcaatgatgaggacatccacacagccaatgaaagaaggctgaaggagctgattggagccacagctgggaagctgcacacaggccgcagcagaaatgaccaggtggtgacagacctgcggctgtggatgaggcagacctgcagcaccctgagcggcctgctgtgggagctgatccgcaccatggtggacagagctgaggccgagagagatgtgctcttccctggctacacccacctgcagagggcccagcccatccgctggagccactggatcctgagcggggccatcgccggcaaccccctgggcgtggaccgggagctgctgcgggcagagctgaactttggagccatcaccctgaacagcatggatgccaccagcgagcgggactttgtggccgagttcctgttctgggccagcctgtgcatgacccacctgagcaggatggccgaggacctgatcctgtactgcaccaaggagttctcctttgtgcagctgagtgatgcctacagcacaggcagcagcctgatgccccagaagaagaacccagacagcctggagctgatccgcagcaaggccggccgggtgtttggccgctgtgccggcctgctgatgaccctgaagggcctgcccagcacctacaacaaggacctgcaggaggacaaggaggccgtgtttgaggtgtctgacaccatgtctgctgtgctgcaggtggccactggagtcatcagcaccctgcagatccaccaggagaacatgggccaggccctgagcccagacatgctggccacagacctggcctactacctggtgaggaagggcatgcccttccggcaggcccacgaggccagcggcaaggctgtgttcatggccgagaccaagggcgtggccctgaaccagctgagcctgcaggagctgcagaccatcagccccctcttctctggagatgtgatctgtgtgtgggactatggccacagcgtggagcagtatggagccctgggcggcacagcccggagctctgtggactggcagatccggcaggtgcgggccctgctgcaggcccagcaggcctag

SEQ ID NO: 28233 - DNA, 297 bp, Artificial Sequence
  derived and/or modified sequence
atggagaagttcaatgccagcatcgcctatgacagacacctgtgggaggtggatgtgcagggcagcaaggcctacagccggggcctggagaaggccggcctgctgaccaaggccgagatggaccagatcctgcacggcctggacaaggtggccgaggagtgggcccagggcaccttcaagctgaacagcaatgatgaggacatccacacagccaatgaaagaaggctgaaggagctgattggagccacagctgggaagctgcacacaggccgcagcagaaatgaccaggtgctgtag

SEQ ID NO: 28234 - DNA, 1317 bp, Artificial Sequence
  derived and/or modified sequence
atggccagcgagagcggcaagctgtggggcggccggttcgtgggcgctgtcgatcccatcatggagaagttcaacgcctccattgcgtacgaccgacatctctgggaggtcgatgtacaaggtagcaaggcctattcaagaggtctggaaaaagctggcctgttgacaaaggcagagatggatcagattctccacggcctggacaaggttgccgaggaatgggcacaaggcacattcaaattgaactccaacgatgaggatatccataccgccaacgaaagaaggttaaaagaactcattggtgctacagcaggcaaactccatacagggcgtagccgaaacgaccaggtcgtgaccgacctcaggctatggatgcgtcagacttgttctactctgagcgggctgctgtgggaactgattagaaccatggtcgaccgggcagaggcagaaagagacgttttattccccggatacactcatttacaaagggcccagcccatccgatggtcccattggattttatcaggcgccatagcagggaacccactaggggttgatcgcgaactcctgagagccgaattgaattttggtgccatcacactcaacagtatggatgcgacaagcgagagagattttgtagccgagtttctgttttgggcttctctttgtatgactcaccttagtagaatggctgaggacctcatcttgtactgtacaaaggaattctccttcgtgcagctgagtgacgcatactcgacaggctcctccctcatgccccagaagaagaaccctgactcactggagttaatccgaagtaaggccggccgcgtgttcggcagatgtgcaggtttactgatgaccttaaaagggcttccaagcacctataacaaagatttgcaagaggataaagaggcagtatttgaagtgtcagatacgatgagcgctgtgctgcaggtggcaacaggagtaattagcactctgcagatacaccaggaaaacatgggtcaggcgctgtctcccgacatgctggctactgatctcgcctactatttagttcgcaaaggcatgccgtttcgccaggcacacgaggcctcgggcaaggccgtgttcatggccgagactaagggcgttgccctcaatcaattgagtctgcaagaactgcagaccattagtcccctgttcagtggcgatgttatttgcgtgtgggactacgggcacagcgtggaacagtatggcgctttagggggcacagccaggtccagcgtcgactggcagatccgtcaggtgagggccctcttgcaagctcagcaggcctag

SEQ ID NO: 28235 - DNA, 297 bp, Artificial Sequence
  derived and/or modified sequence
atggagaagttcaacgccagcatcgcctacgaccggcacctgtgggaggtggatgtgcaggggtcaaaagcctacagccgaggacttgaaaaagctggcctgctgaccaaggctgaaatggatcagattctgcatggcctcgataaggtcgccgaagagtgggcccagggaaccttcaagcttaactctaacgatgaagatattcatactgcgaatgaacggcgacttaaagagctaataggagctacggcaggcaaacttcacactggccgctcacgcaacgaccaagtgctgtag

SEQ ID NO: 28236 - DNA, 1317 bp, Artificial Sequence
  derived and/or modified sequence
atggctagtgagtcaggtaagctgtgggggggacgatttgtaggggctgtagatcccattatggagaagtttaacgcgtcaattgcttatgaccgtcatctatgggaggtggatgtgcagggctccaaagcgtacagtcggggtttagagaaagcgggtctgctgacgaaagcggagatggatcaaattctgcatggccttgacaaggtagcggaggagtgggcccaggggacctttaagttgaatagtaacgatgaagatatacataccgctaacgaaagacgactgaaagagctgatcggggcaaccgccggaaaactccacacagggcgtagtagaaatgatcaggtggtgaccgatctccgcctgtggatgcgtcagacatgcagcaccctgtctggcctgttatgggagttaatcagaaccatggtcgatcgagccgaagccgagcgtgatgtactgtttcccggatatacgcatctacagagggcccagccaattcgatggtcacactggattctgtccggcgcaattgcgggaaatcccttgggcgtggatcgggagctgttacgggcagaacttaatttcggagcaatcaccttaaacagcatggatgccactagcgagcgcgacttcgttgcagagttcttgttttgggcctccttgtgtatgacccacctgtcgagaatggcagaagacctgattctgtactgtactaaagaattcagttttgtacaactatccgacgcttactctacaggctcgtctttgatgcctcagaagaaaaaccctgacagcttggaattgatcagaagcaaggccggaagggtgttcgggagatgcgcaggattactgatgaccctgaagggcctcccttccacgtacaataaagacttgcaggaagacaaggaagccgtctttgaggtgagtgacactatgagtgccgtcttgcaagtggcgacaggtgtgatctccactttacagatccatcaggaaaatatggggcaggccttgtcgcccgatatgctagctacggaccttgcttactacctggtacgcaaaggcatgcccttcagacaggctcacgaggcctcgggaaaggctgtgttcatggctgaaactaaaggggtcgccctcaaccaattgagcctgcaggaattgcagaccatttctccgctgttcagcggggacgttatatgcgtttgggactacggccatagcgtcgagcagtacggcgcactgggagggacagcaagatctagtgtggactggcagattcgacaggtgagggctctgttacaggcacagcaggcttag

SEQ ID NO: 28237 - DNA, 297 bp, Artificial Sequence
  derived and/or modified sequence
atggaaaaatttaatgctagcatagcgtacgaccgccacctctgggaagtcgacgtgcagggctcaaaggcgtactccagaggcctagagaaagccggactgctaacgaaagcggagatggaccagattctccatgggctcgataaggtggcagaagaatgggcccagggaacttttaagctgaacagcaatgacgaggacatccacaccgcaaatgaaagaagactgaaagaactgattggcgcaaccgctgggaagctccatacaggaaggtcccgaaacgatcaagtgctgtag

SEQ ID NO: 28238 - protein, 257 aa, Artificial Sequence
  derived and/or modified sequence
MSGFENLNTDFYQTSYSIDDQSQQSYDYGGSGGPYSKQYAGYDYSQQGRFVPPDMMQPQQPYTGQIYQPTQAYTPASPQPFYGNNFEDEPPLLEELGINFDHIWQKTLTVLHPLKVADGSIMNETDLAGPMVFCLAFGATLLLAGKIQFGYVYGISAIGCLGMFCLLNLMSMTGVSFGCVASVLGYCLLPMILLSSFAVIFSLQGMVGIILTAGIIGWCSFSASKIFISALAMEGQQLLVAYPCALLYGVFALISVF

SEQ ID NO: 28239 - protein, 265 aa, Artificial Sequence
  derived and/or modified sequence
MSGFENLNTDFYQTSYSIDDQSQQSYDYGGSGGPYSKQYAGYDYSQQGRFVPPDMMQPQQPYTGQIYQPTQAYTPASPQPFYGNNFEDEPPLLEELGINFDHIWQKTLTVLHPLKVADGSIMNETDLAGPMVFCLAFGATLLLAGKIQFGYVYGISAIGCLGMFCLLNLMSMTGVSFGCVASVLGYCLLPMILLSSFAVIFSLQGMVGIILTAGIIGWCSFSASKIFISALAMEGQQLLVALQPNITYGSNYFLFCCLPYPQQHF

SEQ ID NO: 28240 - protein, 177 aa, Artificial Sequence
  derived and/or modified sequence
MMQPQQPYTGQIYQPTQAYTPASPQPFYGNNFEDEPPLLEELGINFDHIWQKTLTVLHPLKVADGSIMNETDLAGPMVFCLAFGATLLLAGKIQFGYVYGISAIGCLGMFCLLNLMSMTGVSFGCVASVLGYCLLPMILLSSFAVIFSLQGMVGIILTAGIIGWCSFSASKIFISAL

SEQ ID NO: 28241 - protein, 142 aa, Artificial Sequence
  derived and/or modified sequence
MSGFENLNTDFYQTSYSIDDQSQQSYDYGGSGGPYSKQYAGYDYSQQGRFVPPDMMQPQQPYTGQIYQPTQAYTPASPQPFYGNNFEDEPPLLEELGINFDHIWQKTLTVLHPLKVADGSIMNETDLAQWFFALLLEPHCYW

SEQ ID NO: 28242 - DNA, 774 bp, Artificial Sequence
  derived and/or modified sequence
atgagcggcttcgagaacctgaacaccgacttctaccagaccagctacagcatcgacgaccagagccagcagagctacgactacggcggcagcggcggcccctacagcaagcagtacgccggctacgactacagccagcagggcagattcgtgccccccgacatgatgcagccccagcagccctacaccggccagatctaccagcccacccaggcctacacccccgccagcccccagcccttctacggcaacaacttcgaggacgagccccccctgctggaggagctgggcatcaacttcgaccacatctggcagaagaccctgaccgtgctgcaccccctgaaggtggccgacggcagcatcatgaacgagaccgacctggccggccccatggtgttctgcctggccttcggcgccaccctgctgctggccggcaagatccagttcggctacgtgtacggcatcagcgccatcggctgcctgggcatgttctgcctgctgaacctgatgagcatgaccggcgtgagcttcggctgcgtggccagcgtgctgggctactgcctgctgcccatgatcctgctgagcagcttcgccgtgatcttcagcctgcagggcatggtgggcatcatcctgaccgccggcatcatcggctggtgcagcttcagcgccagcaagatcttcatcagcgccctggccatggagggccagcagctgctggtggcctacccctgcgccctgctgtacggcgtgttcgccctgatcagcgtgttctag

SEQ ID NO: 28243 - DNA, 798 bp, Artificial Sequence
  derived and/or modified sequence
atgagcggcttcgagaacctgaacaccgacttctaccagaccagctacagcatcgacgaccagagccagcagagctacgactacggcggcagcggcggcccctacagcaagcagtacgccggctacgactacagccagcagggcagattcgtgccccccgacatgatgcagccccagcagccctacaccggccagatctaccagcccacccaggcctacacccccgccagcccccagcccttctacggcaacaacttcgaggacgagccccccctgctggaggagctgggcatcaacttcgaccacatctggcagaagaccctgaccgtgctgcaccccctgaaggtggccgacggcagcatcatgaacgagaccgacctggccggccccatggtgttctgcctggccttcggcgccaccctgctgctggccggcaagatccagttcggctacgtgtacggcatcagcgccatcggctgcctgggcatgttctgcctgctgaacctgatgagcatgaccggcgtgagcttcggctgcgtggccagcgtgctgggctactgcctgctgcccatgatcctgctgagcagcttcgccgtgatcttcagcctgcagggcatggtgggcatcatcctgaccgccggcatcatcggctggtgcagcttcagcgccagcaagatcttcatcagcgccctggccatggagggccagcagctgctggtggccctgcagcccaacatcacctacggcagcaactacttcctgttctgctgcctgccctacccccagcagcacttctag

SEQ ID NO: 28244 - DNA, 429 bp, Artificial Sequence
  derived and/or modified sequence
atgagcggcttcgagaacctgaacaccgacttctaccagaccagctacagcatcgacgaccagagccagcagagctacgactacggcggcagcggcggcccctacagcaagcagtacgccggctacgactacagccagcagggcagattcgtgccccccgacatgatgcagccccagcagccctacaccggccagatctaccagcccacccaggcctacacccccgccagcccccagcccttctacggcaacaacttcgaggacgagccccccctgctggaggagctgggcatcaacttcgaccacatctggcagaagaccctgaccgtgctgcaccccctgaaggtggccgacggcagcatcatgaacgagaccgacctggcccagtggttcttcgccctgctgctggagccccactgctactggtag

SEQ ID NO: 28245 - DNA, 774 bp, Artificial Sequence
  derived and/or modified sequence
atgtccggatttgagaatctgaatactgatttttatcagacatcatattccattgatgatcaatcccagcaatcttatgactatggggggtctggcgggccttactcgaagcagtacgctggatatgactattcccagcaagggcgatttgtgccccccgacatgatgcagccacagcaaccctatactggacagatctaccagccgacacaggcatacaccccagctagtcctcagcctttctatggaaataatttcgaggatgagccgcctttgctggaggagctggggatcaactttgaccacatttggcagaaaacacttaccgttctgcatccacttaaggtcgccgacggctctattatgaacgaaaccgacctcgctggtccgatggtgttttgcctggctttcggtgctacacttcttctggcaggtaagattcagttcgggtacgtgtacgggatctccgctatcggatgtcttggtatgttttgcctgttgaacctcatgtccatgaccggagtcagctttggttgcgtcgcctctgtcttgggctactgcctgctgccaatgatcttgctgtctagcttcgccgtcattttttcgctgcaaggcatggtcgggatcatcctcaccgccggaattatcgggtggtgcagtttctccgcatctaagatattcatctcggcattggccatggaaggccaacagctcttggtggcgtacccatgcgctctcctgtacggcgtgtttgcacttatctctgtcttctag

SEQ ID NO: 28246 - DNA, 798 bp, Artificial Sequence
  derived and/or modified sequence
atgtccggctttgagaatctcaacacggatttttaccagacttcatattcaatagatgatcagtctcagcaaagctacgattacggaggttctggcggcccttattcaaagcaatacgcaggatatgattactcacagcaggggcgcttcgtgccccctgatatgatgcagcctcagcaaccatatactggtcagatatatcagcctacccaggcgtacacacccgcaagccctcagcctttctacgggaataatttcgaagatgagcctccgctgttagaagagttgggcataaatttcgaccacatatggcagaaaacgctgacagtgctccacccgctgaaggttgccgatggcagcattatgaatgagactgacctggcaggaccaatggtcttctgtctagcattcggcgcaacccttctgctggctggaaaaattcagttcgggtacgtttatgggatctcagctataggctgtttaggcatgttttgtctcctgaatctcatgagtatgactggtgtgtccttcgggtgcgtggccagcgtgctcggctattgcctgcttcccatgatcttactgagctctttcgccgtgatctttagtcttcagggcatggttggaatcatcttaactgccgggattatcggttggtgttcgttctccgcaagtaagatttttattagtgctcttgcgatggagggtcagcaattgctggtagcactgcagcccaatatcacttacggtagcaactatttcttgttttgctgcctgccctacccccagcaacacttttag

SEQ ID NO: 28247 - DNA, 774 bp, Artificial Sequence
  derived and/or modified sequence
atgtccgggttcgagaatctaaacaccgacttttatcagacgtcctactccatcgatgaccagagccagcagagctatgactacggagggtccggaggcccttactccaagcaatacgcagggtatgattatagtcagcagggacgtttcgtgcccccagacatgatgcaaccccagcagccttataccggacagatctatcagccaacacaagcctatacccccgccagccctcagcccttctatggcaataattttgaagatgaaccaccgctgctagaggaactcggtattaatttcgaccatatctggcagaagaccctaactgtattgcacccgcttaaagttgccgacgggtctattatgaacgagactgacttagcaggcccgatggtcttttgcctggcttttggcgctacactgctcctagcgggcaagatccaattcggttacgtgtacggtatttctgctatcggatgtctggggatgttttgtctgctgaacctaatgagcatgacaggcgtgagctttgggtgtgtcgccagcgtgctgggctactgcctcttgcctatgatccttttgtcctccttcgccgtcatcttttctctccagggtatggtaggcattattctaaccgccgggattattgggtggtgcagtttctctgccagtaagatctttatttctgccctggcaatggaaggccagcagctcctcgtggcatacccttgcgctttactgtatggagtgttcgccctaatctccgtattctag

SEQ ID NO: 28248 - DNA, 429 bp, Artificial Sequence
  derived and/or modified sequence
atgtccggatttgaaaatctcaacaccgatttttaccagacgtcttacagcatagacgaccagtcccagcagagctacgactatggtggttcagggggcccctacagtaagcagtacgcaggctatgattatagccagcagggccggttcgtcccacctgacatgatgcaaccgcagcagccttatactgggcagatctatcagccaacgcaagcttatacgcctgcctctccccagccgttctatggaaacaattttgaggatgaaccccctctcctggaggagctcgggatcaactttgaccacatctggcagaagacgctgaccgtcctgcacccgctcaaggtcgcggacggctcaataatgaatgagacagatctggcacagtggttctttgctttactgctggaaccgcactgttactggtag

SEQ ID NO: 28249 - DNA, 774 bp, Artificial Sequence
  derived and/or modified sequence
atgagcggctttgagaacctgaacacagacttctaccagaccagctacagcattgatgaccagagccagcagagctatgactatggaggcagcggcggcccctacagcaagcagtatgccggctatgactacagccagcagggccgctttgtgcccccagacatgatgcagccccagcagccctacacaggccagatctaccagcccacccaggcctacaccccagccagcccccagcccttctacggcaacaactttgaagatgagccccccctgctggaggagctgggcatcaactttgaccacatctggcagaagaccctgactgtgctgcaccccctgaaggtggctgatggcagcatcatgaatgaaacagacctggccggccccatggtgttctgcctggcctttggagccaccctgctgctggccggcaagatccagtttggctacgtgtatggcatcagcgccatcggctgcctgggcatgttctgcctgctgaacctgatgtccatgactggagtgtcctttggctgtgtggcctctgtgctgggctactgcctgctgcccatgatcctgctgagcagctttgctgtgatcttcagcctgcagggcatggtgggcatcatcctgacagctggcatcatcggctggtgcagcttcagcgccagcaagatcttcatcagcgccctggccatggagggccagcagctgctggtggcctacccctgtgccctgctgtatggagtgtttgccctgatctctgtgttctag

SEQ ID NO: 28250 - DNA, 798 bp, Artificial Sequence
  derived and/or modified sequence
atgagcggctttgagaacctgaacacagacttctaccagaccagctacagcattgatgaccagagccagcagagctatgactatggaggcagcggcggcccctacagcaagcagtatgccggctatgactacagccagcagggccgctttgtgcccccagacatgatgcagccccagcagccctacacaggccagatctaccagcccacccaggcctacaccccagccagcccccagcccttctacggcaacaactttgaagatgagccccccctgctggaggagctgggcatcaactttgaccacatctggcagaagaccctgactgtgctgcaccccctgaaggtggctgatggcagcatcatgaatgaaacagacctggccggccccatggtgttctgcctggcctttggagccaccctgctgctggccggcaagatccagtttggctacgtgtatggcatcagcgccatcggctgcctgggcatgttctgcctgctgaacctgatgtccatgactggagtgtcctttggctgtgtggcctctgtgctgggctactgcctgctgcccatgatcctgctgagcagctttgctgtgatcttcagcctgcagggcatggtgggcatcatcctgacagctggcatcatcggctggtgcagcttcagcgccagcaagatcttcatcagcgccctggccatggagggccagcagctgctggtggccctgcagcccaacatcacctacggcagcaactacttcctgttctgctgcctgccctacccccagcagcacttctag

SEQ ID NO: 28251 - DNA, 429 bp, Artificial Sequence
  derived and/or modified sequence
atgagcggctttgagaacctgaacacagacttctaccagaccagctacagcattgatgaccagagccagcagagctatgactatggaggcagcggcggcccctacagcaagcagtatgccggctatgactacagccagcagggccgctttgtgcccccagacatgatgcagccccagcagccctacacaggccagatctaccagcccacccaggcctacaccccagccagcccccagcccttctacggcaacaactttgaagatgagccccccctgctggaggagctgggcatcaactttgaccacatctggcagaagaccctgactgtgctgcaccccctgaaggtggctgatggcagcatcatgaatgaaacagacctggcccagtggttctttgccctgctgctggagccccactgctactggtag

SEQ ID NO: 28252 - DNA, 774 bp, Artificial Sequence
  derived and/or modified sequence
atgagcggcttcgagaacctgaacaccgacttctaccagaccagctactctatcgatgaccagtcacaacaatcctacgactacggcggttctgggggtccctattctaagcaatatgccgggtatgattattcccagcaagggaggttcgtgcctcccgacatgatgcagcctcagcagccctacacgggccagatctatcaaccaacccaggcgtacacccctgcgagcccccagcctttctacgggaataattttgaggatgaaccgcctctccttgaagaattggggattaacttcgaccacatttggcagaagaccctgaccgtgctgcatcctctgaaagtggcggacgggagtatcatgaatgaaaccgatctggccggtccaatggtgttctgtctggcctttggcgccactctgctgcttgccgggaagatacaattcggctacgtatacgggatttcagctatcggctgtctgggcatgttttgcctgctcaaccttatgtccatgaccggcgtgtccttcggctgcgttgcgtctgtattgggctactgtctcttgccaatgattctcctgagctctttcgccgttatcttttcactgcaagggatggtgggcatcatccttacagcaggaatcattggatggtgttcgttcagtgcctctaaaatctttatttccgccttagccatggagggacagcagttgctggtggcctacccttgtgctctcttgtacggtgtcttcgctcttatctcagtgttctag

SEQ ID NO: 28253 - DNA, 798 bp, Artificial Sequence
  derived and/or modified sequence
atgagcggcttcgagaacctgaacaccgacttctaccagaccagctactccattgatgaccaaagccagcagtcttatgattacggagggtctggtgggccatattccaaacagtatgccggctacgactacagccagcagggtagattcgttccccctgatatgatgcagccccagcagccttacacgggccagatctaccaacccacacaggcctatacaccggcatctccacaacctttctacgggaataacttcgaggatgaaccacctctgctggaggagttgggtattaacttcgatcacatctggcagaagaccctcactgtgctgcacccactgaaggtggccgacgggagtataatgaatgaaactgatctagccgggccaatggtgttctgcctggctttcggagcaactctgttgttggccggcaagatccaatttggttatgtctacggtattagcgcaatcgggtgtctggggatgttttgtctactgaatctaatgtccatgactggggtctcgtttgggtgtgtggcctccgtgctgggttactgtctgttgcctatgatcttactttccagtttcgcagttatcttttccttgcaaggaatggtcggcattattctgacagcagggatcatcggatggtgttcattttctgcctccaagatctttatctccgcactagccatggaggggcagcagctgttggtggccctgcagcccaacattacgtatgggagcaactacttcctcttttgttgcctcccctacccacagcagcatttttag

SEQ ID NO: 28254 - DNA, 774 bp, Artificial Sequence
  derived and/or modified sequence
atgagcggcttcgagaacctgaacaccgacttctaccagaccagctattccatagacgaccaatctcagcagtcctacgactacgggggctccggaggcccatattcaaagcagtatgctggttatgactactcccagcaaggacgctttgtacctcccgacatgatgcaaccccagcaaccctataccggacagatctatcagccaacacaggcatacacccccgcctcacctcagccattttacggcaataatttcgaagacgaaccccccctgcttgaagagttaggcattaatttcgaccatatctggcagaagactttaacggtgctgcatccacttaaagttgctgacggatctattatgaacgaaactgacctggcgggaccaatggttttttgccttgccttcggggccaccctgctcttagcaggtaagattcagtttggctatgtgtatggcatctcagccataggatgtctgggaatgttctgtctcctcaatctgatgtcaatgacaggtgtgtcgttcggctgcgtcgcgagcgtcctcggttactgtctccttccaatgattttgcttagcagcttcgccgttatcttttcactgcagggcatggtcggcattatcctaacggcaggtatcatcggttggtgctcgttttccgcctctaagattttcatatctgcactggcaatggaagggcagcaattactggtggcctatccttgcgccctcctctacggcgtgttcgcacttatcagcgtgttttag

SEQ ID NO: 28255 - DNA, 429 bp, Artificial Sequence
  derived and/or modified sequence
atgagcggcttcgagaacctgaacaccgacttctaccagaccagctatagcattgacgatcagtctcagcaaagctacgactatggcgggtccggcggcccatacagcaagcagtatgcaggatacgattatagccagcagggccggttcgtacctcccgatatgatgcagcctcagcagccatacacaggccagatctatcaacccacccaggcttacacccctgccagcccccagcctttctatggcaacaattttgaggacgagcccccactgctggaagagttagggattaacttcgaccacatctggcagaagacactgaccgtgttacaccctcttaaagttgccgatggctcaatcatgaacgaaacagacctagcccagtggttctttgccctgctgctcgaacctcactgttactggtag

SEQ ID NO: 28256 - DNA, 774 bp, Artificial Sequence
  derived and/or modified sequence
atgagtggatttgaaaatttgaacaccgacttttatcagacctcttacagcatagatgatcaatcccagcagagctatgattacgggggatctggcggaccgtactctaagcagtacgcaggatacgattactcacagcagggcaggtttgtgccccctgacatgatgcagcctcagcaaccatatacaggccagatctaccagccaacacaagcctatacccctgcaagtccccagccattctacggtaataacttcgaggacgagcccccattgcttgaagagctaggtattaacttcgatcatatttggcagaaaacgctgaccgtactgcaccccctgaaggttgcggatggcagtataatgaacgagacagatctggcaggacccatggttttttgcctggcattcggggctaccctcctgttggccggaaagattcagttcggttatgtctacggtattagtgcgatcggctgcctggggatgttttgcctgctcaatctcatgagcatgaccggtgtctcctttggatgcgtcgccagcgtcctgggctactgtctgctaccaatgatcttactgagttcctttgccgtcattttctctctgcaagggatggtgggcattatccttaccgctggcattattgggtggtgtagtttctcagcctcaaagatattcattagcgctctggcgatggaagggcaacagcttctcgtagcttatccgtgcgctcttttgtacggcgtcttcgccttaatcagcgtgttttag

SEQ ID NO: 28257 - DNA, 798 bp, Artificial Sequence
  derived and/or modified sequence
atgagcggctttgagaacctgaacaccgacttttatcagactagttactcgatcgatgatcagagtcagcagtcttacgattatggcggttccggcggaccttacagcaaacaatatgctggatacgactactcccagcagggcagatttgtcccccctgacatgatgcagccccagcagccatatacaggccagatctaccagccaacccaagcgtacacacccgcatcacctcaaccattctacggaaacaactttgaagacgagccacccctcctggaggagctgggcatcaacttcgaccacatttggcagaaaacattaactgttctgcatcccctcaaggttgccgacggatcaatcatgaacgagaccgatctcgccggtccaatggtgttctgtctggctttcggcgcaacattgctgctggcaggaaaaatacagttcgggtacgtgtacgggattagtgcaatcggctgccttggaatgttttgcctacttaaccttatgtctatgacaggagtgtcctttggttgtgtggcaagtgtgctgggttactgtctcctcccaatgatcttactctcttcttttgcagtgatcttcagtctacaaggcatggtgggcatcattttgaccgcgggaattataggttggtgtagttttagcgctagtaagatctttataagcgctctcgctatggagggccagcaactactggtggcattgcaaccaaatatcacttacgggagcaactatttcctgttttgctgtctcccctacccccagcagcatttctag

SEQ ID NO: 28258 - DNA, 774 bp, Artificial Sequence
  derived and/or modified sequence
atgtcagggtttgaaaaccttaacacggatttctatcaaacttcatacagcatcgacgaccagtcacagcagagctacgactacggtggatcaggcggtccctatagcaagcagtacgccggatacgattacagccagcagggcagattcgtgcccccagacatgatgcaaccacaacagccctatacgggtcagatttatcagcctacccaggcctacacccccgcatcaccacagcctttttacggcaataacttcgaagacgagccccctctgcttgaggaactgggaataaacttcgatcacatctggcagaagacactcacagtcctccatccccttaaagtggccgacggcagcatcatgaatgaaaccgacttggccggacctatggtattttgcctcgcatttggtgccaccctgctcctggctggcaagattcaattcggatatgtctacgggattagtgccatcggatgtctgggcatgttctgcttgttaaacctcatgtcgatgacaggggtgagcttcggttgcgtggcaagcgtgcttggctactgtctgctgcccatgattctgctatcgtcatttgcggtcattttttctctgcagggcatggttggcataattttgacagcaggaattatcgggtggtgctctttcagtgccagtaagattttcatctctgccctggctatggagggacaacagttactggtggcgtacccctgcgccctcctgtatggcgtttttgctttaatctcagttttttag

SEQ ID NO: 28259 - DNA, 429 bp, Artificial Sequence
  derived and/or modified sequence
atgagcggctttgagaatctcaatacagatttttaccagacgagctattctattgacgatcagagccagcagagttacgactacggtggaagtgggggaccatatagtaaacagtatgctggatatgattatagtcagcaggggcgtttcgtgcccccagatatgatgcagccccagcagccatacaccgggcagatttaccaaccaacccaggcctataccccagcatccccccagccgttttacggtaataacttcgaagacgaaccacctctgctggaggagttgggcatcaacttcgatcacatttggcagaaaaccctgaccgtgctccatcccctgaaggtggcggatggctccataatgaacgagaccgacttggcacagtggttctttgccttgctgctcgaaccccactgctattggtag

SEQ ID NO: 28260 - DNA, 3147 bp, Artificial Sequence
  derived and/or modified sequence
ggaagccgttctttggccctgtgacacgtagcaacggggctggttcagggtctgaaacagagtttgggggttgtttgggattagtgaagctactgcctttgccgccagcgcagcctcagagtttgattatttgcaatgtcaggctttgaaaacttaaacacggatttctaccagacaagttacagcatcgatgatcagtcacagcagtcctatgattatggaggaagtggaggaccctatagcaaacagtatgctggctatgactattcgcagcaaggcagatttgtccctccagacatgatgcagccacaacagccatacaccgggcagatttaccagccaactcaggcatatactccagcttcacctcagcctttctatggaaacaactttgaggatgagccacctttattagaagagttaggtatcaattttgaccacatctggcaaaaaacactaacagtattacatccgttaaaagtagcagatggcagcatcatgaatgaaactgatttggcaggtccaatggttttttgccttgcttttggagccacattgctactggctggcaaaatccagtttggctatgtatacgggatcagtgcaattggatgtctaggaatgttttgtttattaaacttaatgagtatgacaggtgtttcatttggttgtgtggcaagtgtccttggatattgtcttctgcccatgatcctactttccagctttgcagtgatattttctttgcaaggaatggtaggaatcattctcactgctgggattattggatggtgtagtttttctgcttccaaaatatttatttctgcattagccatggaaggacagcaacttttagtagcatatccttgcgctttgttatatggagtctttgccctgatttccgtcttttgaaaatttatctgggatgtggacatcagtgggccagatgtacaaaaaggaccttgaactcttaaattggaccagcaaactgctgcagcgcaactctcatgcagatttacatttgactgttggagcaatgaaagtaaacgtgtatctcttgttcatttttatagaacttttgcatactatattggatttacctgcggtgtgactagctttaaatgtttgtgtttatacagataagaaatgctatttctttctggttcctgcagccattgaaaaacctttttccttgcaaattataatgtttttgatagatttttatcaactgtgggaaaccaaacacaaagctgataacctttcttaaaaacgacccagtcacagtaaagaagacacaagacggccgggcgtggtagctcacgcctgtaatcccagcactttgggaggccgaggcgggcggatcacaagggcaggagatcgagaccatcctggttaacacggtgaaaccccgactctactaaaactacaaaaaaaattagctgggcgtggtggcgggcgcctgtagtcccagctactcaggaggctgaggcaggagaagtgtgaacccaggaggcggagcttgcagtgagccgagatcacaccactgcactccatccagcctgggtgacagggtgagactctgtctcaaaaaaaaaaaaaaaaggagacacaagacttactgcaaaaatatttttccaaggatttaggaaagaaaaattgccttgtattctcaagtcaggtaactcaaagcaaaaaagtgatccaaatgtagagtatgagtttgcactccaaaaatttgacattactgtaaattatctcatggaatttttgctaaaattcagagatacgggaagttcacaatctaccttattgtagacatgaaatgcgaacacttacttacatattaatgttaactcaaccttagggacctggaatggttgcattaatgctataatcgttggatcgccacatttcccaaaaataataaaaaaatcactaaccttttttaaggaaaatatttaaagttttacaaaattcaatattgcaattatcaatgtaaagtacatttgaatgcttattaaaactttcccaattaattttaactgtgttattgaatttacttttactaaactactgttctctttgtctcttttttaactaggctctgattttgacccctaatttaagctttaagaatagaaatcagctaatatagaatcagacaaaaaggggattaaatgagcagtttgagttacattattttattgtattaaatttatttgatttatattgtcatgttctcttgccagagagaatctgtaggaaaatactgtatcttgtatactgatcattggctttttctagaaaaactgtctctgattctggacaaagctcagttatagttacgagaaagatatggtacagggaggaaaatactgccttttttttttttttaaagagattttcagactaaatagaaatgtcaaaatgatgtatcaatggttcttttttagaacaagttttcaaagcataaaaagaggttgagagaaataacatatttattgattcacataagtatgtttttcttcattaatcgtctggagaaacccacttgtcattaatttgttttgggctaggttttcaaacttaccaaattgctttaaaaaagcaatttggaaggtaatttgataggctttccaacttaaccaaattttttattgtaattcttggatagtatttttgtctttttcaattcatttgtctttttcagtatagtttttgttaaggcaaatgtcttcccttaatatccaaatattgctaataaacggtagaagatgctttggaaattaaaattatctcgctgttggttagacttaacactgttaatcttcagccaaatatcacatatggatcaaattattttcttttttgttgtttaccctatcctcaacaacatttttagtttaaattattgtagagattttttttgtggtggttattttttattttgctccaaaataataaggtgcaaagctattttatgcttaactgttgctctgtcaaaacagctatgcagtggagttgcatttgatgttctagagtttgattacatgcagagttgtatatagccaaaacttctcttatcaaactctgttatgtaggcatatttatatatacattaaagactgttgtactgtgtctcaaaaagta

SEQ ID NO: 28261 - DNA, 926 bp, Artificial Sequence
  derived and/or modified sequence
gttctttggccctgtgacacgtagcaacggggctggttcagggtctgaaacagagtttgggggttgtttgggattagtgaagctactgcctttgccgccagcgcagcctcagagtttgattatttgcaatgtcaggctttgaaaacttaaacacggatttctaccagacaagttacagcatcgatgatcagtcacagcagtcctatgattatggaggaagtggaggaccctatagcaaacagtatgctggctatgactattcgcagcaaggcagatttgtccctccagacatgatgcagccacaacagccatacaccgggcagatttaccagccaactcaggcatatactccagcttcacctcagcctttctatggaaacaactttgaggatgagccacctttattagaagagttaggtatcaattttgaccacatctggcaaaaaacactaacagtattacatccgttaaaagtagcagatggcagcatcatgaatgaaactgatttggcaggtccaatggttttttgccttgcttttggagccacattgctactggctggcaaaatccagtttggctatgtatacgggatcagtgcaattggatgtctaggaatgttttgtttattaaacttaatgagtatgacaggtgtttcatttggttgtgtggcaagtgtccttggatattgtcttctgcccatgatcctactttccagctttgcagtgatattttctttgcaaggaatggtaggaatcattctcactgctgggattattggatggtgtagtttttctgcttccaaaatatttatttctgcattagccatggaaggacagcaacttttagtagcacttcagccaaatatcacatatggatcaaattattttcttttttgttgtttaccctatcctcaacaacatttttag

SEQ ID NO: 28262 - DNA, 2255 bp, Artificial Sequence
  derived and/or modified sequence
agcaacggggctggttcagggtctgaaacagagtttgggggttgtttgggattagtgaagctactgcctttgccgccagcgcagcctcagagtttggtgagtgacccaggcccgtggcacagtgttcagcttctctccacacccgtgcaaatgggcttgttgccgtctttcggcgccgcgccctggtcctttcgctcagaccctcgctctcattcaagcccttgccctgacgcggtcccctgcacctcaggcgcgaccttccagattctgcactttttcctggcaggccgcaggccttattttgcaaggaagcagtcgccttgtcagctgtaaagcccagtcctaagattatttgcaatgtcaggctttgaaaacttaaacacggatttctaccagacaagttacagcatcgatgatcagtcacagcagtcctatgattatggaggaagtggaggaccctatagcaaacagtatgctggctatgactattcgcagcaaggcagatttgtccctccagacatgatgcagccacaacagccatacaccgggcagatttaccagccaactcaggcatatactccagcttcacctcagcctttctatggaaacaactttgaggatgagccacctttattagaagagttaggtatcaattttgaccacatctggcaaaaaacactaacagtattacatccgttaaaagtagcagatggcagcatcatgaatgaaactgatttggcaggtccaatggttttttgccttgcttttggagccacattgctactggctggcaaaatccagtttggctatgtatacgggatcagtgcaattggatgtctaggaatgttttgtttattaaacttaatgagtatgacaggtgtttcatttggttgtgtggcaagtgtccttggatattgtcttctgcccatgatcctactttccagctttgcagtgatattttctttgcaaggaatggtaggaatcattctcactgctgggattattggatggtgtagtttttctgcttccaaaatatttatttctgcattagccatggaaggacagcaacttttagtagcatatccttgcgctttgttatatggagtctttgccctgatttccgtcttttgaaaatttatctgggatgtggacatcagtgggccagatgtacaaaaaggaccttgaactcttaaattggaccagcaaactgctgcagcgcaactctcatgcagatttacatttgactgttggagcaatgaaagtaaacgtgtatctcttgttcatttttatagaacttttgcatactatattggatttacctgcggtgtgactagctttaaatgtttgtgtttatacagataagaaatgctatttctttctggttcctgcagccattgaaaaacctttttccttgcaaattataatgtttttgatagatttttatcaactgtgggaaaccaaacacaaagctgataacctttcttaaaaacgacccagtcacagtaaagaagacacaagacggccgggcgtggtagctcacgcctgtaatcccagcactttgggaggccgaggcgggcggatcacaagggcaggagatcgagaccatcctggttaacacggtgaaaccccgactctactaaaactacaaaaaaaattagctgggcgtggtggcgggcgcctgtagtcccagctactcaggaggctgaggcaggagaagtgtgaacccaggaggcggagcttgcagtgagccgagatcacaccactgcactccatccagcctgggtgacagggtgagactctgtctcaaaaaaaaaaaaaaaaggagacacaagacttactgcaaaaatatttttccaaggatttaggaaagaaaaattgccttgtattctcaagtcaggtaactcaaagcaaaaaagtgatccaaatgtagagtatgagtttgcactccaaaaatttgacattactgtaaattatctcatggaatttttgctaaaattcagagatacgggaagttcacaatctaccttattgtagacatgaaatgcgaacacttacttacatattaatgttaactcaaccttagggacctggaatggttgcattaatgctataatcgttggatcgccacatttcccaaaaataataaaaaaatcactaaccttttttaaggaaaatatttaaagttttacaaaattcaatattgcaattatcaatgtaaagtacatttgaatgcttattaaaactttcccaattaa

SEQ ID NO: 28263 - DNA, 2135 bp, Artificial Sequence
  derived and/or modified sequence
agcaacggggctggttcagggtctgaaacagagtttgggggttgtttgggattagtgaagctactgcctttgccgccagcgcagcctcagagtttggtgagtgacccaggcccgtggcacagtgttcagcttctctccacacccgtgcaaatgggcttgttgccgtctttcggcgccgcgccctggtcctttcgctcagaccctcgctctcattcaagcccttgccctgacgcggtcccctgcacctcaggcgcgaccttccagattctgcactttttcctggcaggccgcaggccttattttgcaaggaagcagtcgccttgtcagctgtaaagcccagtcctaagacagtatgctggctatgactattcgcagcaaggcagatttgtccctccagacatgatgcagccacaacagccatacaccgggcagatttaccagccaactcaggcatatactccagcttcacctcagcctttctatggaaacaactttgaggatgagccacctttattagaagagttaggtatcaattttgaccacatctggcaaaaaacactaacagtattacatccgttaaaagtagcagatggcagcatcatgaatgaaactgatttggcaggtccaatggttttttgccttgcttttggagccacattgctactggctggcaaaatccagtttggctatgtatacgggatcagtgcaattggatgtctaggaatgttttgtttattaaacttaatgagtatgacaggtgtttcatttggttgtgtggcaagtgtccttggatattgtcttctgcccatgatcctactttccagctttgcagtgatattttctttgcaaggaatggtaggaatcattctcactgctgggattattggatggtgtagtttttctgcttccaaaatatttatttctgcattagccatggaaggacagcaacttttagtagcatatccttgcgctttgttatatggagtctttgccctgatttccgtcttttgaaaatttatctgggatgtggacatcagtgggccagatgtacaaaaaggaccttgaactcttaaattggaccagcaaactgctgcagcgcaactctcatgcagatttacatttgactgttggagcaatgaaagtaaacgtgtatctcttgttcatttttatagaacttttgcatactatattggatttacctgcggtgtgactagctttaaatgtttgtgtttatacagataagaaatgctatttctttctggttcctgcagccattgaaaaacctttttccttgcaaattataatgtttttgatagatttttatcaactgtgggaaaccaaacacaaagctgataacctttcttaaaaacgacccagtcacagtaaagaagacacaagacggccgggcgtggtagctcacgcctgtaatcccagcactttgggaggccgaggcgggcggatcacaagggcaggagatcgagaccatcctggttaacacggtgaaaccccgactctactaaaactacaaaaaaaattagctgggcgtggtggcgggcgcctgtagtcccagctactcaggaggctgaggcaggagaagtgtgaacccaggaggcggagcttgcagtgagccgagatcacaccactgcactccatccagcctgggtgacagggtgagactctgtctcaaaaaaaaaaaaaaaaggagacacaagacttactgcaaaaatatttttccaaggatttaggaaagaaaaattgccttgtattctcaagtcaggtaactcaaagcaaaaaagtgatccaaatgtagagtatgagtttgcactccaaaaatttgacattactgtaaattatctcatggaatttttgctaaaattcagagatacgggaagttcacaatctaccttattgtagacatgaaatgcgaacacttacttacatattaatgttaactcaaccttagggacctggaatggttgcattaatgctataatcgttggatcgccacatttcccaaaaataataaaaaaatcactaaccttttttaaggaaaatatttaaagttttacaaaattcaatattgcaattatcaatgtaaagtacatttgaatgcttattaaaactttcccaattaa

SEQ ID NO: 28264 - DNA, 684 bp, Artificial Sequence
  derived and/or modified sequence
cacgtagcaacggggctggttcagggtctgaaacagagtttgggggttgtttgggattagtgaagctactgcctttgccgccagcgcagcctcagagtttgacagtatgctggctatgactattcgcagcaaggcagatttgtccctccagacatgatgcagccacaacagccatacaccgggcagatttaccagccaactcaggcatatactccagcttcacctcagcctttctatggaaacaactttgaggatgagccacctttattagaagagttaggtatcaattttgaccacatctggcaaaaaacactaacagtattacatccgttaaaagtagcagatggcagcatcatgaatgaaactgatttggcaggtccaatggttttttgccttgcttttggagccacattgctactggctggcaaaatccagtttggctatgtatacgggatcagtgcaattggatgtctaggaatgttttgtttattaaacttaatgagtatgacaggtgtttcatttggttgtgtggcaagtgtccttggatattgtcttctgcccatgatcctactttccagctttgcagtgatattttctttgcaaggaatggtaggaatcattctcactgctgggattattggatggtgtagtttttctgcttccaaaatatttatttctgcatta

SEQ ID NO: 28265 - DNA, 653 bp, Artificial Sequence
  derived and/or modified sequence
ctcccgcccaccggtgcccaacctgctaacacgcctgcgcgagcgggcgtgccccggaagccgttctttggccctgtgacacgtagcaacggggctggttcagggtctgaaacagagtttgggggttgtttgggattagtgaagctactgcctttgccgccagcgcagcctcagagtttgattatttgcaatgtcaggctttgaaaacttaaacacggatttctaccagacaagttacagcatcgatgatcagtcacagcagtcctatgattatggaggaagtggaggaccctatagcaatatgctggctatgactattcgcagcaaggcagatttgtccctccagacatgatgcagccacaacagccatacaccgggcagatttaccagccaactcaggcatatactccagcttcacctcagcctttctatggaaacaactttgaggatgagccacctttattagaagagttaggtatcaattttgaccacatctggcaaaaaacactaacagtattacatccgttaaaagtagcagatggcagcatcatgaatgaaactgatttggcaggtccaatggttttttgccttgcttttggagccacattgctactggctggcaaaatccagtttggctatgtatacgggatcag

SEQ ID NO: 28266 - DNA, 557 bp, Artificial Sequence
  derived and/or modified sequence
gttctttggccctgtgacacgtagcaacggggctggttcagggtctgaaacagagtttgggggttgtttgggattagtgaagctactgcctttgccgccagcgcagcctcagagtttgattatttgcaatgtcaggctttgaaaacttaaacacggatttctaccagacaagttacagcatcgatgatcagtcacagcagtcctatgattatggaggaagtggaggaccctatagcaaacagtatgctggctatgactattcgcagcaaggcagatttgtccctccagacatgatgcagccacaacagccatacaccgggcagatttaccagccaactcaggcatatactccagcttcacctcagcctttctatggaaacaactttgaggatgagccacctttattagaagagttaggtatcaattttgaccacatctggcaaaaaacactaacagtattacatccgttaaaagtagcagatggcagcatcatgaatgaaactgatttggcacaatggttttttgccttgcttttggagccacattgctactggtaa

SEQ ID NO: 28267 - protein, 290 aa, Artificial Sequence
  derived and/or modified sequence
MPVQPPSKDTEEMEAEGDSAAEMNGEEEESEEERSGSQTESEEESSEMDDEDYERRRSECVSEMLDLEKQFSELKEKLFRERLSQLRLRLEEVGAERAPEYTEPLGGLQRSLKIRIQVAGIYKGFCLDVIRNKYECELQGAKQHLESEKLLLYDTLQGELQERIQRLEEDRQSLDLSSEWWDDKLHARGSSRSWDSLPPSKRKKAPLVSGPYIVYMLQEIDILEDWTAIKKARAAVSPQKRKSDDRRTHRPLRVCPARLLWCCWALPLHLALAWTPPLPSSRPAQLWPWS

SEQ ID NO: 28268 - DNA, 873 bp, Artificial Sequence
  derived and/or modified sequence
atgcctgtacagccgccttcaaaggacacagaagagatggaggcagagggtgactcagccgcagagatgaatggcgaggaggaggaatctgaagaggaacgtagtggcagccagacagaaagcgaagaagagagttctgagatggatgatgaggactatgagaggcgacgctctgagtgcgtgagcgagatgttggatctggagaaacagttttcagaactgaaagagaagctgtttagagagcgcctgtcccagctgcgtctgagactcgaagaagtgggcgccgagagagcgcctgagtacacggaacccctagggggcctgcagagatccctgaagatccgaattcaggtggctggaatctacaaaggcttttgtctggacgtcatcaggaacaagtacgagtgcgaactgcaaggcgccaagcagcatctggagtcagaaaagctactgttatacgatacgcttcagggcgaactgcaggagcggatccagcgcctggaggaggaccgccagtctctggatctgtcctctgagtggtgggatgataagctgcacgcccgcggaagttcccgttcttgggactctttgccccccagcaaaagaaagaaagccccgctcgtgagcggtccctacatcgtgtacatgcttcaggagatcgatattctggaggactggaccgccatcaagaaggctagagccgctgtttcccctcagaagcgcaagtccgacgatcgtcgcacgcacaggccattgcgagtctgtcccgcacggctgctttggtgctgttgggccctcccactgcacctggcactagcttggacccctccactgcccagtagcagacctgcacagctctggccttggtcttag

SEQ ID NO: 28269 - DNA, 873 bp, Artificial Sequence
  derived and/or modified sequence
atgcctgtgcagccccccagcaaggacacagaggagatggaggccgagggggacagcgctgctgagatgaatggagaggaggaggagagcgaggaggagaggagcggcagccagacagaaagtgaggaggagagcagcgagatggatgatgaagattatgaaagaagaagaagtgaatgtgtgtctgagatgctggacctggagaagcagttcagcgagctgaaggagaagctgttccgggagcggctgagccagctgcggctgcggctggaggaggtgggcgctgagcgggcccctgagtacacagagcccctgggcggcctgcagaggagcctgaagatccgcatccaggtggccggcatctacaagggcttctgcctggatgtgatccggaacaagtatgaatgtgagctgcagggcgccaagcagcacctggagagcgagaagctgctgctgtatgacaccctgcagggcgagctgcaggagcgcatccagaggctggaggaggaccggcagagcctggacctgagcagcgagtggtgggatgacaagctgcacgcccggggcagcagccgctcctgggacagcctgccccccagcaagaggaagaaggcccccctggtgtctggcccctacatcgtgtacatgctgcaggagattgacatcctggaggactggacagccatcaagaaggcccgggctgctgtgagcccccagaagaggaagagtgatgacaggaggacccaccggcccctgcgggtgtgcccagcccggctgctgtggtgctgctgggccctgcccctgcacctggccctggcctggaccccacccctgcccagcagcaggcctgcccagctgtggccctggagctag

SEQ ID NO: 28270 - DNA, 873 bp, Artificial Sequence
  derived and/or modified sequence
atgcccgtgcagccccccagcaaggacaccgaggagatggaggccgaaggagactccgccgcggaaatgaatggggaagaagaagagtctgaggaagagcgcagcggtagccaaaccgaatctgaggaggagtcatccgagatggacgacgaggattacgagcggaggcggagtgaatgcgtgtctgaaatgcttgacctggagaagcaattctctgagcttaaggagaagctgttccgcgagcggcttagccaactcagactgcggctcgaagaggtgggggccgagagggctccagagtacacagaaccactaggcggattgcagcgtagcctgaagatccgaattcaggtcgctggtatatacaaaggattctgtctggatgtgattcggaacaaatatgagtgcgaactccagggagccaagcagcaccttgaatcagagaagttgctgctgtatgacactctgcaaggcgagttacaggagcgcattcagcggttagaggaggaccgacagtcactcgatcttagcagtgagtggtgggacgataagctgcacgcgcggggcagtagccgaagttgggatagccttccaccttctaaacgaaagaaagcacctttggtctccggaccttacatcgtgtacatgctgcaagagattgacattctagaagactggacagctattaagaaggctcgggccgccgttagcccccagaagcgcaaatccgacgatcgaaggacacatcgccctttgcgggtttgccctgctcgactgctttggtgttgctgggctctacccttgcacctggctctcgcatggaccccccccctgccttcgagcagacccgcacagctgtggccttggtcttag

SEQ ID NO: 28271 - DNA, 873 bp, Artificial Sequence
  derived and/or modified sequence
atgcctgttcaaccgccaagcaaggacactgaggaaatggaggctgagggtgactcagccgcagaaatgaatggtgaggaggaggaatcagaagaagaacgctccggaagccaaacagaatcggaagaggagtcctctgagatggacgatgaagattatgaacggcgtcgctccgagtgcgtctcggaaatgctcgacctggaaaagcagttttcagagctcaaggaaaaattatttcgcgagcggttgagccaactcaggctgcgcctcgaagaagtgggcgcagaacgcgctcctgagtacacagagccactcggcggtctgcaaagaagcctgaagattagaatccaggtggccggaatctacaaaggcttttgccttgatgttattaggaataagtatgaatgtgaactccagggcgctaagcagcatttagaatccgagaagctgctgctttatgacaccctgcaaggcgaactgcaggagcgcattcaacgcctggaagaggaccggcagtccctagatcttagcagcgagtggtgggatgataagctccatgcacgcggaagctctcgttcatgggattccctgccacccagcaagcggaaaaaagctccactcgtgagtggaccctacattgtttatatgctgcaggagatagatattttggaagattggacagctatcaagaaggcccgagccgctgtgtctcctcaaaagcgcaagtcggatgacaggcgaacacaccgcccactgagggtgtgcccagctagactcctctggtgctgctgggcgctcccactgcatcttgccctggcctggactccccctctgccatcaagtaggccagctcagctttggccctggtcatag

SEQ ID NO: 28272 - DNA, 1445 bp, Artificial Sequence
  derived and/or modified sequence
gatgacgcacacggaagcaccgataggctctgcctcccgaagaaaagggagccgcgcagcgcctacgggagtccggcggcagcagccggtaccggcaaccacgggcagctctcagggaatctccgtcgtgaggccagaggctccagtccccgcgagtccagatgcctgtccagcctccaagcaaagacacagaagagatggaagcagagggtgattctgctgctgagatgaatggggaggaggaagagagtgaggaggagcggagcggcagccagacagagtcagaagaggagagctccgagatggatgatgaggactatgagcgacgccgcagcgagtgtgtcagtgagatgctggacctagagaagcagttctcggagctaaaggagaagttgttcagggaacgactgagtcagctgcggttgcggctggaggaagtgggggctgagagagcccctgaatacacggagccccttggggggctgcagcggagcctcaagattcgcattcaggtggcagggatctacaagggcttctgtctggatgtgatcaggaataagtacgaatgtgagctgcagggagccaaacagcacctggagagtgagaagctgctgctctatgacacgctgcagggggagctgcaggagcggatccagaggctggaggaggaccgccagagcctggacctcagctctgaatggtgggatgacaaactgcacgccagaggcagctccaggtcttgggactccctgccgcccagcaagaggaagaaggcacctctggtttctggcccatacatcgtgtacatgcttcaagagatcgacatcctggaggactggacagccatcaaaaaggctagggcagctgtgtcccctcagaagagaaaatcggatggaccttgaccctgctgttcacagccagggggaccctcagagcagctggcactgcacccaggattctcgtcttcctcctgcagacaggcggacccacaggcccctcagggtctgcccagccaggctcctgtggtgctgctgggccctcccactccatctggcactggcctggactcctcctctgccctcctcgaggcctgcacagctgtggccgtggagctgacctgaccaggcaaggctgctgtctccatccctgagccgcctgccacctcccactcctgaagatccatctcttggggctcccctgacagagaagacagccgaagtcaaagccacatcctcttgctgatgttggatgcaggctgtccggcctcagggccagggagccagtttccactgtgcgggaactctgagtcagacgtgattatctgggggtctgtccaccctggctggatctggaggcaagatgccaggccccccaggtgttctcagggcagttcttggtgtctgcttctcagattccaaggactggaattaaaacctttcctggga

SEQ ID NO: 28273 - DNA, 1363 bp, Artificial Sequence
  derived and/or modified sequence
gcacacggaagcaccgataggctctgcctcccgaagaaaagggagccgcgcagcgcctacgggagtccggcggcagcagccggtaccggcaaccacgggcagctctcagggaatctccgtcgtgaggccagaggctccagtccccgcgagtccagatgcctgtccagcctccaagcaaagacacagaagagatggaagcagagggtgattctgctgctgagatgaatggggaggaggaagagagtgaggaggagcggagcggcagccagacagagtcagaagaggagagctccgagatggatgatgaggactatgagcgacgccgcagcgagtgtgtcagtgagatgctggacctagagaagcagttctcggagctaaaggagaagttgttcagggaacgactgagtcagctgcggttgcggctggaggaagtgggggctgagagagcccctgaatacacggagccccttggggggctgcagcggagcctcaagattcgcattcaggtggcagggatctacaagggcttctgtctggatgtgatcaggaataagtacgaatgtgagctgcagggagccaaacagcacctggagagtgagaagctgctgctctatgacacgctgcagggggagctgcaggagcggatccagaggctggaggaggaccgccagagcctggacctcagctctgaatggtgggatgacaaactgcacgccagaggcagctccaggtcttgggactccctgccgcccagcaagaggaagaaggcacctctggtttctggcccatacatcgtgtacatgcttcaagagatcgacatcctggaggactggacagccatcaaaaaggctagggcagctgtgtcccctcagaagagaaaatcggatgacaggcggacccacaggcccctcagggtctgcccagccaggctcctgtggtgctgctgggccctcccactccatctggcactggcctggactcctcctctgccctcctcgaggcctgcacagctgtggccgtggagctgacctgaccaggcaaggctgctgtctccatccctgagccgcctgccacctcccactcctgaagatccatctcttggggctcccctgacagagaagacagccgaagtcaaagccacatcctcttgctgatgttggatgcaggctgtccggcctcagggccagggagccagtttccactgtgcgggaactctgagtcagacgtgattatctgggggtctgtccaccctggctggatctggaggcaagatgccaggccccccaggtgttctcagggcagttcttggtgtctgcttctcagattccaaggactggaattaaaacctttcctgggactctgg

SEQ ID NO: 28274 - DNA, 873 bp, Artificial Sequence
  derived and/or modified sequence
atgcccgtgcagccccccagcaaggacaccgaggagatggaggccgagggcgacagcgccgccgagatgaacggcgaggaggaggagagcgaggaggagagaagcggcagccagaccgagagcgaggaggagagcagcgagatggacgacgaggactacgagagaagaagaagcgagtgcgtgagcgagatgctggacctggagaagcagttcagcgagctgaaggagaagctgttcagagagagactgagccagctgagactgagactggaggaggtgggcgccgagagagcccccgagtacaccgagcccctgggcggcctgcagagaagcctgaagatcagaatccaggtggccggcatctacaagggcttctgcctggacgtgatcagaaacaagtacgagtgcgagctgcagggcgccaagcagcacctggagagcgagaagctgctgctgtacgacaccctgcagggcgagctgcaggagagaatccagagactggaggaggacagacagagcctggacctgagcagcgagtggtgggacgacaagctgcacgccagaggcagcagcagaagctgggacagcctgccccccagcaagagaaagaaggcccccctggtgagcggcccctacatcgtgtacatgctgcaggagatcgacatcctggaggactggaccgccatcaagaaggccagagccgccgtgagcccccagaagagaaagagcgacgacagaagaacccacagacccctgagagtgtgccccgccagactgctgtggtgctgctgggccctgcccctgcacctggccctggcctggaccccccccctgcccagcagcagacccgcccagctgtggccctggagctag

SEQ ID NO: 28275 - DNA, 270 bp, Artificial Sequence
  derived and/or modified sequence
atgagcgagcagggcgacctgaaccaggccatcgccgaggagggcggcaccgagcaggagaccgccacccccgagaacggcatcgtgaagagcgagagcctggacgaggaggagaagctggagctgcagagaagactggaggcccagaaccaggagagaagaaagagcaagagcggcgccggcaagggcaagctgaccagaagcctggccgtgtgcgaggagagcagcgccagacccggcggcgagagcctgcaggaccagaccctgtag

SEQ ID NO: 28276 - DNA, 99 bp, Artificial Sequence
  derived and/or modified sequence
atgagcgagcagggcgacctgaaccaggccatcgccgaggagggcggcaccgagcaggagaccgccacccccgagaacggcatcgtgaagagcgagtag

SEQ ID NO: 28277 - DNA, 165 bp, Artificial Sequence
  derived and/or modified sequence
atgagcgagcagggcgacctgaaccaggccatcgccgaggagggcggcaccgagcaggagaccgccacccccgagaacggcatcgtgaagagcgagagcctggacgaggaggagaagctggagctgcagagaagactggaggcccagaaccaggagagaagatag

SEQ ID NO: 28278 - DNA, 315 bp, Artificial Sequence
  derived and/or modified sequence
atgagcgagcagggcgacctgaaccaggccatcgccgaggagggcggcaccgagcaggagaccgccacccccgagaacggcatcgtgaagagcgagagcctggacgaggaggagaagctggagctgcagagaagactggaggcccagaaccaggagagaagaaagagcaagagcggcgccggcaagggcaagctgaccagaagcctggccgtgtgcgaggagagcagcgccagacccggcggcgagagcctgcaggaccaggagagcatccacctgcagctgagcagcttcagcagcctgcaggaggaggactag

SEQ ID NO: 28279 - DNA, 270 bp, Artificial Sequence
  derived and/or modified sequence
atgagcgaacaaggggatctcaatcaggcgattgcagaagaggggggaaccgagcaggaaaccgcaacacctgagaacggcatcgtgaaatccgagtctctagacgaagaggaaaaactagagctccaaaggaggctcgaagcacaaaaccaggaaagaaggaaatccaaatccggtgccgggaaaggcaaactgactaggtccctggctgtgtgtgaagaatcctccgcccggcctgggggtgagtccctgcaggaccagaccctgtag

SEQ ID NO: 28280 - DNA, 270 bp, Artificial Sequence
  derived and/or modified sequence
atgtctgaacagggggatctcaaccaggcgattgcagaggaggggggcacggagcaggaaacagccacccccgaaaacggaatcgtcaaaagcgagagccttgatgaggaagaaaagctggagttgcagcgcaggctggaagcccaaaatcaggagcggaggaagtctaaaagtggggccggaaaggggaagcttaccagatccttggcagtttgtgaggagtcatccgcccgacctggcggcgagtcactgcaagaccagacgttgtag

SEQ ID NO: 28281 - DNA, 270 bp, Artificial Sequence
  derived and/or modified sequence
atgagcgagcaaggggatctcaaccaggcaatagcagaggaggggggaacagaacaggaaacagctacacctgagaatggcattgtgaagtctgaaagtttggacgaggaggaaaagctcgagctacagcgcaggttggaggcccagaatcaagagaggcgaaagagtaaatctggggccggcaaggggaagctgactcgctcattagccgtatgcgaggaaagctccgcccgcccgggcggagagtcgctccaagatcagacgctgtag

SEQ ID NO: 28282 - DNA, 99 bp, Artificial Sequence
  derived and/or modified sequence
atgtcggagcagggagatttaaaccaggcgatcgccgaggaaggaggaaccgaacaggaaacagcaacccctgaaaacgggatcgtcaagagtgagtag

SEQ ID NO: 28283 - DNA, 270 bp, Artificial Sequence
  derived and/or modified sequence
atgtctgagcagggtgaccttaaccaagcaatcgccgaggaaggcggcactgagcaggagacggccactcctgagaacggaattgtgaaatccgagagcctggatgaagaagagaaactggaactgcagcgacgcttagaagctcaaaaccaggagcggcggaaatccaagagtggggcggggaaggggaaacttacgcgcagccttgccgtctgtgaagagtcttctgcccgcccgggaggcgagagtttacaagaccagactctatag

SEQ ID NO: 28284 - DNA, 270 bp, Artificial Sequence
  derived and/or modified sequence
atgagtgaacaaggagacctgaatcaggcaatcgctgaagaggggggtaccgaacaggaaaccgccacgcccgagaacggaatagttaagtctgaaagcctggacgaagaggagaagctggagctgcagagaaggctcgaggcccagaatcaagaacgccgcaagagtaaaagtggagctggtaagggaaagctcacccggagcctggcggtttgtgaagagtcctctgcccgccccggtggtgaatcactccaagaccagacgttgtag

SEQ ID NO: 28285 - DNA, 270 bp, Artificial Sequence
  derived and/or modified sequence
atgtcagagcaaggcgatttaaaccaggctatcgctgaggagggtgggactgagcaggagactgccacccctgagaacgggatagtaaagagcgagtccctcgatgaagaagagaagctcgagctccagcgacggctggaagcccagaaccaggagcgccggaaatccaaatcaggtgccgggaaaggcaagttgactcggagtctcgccgtttgtgaggaatctagcgcgaggccaggcggagagtccctgcaggatcagactctgtag

SEQ ID NO: 28286 - DNA, 270 bp, Artificial Sequence
  derived and/or modified sequence
atgtcagaacaaggcgacttgaaccaggctattgccgaggagggtggaaccgaacaggagactgcaaccccagaaaatggaattgtgaagagcgagagcttagatgaggaagagaaattagagttgcaacggcgactggaagcccaaaatcaggagagacgcaaatccaagtctggtgctggcaaaggcaagctcactcgttcactggcggtgtgcgaggagagtagcgctcgacctggtggtgaaagtcttcaggaccagactctctag

SEQ ID NO: 28287 - DNA, 270 bp, Artificial Sequence
  derived and/or modified sequence
atgtccgagcagggcgacctcaatcaggccatcgccgaggagggcggcacagaacaagagaccgctaccccggagaacgggattgtgaaatcagaaagcctggatgaggaagaaaaactagagctgcaacggcgactggaggcacagaaccaagaaagacgcaagtcgaaatctggcgccggaaagggaaaattgacccgtagcttagccgtgtgcgaagaatccagcgcacggcccggaggcgagtctcttcaagaccagactctgtag

SEQ ID NO: 28288 - DNA, 270 bp, Artificial Sequence
  derived and/or modified sequence
atgtccgagcagggcgacctgaaccaggctatcgccgaggaaggcggcacggaacaggagaccgctacaccggagaacggaattgtgaaatccgaatcattagatgaagaggagaagctggagctccagagacgactcgaagctcaaaatcaggaacgacgcaagtctaagagcggcgctggcaaggggaaactgactcgatctctggctgtttgtgaagaaagttcagcccggccaggcggtgaatctttgcaggatcaaactctttag

SEQ ID NO: 28289 - DNA, 165 bp, Artificial Sequence
  derived and/or modified sequence
atgagtgagcagggtgaccttaaccaagcaatcgctgaagagggaggaaccgaacaggagacggccactccggaaaatggcattgtcaagtcggagagcctagatgaggaggagaaactggagctgcagcgaagactggaggcccagaaccaggagaggaggtag

SEQ ID NO: 28290 - DNA, 315 bp, Artificial Sequence
  derived and/or modified sequence
atgtccgagcagggcgacctgaatcaggctatagcagaggaaggcggaaccgagcaagaaacagccacacccgagaatggaattgtgaagtccgaatcattggacgaagaggaaaaactggaactgcagcggaggttagaggcccagaatcaggaacgcaggaagagcaagtccggggctggcaagggtaaattgacgcgctccttggccgtgtgtgaggagagctcagcccgccctggcggcgagagcctgcaagaccaggaatccattcacctgcaactatctagcttttctagtctccaggaagaggactag

SEQ ID NO: 28291 - DNA, 270 bp, Artificial Sequence
  derived and/or modified sequence
atgagtgagcagggggacctgaatcaggcaatcgccgaagaggggggcaccgagcaggagaccgctacacctgaaaacggaatagtaaagtctgaaagcctcgacgaggaagagaagctcgagttgcagaggaggctcgaggctcagaatcaggagcgccgtaagtctaagagtggggccggcaagggcaagctaacaagatccctggccgtgtgcgaggaaagctctgcacggcctggcggtgaatccctgcaggaccaaactctatag

SEQ ID NO: 28292 - DNA, 270 bp, Artificial Sequence
  derived and/or modified sequence
atgtctgagcagggcgacctgaaccaggccatcgccgaggagggcggcacagagcaggagacagccaccccagaaaatggcatcgtgaagtctgagagcctggatgaggaggagaagctggagctgcagaggcggctggaggcccagaaccaggagaggaggaagagcaagagcggggccggcaagggcaagctgaccaggagcctggccgtgtgtgaggagagcagcgcccggcctggaggagagagcctgcaggaccagaccctgtag

SEQ ID NO: 28293 - DNA, 99 bp, Artificial Sequence
  derived and/or modified sequence
atgtctgagcagggcgacctgaaccaggccatcgccgaggagggcggcacagagcaggagacagccaccccagaaaatggcatcgtgaagtctgagtag

SEQ ID NO: 28294 - DNA, 165 bp, Artificial Sequence
  derived and/or modified sequence
atgtctgagcagggcgacctgaaccaggccatcgccgaggagggcggcacagagcaggagacagccaccccagaaaatggcatcgtgaagtctgagagcctggatgaggaggagaagctggagctgcagaggcggctggaggcccagaaccaggagaggaggtag

SEQ ID NO: 28295 - DNA, 315 bp, Artificial Sequence
  derived and/or modified sequence
atgtctgagcagggcgacctgaaccaggccatcgccgaggagggcggcacagagcaggagacagccaccccagaaaatggcatcgtgaagtctgagagcctggatgaggaggagaagctggagctgcagaggcggctggaggcccagaaccaggagaggaggaagagcaagagcggggccggcaagggcaagctgaccaggagcctggccgtgtgtgaggagagcagcgcccggcctggaggagagagcctgcaggaccaggagagcatccacctgcagctgagcagcttcagcagcctgcaggaggaggactag

SEQ ID NO: 28296 - DNA, 1304 bp, Artificial Sequence
  derived and/or modified sequence
aacagattttaactctgaaaagccatttccagtgtctatagactattgtgagcctggagaagtagcatttagttgggatagcttcactagagctgcctgccaaagacttccttccacaggatcttgtcgcaccagcaactgacaggagcttgggagctcgggagcttgggagagggcttatgtttttaataatgtagctgtcagttcgaagcctggaaatgttgaccctcaaagggcataaaatcttgttattttaatttgcatctgggagaatgtctgagcaaggagacctgaatcaggcaatagcagaggaaggagggactgagcaggagacggccactccagagaacggcattgttaaatcagaaagtctggatgaagaggagaaactggaactgcagaggcggctggaggctcagaatcaagaaagaagaaaatccaagtcaggagcaggaaaaggtaaactgactcgcagccttgctgtctgtgaggaatcttctgccagaccaggaggtgaaagtcttcaggatcagactctctgaaaactgcaaatggaaaggaattcaaaagaatttagattaaaagttaaataaaaagtaggcacagtagtgctgaattttcctcaaaggctctcttttgataaggctgaaccaaatataatcccaagtatcctctctccttccttgttggagatgtcttacctctcagctccccaaaatgcacttgcctataagaaacacaattgctggttcatatgaaacttaggaaatagtgaataaggtgcatttaactttggagaaatacttttatggctttggtggagatttctcaatactgcaaaagttgtccagaaatgaatctgagctgatggtgactttaagttaatattattaatatatcactgcatatttttacccttatttttgctccttacagcaagattagtaggttataaaaatttaaatttaaacaaaattatttcatgacaaaatgggaaacttcacatcatacttatttttgtttgcctttcaggcatcatattagcttttataaaaaatggtcttgctgctgaaattgtacttattttatcagaggctgggtgcagtcaagacaaaagtaaaatggtttacctgagcccaggggagggaaaattgattaagatatcattatttttgtttggtttggttttgcttttttcctcttactttaattgaaatactctgaattcccctcatggaaacagagagcattgagagcactttctttaaaaggaccaaaaataaattcctaatagattttgtcct

SEQ ID NO: 28297 - DNA, 2416 bp, Artificial Sequence
  derived and/or modified sequence
agagaagaagcaggcagcttgagacaggtggagctggatcaagctgtgaacgtgatttgctggaagctggtcattagtgttgacgatgtgtcacactgtgtaagggaatcgcatggagatgggcattccgaactgttaatggggacatgggactccagttgtctctgatcacttgtgtggattttcctggcgtagaacgacagaagccgctagtaagtcgccaagacctacagcaggaattctgcaccaaagggcataaaatcttgttattttaatttgcatctgggagaatgtctgagcaaggagacctgaatcaggcaatagcagaggaaggagggactgagcaggagacggccactccagagaacggcattgttaaatcagaaagtctggatgaagaggagaaactggaactgcagaggcggctggaggctcagaatcaagaaagaagaaaatccaagtcaggagcaggaaaaggtaaactgactcgcagccttgctgtctgtgaggaatcttctgccagaccaggaggtgaaagtcttcaggatcagactctctgaaaactgcaaatggaaaggaattcaaaagaatttagattaaaagttaaataaaaagtaggcacagtagtgctgaattttcctcaaaggctctcttttgataaggctgaaccaaatataatcccaagtatcctctctccttccttgttggagatgtcttacctctcagctccccaaaatgcacttgcctataagaaacacaattgctggttcatatgaaacttaggaaatagtgaataaggtgcatttaactttggagaaatacttttatggctttggtggagatttctcaatactgcaaaagttgtccagaaatgaatctgagctgatggtgactttaagttaatattattaatatatcactgcatatttttacccttatttttgctccttacagcaagattagtaggttataaaaatttaaatttaaacaaaattatttcatgacaaaatgggaaacttcacatcatacttatttttgtttgcctttcaggcatcatattagcttttataaaaaatggtcttgctgctgaaattgtacttattttatcagaggctgggtgcagtcaagacaaaagtaaaatggtttacctgagcccaggggagggaaaattgattaagatatcattatttttgtttggtttggttttgcttttttcctcttactttaattgaaatactctgaattcccctcatggaaacagagagcattgagagcactttctttaaaaggaccaaaaataaattcctaatagattttgtcctaagagagtgtttttttttctagcatcattttctttacatgccactcatgtcataaggcatggacaggctatctttcagtggccattactatgtttcgtacacatgctttattttacttgggctctgagaaatgtgtggctttccttcagcattttatttgtgcttctctttttaatggagattgaaaagggagaataatgtgaatatcacggcttatattattaaatgttgattgatggcttgtaatgtactgcacacaatatatgttaactctgcagaatgacagaccctgggagaagtaatgccccagttgtcccccactcctaatgccaggcagagaaggacagcctttatagacttaatctgctttttgtcccatttgacaaggtaccaggaggaaattttttaagggatcaactgtatcacagtgcccactctggacctaagtctagtgtatccatacaattggtgcagagaaataaggtgtaaatggtgctttgttcctgctggttccaagctcagaaaccaagactagctttgtaggagagaatgagagcctgcaagcctctctttggattggctgaggagtggtgggagcagggggttgatagaaaacatccagacacacatataagcaagtggccgtgctacctttttagagaataaagaaacagacttttgagtttatatgcaatgccttcattaggtaccaccggcacttacaaaatgtgcggactgaatcccagagaacactggcagatgtatacagtatatggattgtatcgcttccccaatgtttgtaaattcacagtatttggaaaactgccttcattttccagtgtgggaaaaactcttgctacctgtattacttgatctcagacccatacctgatggttcagtctgtccttaagttaaaagaattttgcttttctaatgttatactatttacctgtcagtgtattactgcaacttgaatcactcttttactgttgttggatataaacttatcctgtaccaatgtatttattaacacttgtattttattattgagcatatcaataaaaatattaaaaaataacagattgttttttacc

SEQ ID NO: 28298 - DNA, 270 bp, Artificial Sequence
  derived and/or modified sequence
atgagcgagcagggcgacctgaaccaggccatcgccgaggagggcggtactgaacaagagactgccacacccgaaaacggaatcgttaaatctgaatccctcgacgaagaagaaaagttagaactccagagacggctggaagcacagaaccaagagcgcagaaagagcaagtccggcgccggcaaaggcaagctgaccaggagccttgccgtctgtgaagaaagcagcgccaggccaggcggtgaaagcctgcaggatcagacactttag

SEQ ID NO: 28299 - DNA, 270 bp, Artificial Sequence
  derived and/or modified sequence
atgagcgagcagggcgacctgaaccaggccatcgccgaggagggcggtacagagcaggagactgctaccccagagaacggaatcgttaagtctgaatcactggacgaggaagagaagctggagctccagaggcgactcgaggcccagaatcaggaaagacgtaaatcaaaaagcggagccggcaaaggcaagttgacccggtccctggcagtctgcgaggaaagttctgcaaggcctggaggggagagcctccaagaccaaaccttatag

SEQ ID NO: 28300 - DNA, 270 bp, Artificial Sequence
  derived and/or modified sequence
atgagcgagcagggcgacctgaaccaggccatcgccgaggagggcggaacagaacaagaaaccgctacacccgaaaatgggattgttaaatctgagtctttagacgaagaggagaagctcgagctccagagacggctggaagctcagaaccaggagcggcgaaagagtaagtctggagccggtaaagggaagttaacgagatctctcgccgtatgcgaggaatcctcagcccgaccgggcggggagagcctgcaggaccagaccctatag

SEQ ID NO: 28301 - DNA, 99 bp, Artificial Sequence
  derived and/or modified sequence
atgagcgagcagggcgacctgaaccaggccatcgccgaggagggcggaaccgagcaggaaacagcaacaccagagaatggaatcgttaagtcggagtag

SEQ ID NO: 28302 - DNA, 270 bp, Artificial Sequence
  derived and/or modified sequence
atgagcgagcagggcgacctgaaccaggccatcgccgaggagggcggcaccgaacaggagaccgcaaccccagagaacggcatcgtgaagtccgagagtctggatgaggaggagaagctggagctgcaacgcagactggaggcccaaaatcaggagaggcgcaagtctaaatccggggccggaaaggggaagcttacgcgcagcttagccgtatgcgaagagtcttcagccaggcccggaggggaatctcttcaagatcagacactctag

SEQ ID NO: 28303 - DNA, 270 bp, Artificial Sequence
  derived and/or modified sequence
atgagcgagcagggcgacctgaaccaggccatcgccgaggagggcggcaccgaacaggagactgcaactccggagaacgggattgtgaagtctgagagtctggatgaggaggagaagctcgaactgcagaggcggcttgaggcccaaaatcaggagcgccgcaaatctaaaagcggagccggaaaagggaaacttacgcgctctctcgccgtgtgcgaggaatcctcagctcgccctggcggagaatccttgcaggatcagacactatag

SEQ ID NO: 28304 - DNA, 270 bp, Artificial Sequence
  derived and/or modified sequence
atgagcgagcagggcgacctgaaccaggccatcgccgaggagggcgggacagagcaggagacagcaacgccagagaacgggattgttaagagcgaaagcctggatgaggaggaaaagcttgagctgcagagacgcctagaggcacagaatcaggagcggagaaagagcaagtccggggccggcaagggcaagcttaccagatccctggccgtgtgtgaagagtcctcagccaggcccggaggtgagagcctgcaggaccagactttgtag

SEQ ID NO: 28305 - DNA, 270 bp, Artificial Sequence
  derived and/or modified sequence
atgagcgagcagggcgacctgaaccaggccatcgccgaggagggcgggacagaacaggaaaccgctacacccgaaaacggaatcgtcaagtcagaatcgttggacgaggaggagaagctcgaactgcagcgcagactggaagctcaaaatcaggaaaggcgcaagagtaaatctggggccggcaaaggtaagctgactagaagcttggccgtgtgcgaagagagcagcgcacggcccggcggcgaaagcctgcaagatcagactttatag

SEQ ID NO: 28306 - DNA, 270 bp, Artificial Sequence
  derived and/or modified sequence
atgagcgagcagggcgacctgaaccaggccatcgccgaggagggcggcacagagcaagaaactgcaacacccgaaaacgggattgttaagtctgagagcttggacgaggaagagaagctggagctgcagcggcggctagaggcccagaatcaagaacggaggaagtcaaaatcaggggcgggtaagggcaaactgacgcgctcccttgcagtgtgcgaggaaagctctgctcgccctgggggcgaatcgctgcaggaccagactctctag

SEQ ID NO: 28307 - DNA, 270 bp, Artificial Sequence
  derived and/or modified sequence
atgagcgagcagggcgacctgaaccaggccatcgccgaggagggcggaaccgaacaggagacagcgactcctgagaacgggatcgtaaagagtgaatctctcgacgaggaggaaaagctggaactgcagagaagactggaagcacaaaatcaagaaagaaggaaaagcaagagcggggccgggaaggggaaacttacaagatccctggccgtttgtgaggaatccagcgcgagacctggcggtgaatctctgcaggatcagaccctttag

SEQ ID NO: 28308 - DNA, 165 bp, Artificial Sequence
  derived and/or modified sequence
atgagcgagcagggcgacctgaaccaggccatcgccgaggagggcggtaccgagcaggagactgctacaccggagaacggcattgtgaagtctgaatcgttagatgaggaagagaagctcgagcttcagagacgccttgaagcacagaaccaggagcgccgctag

SEQ ID NO: 28309 - DNA, 315 bp, Artificial Sequence
  derived and/or modified sequence
atgagcgagcagggcgacctgaaccaggccatcgccgaggagggcggcacagaacaagaaaccgctacaccggaaaatggcatcgtgaagagtgagtccctagatgaagaggaaaagctggagctgcagaggcgcctcgaagcccagaaccaggagagacgcaaaagcaagagcggagcggggaaaggcaaactaacgagaagcttggccgtgtgtgaggagagtagtgccagaccggggggggaatcactgcaggaccaagaatcaattcatctccagctgtcctccttctcatccctgcaggaagaagactag

SEQ ID NO: 28310 - DNA, 270 bp, Artificial Sequence
  derived and/or modified sequence
atgagcgagcagggcgacctgaaccaggccatcgccgaggagggcggaacagagcaggagactgcaaccccagagaacggcattgtcaagagcgaaagcttggacgaggaagaaaaactcgagctgcagcgccgtcttgaagcccaaaatcaggagagacggaagagcaagagcggtgccgggaagggaaagttgacacgttctctggcagtatgtgaagagtccagtgcccgcccaggtggcgagtcactgcaggatcagacattatag

SEQ ID NO: 28311 - DNA, 2506 bp, Artificial Sequence
  derived and/or modified sequence
attagagaagaagcaggcagcttgagacaggtggagctggatcaagctgtgaacgtgatttgctggaagctggtcattagtgttagaaaccccgtcttatttatttcatccttcaccctaccatgattattgcaattattattatttatttttcatcttttttcaggttgacgatgtgtcacactgtgtaagggaatcgcatggagatgggcattccgaactgttaatggggacatgggactccagttgtctctgatcacttgtgtggattttcctggcgtagaacgacagaagccgctagtaagtcgccaagacctacagcaggaattctgcaccaaagggcataaaatcttgttattttaatttgcatctgggagaatgtctgagcaaggagacctgaatcaggcaatagcagaggaaggagggactgagcaggagacggccactccagagaacggcattgttaaatcagaaagtctggatgaagaggagaaactggaactgcagaggcggctggaggctcagaatcaagaaagaagaaaatccaagtcaggagcaggaaaaggtaaactgactcgcagccttgctgtctgtgaggaatcttctgccagaccaggaggtgaaagtcttcaggatcagactctctgaaaactgcaaatggaaaggaattcaaaagaatttagattaaaagttaaataaaaagtaggcacagtagtgctgaattttcctcaaaggctctcttttgataaggctgaaccaaatataatcccaagtatcctctctccttccttgttggagatgtcttacctctcagctccccaaaatgcacttgcctataagaaacacaattgctggttcatatgaaacttaggaaatagtgaataaggtgcatttaactttggagaaatacttttatggctttggtggagatttctcaatactgcaaaagttgtccagaaatgaatctgagctgatggtgactttaagttaatattattaatatatcactgcatatttttacccttatttttgctccttacagcaagattagtaggttataaaaatttaaatttaaacaaaattatttcatgacaaaatgggaaacttcacatcatacttatttttgtttgcctttcaggcatcatattagcttttataaaaaatggtcttgctgctgaaattgtacttattttatcagaggctgggtgcagtcaagacaaaagtaaaatggtttacctgagcccaggggagggaaaattgattaagatatcattatttttgtttggtttggttttgcttttttcctcttactttaattgaaatactctgaattcccctcatggaaacagagagcattgagagcactttctttaaaaggaccaaaaataaattcctaatagattttgtcctaagagagtgtttttttttctagcatcattttctttacatgccactcatgtcataaggcatggacaggctatctttcagtggccattactatgtttcgtacacatgctttattttacttgggctctgagaaatgtgtggctttccttcagcattttatttgtgcttctctttttaatggagattgaaaagggagaataatgtgaatatcacggcttatattattaaatgttgattgatggcttgtaatgtactgcacacaatatatgttaactctgcagaatgacagaccctgggagaagtaatgccccagttgtcccccactcctaatgccaggcagagaaggacagcctttatagacttaatctgctttttgtcccatttgacaaggtaccaggaggaaattttttaagggatcaactgtatcacagtgcccactctggacctaagtctagtgtatccatacaattggtgcagagaaataaggtgtaaatggtgctttgttcctgctggttccaagctcagaaaccaagactagctttgtaggagagaatgagagcctgcaagcctctctttggattggctgaggagtggtgggagcagggggttgatagaaaacatccagacacacatataagcaagtggccgtgctacctttttagagaataaagaaacagacttttgagtttatatgcaatgccttcattaggtaccaccggcacttacaaaatgtgcggactgaatcccagagaacactggcagatgtatacagtatatggattgtatcgcttccccaatgtttgtaaattcacagtatttggaaaactgccttcattttccagtgtgggaaaaactcttgctacctgtattacttgatctcagacccatacctgatggttcagtctgtccttaagttaaaagaattttgcttttctaatgttatactatttacctgtcagtgtattactgcaacttgaatcactcttttactgttgttggatataaacttatcctgtaccaatgtatttattaacacttgtattttattattgagcatatcaataaaaatattaaaaaataacagattgttttttaccaa

SEQ ID NO: 28312 - DNA, 270 bp, Artificial Sequence
  derived and/or modified sequence
atgtcagaacaaggggacctcaaccaggccattgctgaggaggggggaacggaacaggagaccgcaacccccgagaatggaatcgtcaaatccgagagcttagacgaggaagaaaaactggaactccagcgtcggttggaagcccagaaccaggaaaggagaaagagtaagagcggcgctggtaaaggcaagttgactcgttctctggccgtgtgcgaggagtcaagcgcaaggccgggaggtgaaagcctccaggatcaaaccttatag

SEQ ID NO: 28313 - DNA, 270 bp, Artificial Sequence
  derived and/or modified sequence
atgagcgagcagggggacttaaatcaggctatcgccgaagagggagggacagagcaggagactgccacacctgaaaacggtattgtgaaatccgaatccctagacgaggaggaaaagctagagctgcagagaaggctggaggctcagaatcaggagagaaggaagtccaagtccggagccggaaagggaaaactgactcgctcattggctgtctgtgaggagtcctccgcgaggcccggtggagagagtctacaagatcagacgctctag

SEQ ID NO: 28314 - DNA, 270 bp, Artificial Sequence
  derived and/or modified sequence
atgagcgagcagggagacctgaatcaggcgatagctgaggaaggcggtacagagcaagaaacagcaacccccgagaatggaatcgtgaaatcggagagtctagacgaggaggagaagttggaattgcagaggcgtttggaggcacaaaaccaagaacggcgaaaatcaaagtcaggggcaggcaaagggaagttgacccggagcttggcagtttgcgaggaatccagtgccaggccaggcggagagtcactccaggaccagacgctctag

SEQ ID NO: 28315 - DNA, 99 bp, Artificial Sequence
  derived and/or modified sequence
atgtctgaacagggggatttgaatcaagccatagccgaagagggtggcacagaacaggaaaccgccacccctgagaacggtatcgtcaagagtgagtag

SEQ ID NO: 28316 - DNA, 270 bp, Artificial Sequence
  derived and/or modified sequence
atgagtgaacagggcgatctaaatcaagcaatcgccgaagaaggcggaactgagcaggagacagccaccccagaaaatggtatcgtcaaatctgagtctttggatgaagaagagaagctagaattgcagaggagattggaggcccagaatcaagaacgcagaaaaagcaagtctggtgccggaaaaggcaagctaaccagaagcctggcagtttgcgaagagagttccgcgcgaccaggaggcgaaagcctacaggatcaaacactctag

SEQ ID NO: 28317 - DNA, 270 bp, Artificial Sequence
  derived and/or modified sequence
atgagcgaacagggtgatttaaaccaagcaatcgctgaagagggaggaaccgaacaggagaccgctacacctgaaaatggtatagtaaagtcggaatcattggacgaggaagagaaactcgagctccaacgcaggctggaggctcaaaatcaggaaagacgaaagagcaaaagcggggctggcaaggggaaattgactaggagtctggctgtgtgcgaggaaagttcagccaggcccggtggcgagagtctgcaagatcaaaccctctag

SEQ ID NO: 28318 - DNA, 270 bp, Artificial Sequence
  derived and/or modified sequence
atgtcggagcagggcgatctaaatcaggcaatcgccgaagagggaggtactgaacaagagaccgcaactccggaaaacggcattgttaaatccgagtctctggatgaggaggaaaagctagagctgcagagaaggttggaagcccagaaccaggagcgtagaaagagtaagtctggggctggcaaggggaagctaactagatcccttgcagtgtgcgaagaaagttccgccaggcccggtggcgagtccttacaggaccaaactctctag

SEQ ID NO: 28319 - DNA, 270 bp, Artificial Sequence
  derived and/or modified sequence
atgtccgagcagggggacctgaatcaagccattgccgaggagggaggaaccgagcaggagacagcgacaccagagaacggaatagtgaagtccgaatctctggatgaagaagagaaactcgagctccagcggcgactggaggcacagaaccaggagcgacgaaaatcaaagagcggagcaggcaaaggaaagctcacacgctccttggccgtttgtgaggagagctccgcccgacctgggggagagtctctccaggaccagaccctgtag

SEQ ID NO: 28320 - DNA, 270 bp, Artificial Sequence
  derived and/or modified sequence
atgagcgagcagggagatttgaatcaggcaatcgcggaggaaggaggcactgagcaagagacggccactccggagaatggaatcgtcaagtccgagtctctcgatgaagaggagaagctggagttgcagcggaggctggaggcacagaaccaggagagacgcaaatctaaaagcggagccggtaaaggaaaacttactcgctccctggccgtgtgtgaagagagtagcgcacgcccaggcggagaatccctccaggaccagacgctgtag

SEQ ID NO: 28321 - DNA, 270 bp, Artificial Sequence
  derived and/or modified sequence
atgtccgagcagggggacctaaaccaggcgatcgctgaagaaggaggaacggaacaggagacggcgacaccggaaaacgggatagtcaagtcggagagcttagatgaggaggaaaagctggaactccagcgcaggctcgaagctcagaatcaagaacgacggaaaagcaagagcggcgctggaaaggggaaattaaccagaagtttggctgtgtgtgaggagtcttccgctcgcccaggtggcgagtccctgcaagatcagaccctctag

SEQ ID NO: 28322 - DNA, 568 bp, Artificial Sequence
  derived and/or modified sequence
gatgcatttagtgttttcatagataggttgacgatgtgtcacactgtgtaagggaatcgcatggagatgggcattccgaactgttaatggggacatgggactccagttgtctctgatcacttgtgtggattttcctggcgtagaacgacagaagccgctagtaagtcgccaagacctacagcaggaattctgcaccaaagggcataaaatcttgttattttaatttgcatctgggagaatgtctgagcaaggagacctgaatcaggcaatagcagaggaaggagggactgagcaggagacggccactccagagaacggcattgttaaatcagaaagtctggatgaagaggagaaactggaactgcagaggcggctggaggctcagaatcaagaaagaagaaaatccaagtcaggagcaggaaaaggtaaactgactcgcagccttgctgtctgtgaggaatcttctgccagaccaggaggtgaaagtcttcaggatcagactctctgaaaactgcaaatggaaaggaattcaaaagaatttagattaaaagttaaataaaaagtaggc

SEQ ID NO: 28323 - DNA, 315 bp, Artificial Sequence
  derived and/or modified sequence
atgagtgaacagggcgacctcaatcaggctatagccgaggaaggaggcaccgaacaagaaaccgccacccccgagaacggaatcgtgaaaagcgagtccctcgacgaggaagagaagctggaactgcagagacgcctggaagctcagaatcaggaacgaagaaagtccaagtcaggcgctggcaagggtaagctgacccgctctctcgcagtgtgcgaagaatctagtgccagacccggaggggagtctctgcaggaccaagaaagtatccatttacaactctcgtctttctcatcactccaggaggaggactag

SEQ ID NO: 28324 - DNA, 3150 bp, Artificial Sequence
  derived and/or modified sequence
gggtgggactggcagagctacggacaggtgggagcagtcagacagcctgagagagggagaccagaacgcaaagagagcgagagcattaagtaggcagggagaggcacacagaaagatagacagcaacactcgcgtgctccctccctccacacgccctcctcttaccgagcgaagcggccaggggcacagagtgggagaggactgtgggcacagaagaccggaagagggacgctgcattgctggtgggacggagggattcggacggacggacagaccagcgcacagactggcagcctgcgagagtggcagctttgagagcagagcgcagcaaagcgagaatcccgcgccgagctgctagtcggacccacagacggtcggactgacagacgtgcagacggacagaagagcagacaggaggcgggggcgcgttcactcccggcggccagccggccagagaaggcggcggtggcaccttctgagcgcgtccggagcagagaccagcagcagcaggggcagcggggacacaagccgcgaccgagccgccgccgcagccctggctgccacagctgtgtgggatcccagccgacactgcagaaagctccttttactagcagttaaataaatcgaccaaaaacaaaacaaacaaacaaacccaacaacaacaacaacaacaaaagccaagccaaaagccaaaacaaacaaatccagccaaatcaatcattgagaaacaataatattaataaaatccaaaactaaatcaaaccaatcaaggcaccaagacgcaggggggatatccacagttcgatcaaggttgacgatgtgtcacactgtgtaagggaatcgcatggagatgggcattccgaactgttaatggggacatgggactccagttgtctctgatcacttgtgtggattttcctggcgtagaacgacagaagccgctagtaagtcgccaagacctacagcaggaattctgcaccaaagggcataaaatcttgttattttaatttgcatctgggagaatgtctgagcaaggagacctgaatcaggcaatagcagaggaaggagggactgagcaggagacggccactccagagaacggcattgttaaatcagaaagtctggatgaagaggagaaactggaactgcagaggcggctggaggctcagaatcaagaaagaagaaaatccaagtcaggagcaggaaaaggtaaactgactcgcagccttgctgtctgtgaggaatcttctgccagaccaggaggtgaaagtcttcaggatcagactctctgaaaactgcaaatggaaaggaattcaaaagaatttagattaaaagttaaataaaaagtaggcacagtagtgctgaattttcctcaaaggctctcttttgataaggctgaaccaaatataatcccaagtatcctctctccttccttgttggagatgtcttacctctcagctccccaaaatgcacttgcctataagaaacacaattgctggttcatatgaaacttaggaaatagtgaataaggtgcatttaactttggagaaatacttttatggctttggtggagatttctcaatactgcaaaagttgtccagaaatgaatctgagctgatggtgactttaagttaatattattaatatatcactgcatatttttacccttatttttgctccttacagcaagattagtaggttataaaaatttaaatttaaacaaaattatttcatgacaaaatgggaaacttcacatcatacttatttttgtttgcctttcaggcatcatattagcttttataaaaaatggtcttgctgctgaaattgtacttattttatcagaggctgggtgcagtcaagacaaaagtaaaatggtttacctgagcccaggggagggaaaattgattaagatatcattatttttgtttggtttggttttgcttttttcctcttactttaattgaaatactctgaattcccctcatggaaacagagagcattgagagcactttctttaaaaggaccaaaaataaattcctaatagattttgtcctaagagagtgtttttttttctagcatcattttctttacatgccactcatgtcataaggcatggacaggctatctttcagtggccattactatgtttcgtacacatgctttattttacttgggctctgagaaatgtgtggctttccttcagcattttatttgtgcttctctttttaatggagattgaaaagggagaataatgtgaatatcacggcttatattattaaatgttgattgatggcttgtaatgtactgcacacaatatatgttaactctgcagaatgacagaccctgggagaagtaatgccccagttgtcccccactcctaatgccaggcagagaaggacagcctttatagacttaatctgctttttgtcccatttgacaaggtaccaggaggaaattttttaagggatcaactgtatcacagtgcccactctggacctaagtctagtgtatccatacaattggtgcagagaaataaggtgtaaatggtgctttgttcctgctggttccaagctcagaaaccaagactagctttgtaggagagaatgagagcctgcaagcctctctttggattggctgaggagtggtgggagcagggggttgatagaaaacatccagacacacatataagcaagtggccgtgctacctttttagagaataaagaaacagacttttgagtttatatgcaatgccttcattaggtaccaccggcacttacaaaatgtgcggactgaatcccagagaacactggcagatgtatacagtatatggattgtatcgcttccccaatgtttgtaaattcacagtatttggaaaactgccttcattttccagtgtgggaaaaactcttgctacctgtattacttgatctcagacccatacctgatggttcagtctgtccttaagttaaaagaattttgcttttctaatgttatactatttacctgtcagtgtattactgcaacttgaatcactcttttactgttgttggatataaacttatcctgtaccaatgtatttattaacacttgtattttattattgagcatatcaataaaaatattaaaaaataacagattgttttttaccaa

SEQ ID NO: 28325 - DNA, 270 bp, Artificial Sequence
  derived and/or modified sequence
atgagtgaacaaggcgacctgaaccaagcaatcgccgaagagggcggtacagaacaagagacagccacacccgagaacggtatcgtgaagtccgaaagcctggacgaagaagagaagctggagcttcagcggcgactagaggcacagaatcaagagaggaggaagagcaaatcaggagccggaaagggaaagctcacacggtctctggccgtctgcgaggaaagcagcgctaggcctggaggggagtctctgcaggaccagacactgtag

SEQ ID NO: 28326 - DNA, 1015 bp, Artificial Sequence
  derived and/or modified sequence
gaagaagcaggcagcttgagacaggtggagctggatcaagctgtgaacgtgatttgctggaagctggtcattagtgttgacgatgtgtcacactgtgtaagggaatcgcatggagatgggcattccgaactgttaatggggacatgggactccagttgtctctgatcacttgtgtggattttcctggcgtagaacgacagaagccgctagtaagtcgccaagacctacagcaggaattctgcaccaaagcttaaaaaagtgaggaggaagtaaatgctaaattattcatgagcctcatttgacagcacatcagaaggggaagtgtcaggggttttataaagggcataaaatcttgttattttaatttgcatctgggagaatgtctgagcaaggagacctgaatcaggcaatagcagaggaaggagggactgagcaggagacggccactccagagaacggcattgttaaatcagaaagtctggatgaagaggagaaactggaactgcagaggcggctggaggctcagaatcaagaaagaagaaaatccaagtcaggagcaggaaaaggtaaactgactcgcagccttgctgtctgtgaggaatcttctgccagaccaggaggtgaaagtcttcaggatcagactctctgaaaactgcaaatggaaaggaattcaaaagaatttagattaaaagttaaataaaaagtaggcacagtagtgctgaattttcctcaaaggctctcttttgataaggctgaaccaaatataatcccaagtatcctctctccttccttgttggagatgtcttacctctcagctccccaaaatgcacttgcctataagaaacacaattgctggttcatatgaaacttaggaaatagtgaataaggtgcatttaactttggagaaatacttttatggctttggtggagatttctcaatactgcaaaagttgtccagaaatgaatctgagctgatggtgactttaagttaatattattaatatatcactgcata

SEQ ID NO: 28327 - DNA, 561 bp, Artificial Sequence
  derived and/or modified sequence
agaagtcgagggtcatttgttcaaaagttggagaaatatcctcttttgttgcttcttctactctgtagtggagaatggggaactggtagttgtgtgggagttatgtgtctctaagatttgtcgacccattttgatggcaagggcataaaatcttgttattttaatttgcatctgggagaatgtctgagcaaggagacctgaatcaggcaatagcagaggaaggagggactgagcaggagacggccactccagagaacggcattgttaaatcagaaagtctggatgaagaggagaaactggaactgcagaggcggctggaggctcagaatcaagaaagaagaaaatccaagtcaggagcaggaaaaggtaaactgactcgcagccttgctgtctgtgaggaatcttctgccagaccaggaggtgaaagtcttcaggatcagactctctgaaaactgcaaatggaaaggaattcaaaagaatttagattaaaagttaaataaaaagtaggcacagtagtgctgaattttcctcaaaggctctcttttgataaggctgaaccaa

SEQ ID NO: 28328 - DNA, 1103 bp, Artificial Sequence
  derived and/or modified sequence
attcacaagtgtgtgtaaagggggtgtggatgggacaactgcatctgcctcttgtgcatgccttggggcataaaatcttgttattttaatttgcatctgggagaatgtctgagcaaggagacctgaatcaggcaatagcagaggaaggagggactgagcaggagacggccactccagagaacggcattgttaaatcagaaagtctggatgaagaggagaaactggaactgcagaggcggctggaggctcagaatcaagaaagaagaaaatccaagtcaggagcaggaaaaggtaaactgactcgcagccttgctgtctgtgaggaatcttctgccagaccaggaggtgaaagtcttcaggatcagactctctgaaaactgcaaatggaaaggaattcaaaagaatttagattaaaagttaaataaaaagtaggcacagtagtgctgaattttcctcaaaggctctcttttgataaggctgaaccaaatataatcccaagtatcctctctccttccttgttggagatgtcttacctctcagctccccaaaatgcacttgcctataagaaacacaattgctggttcatatgaaacttaggaaatagtgaataaggtgcatttaactttggagaaatacttttatggctttggtggagatttctcaatactgcaaaagttgtccagaaatgaatctgagctgatggtgactttaagttaatattattaatatatcactgcatatttttacccttatttttgctccttacagcaagattagtaggttataaaaatttaaatttaaacaaaattatttcatgacaaaatgggaaacttcacatcatacttatttttgtttgcctttcaggcatcatattagcttttataaaaaatggtcttgctgctgaaattgtacttattttatcagaggctgggtgcagtcaagacaaaagtaaaatggtttacctgagcccaggggagggaaaattgattaagatatcattatttttgtttggtttggttttgcttttttcctcttactttaattgaaatactctgaattcccctcatggaaacagagagcattgagagcactttctttaaaag

SEQ ID NO: 28329 - DNA, 2880 bp, Artificial Sequence
  derived and/or modified sequence
agcatttagttgggatagcttcactagagctgcctgccaaagacttccttccacaggatcttgtcgcaccagcaactgacaggagcttgggagctcgggagcttgggagagggcttatgtttttaataatgtagctgtcagttcgaagcctggaaatgttgaccctcaaaggtttattgccaaaattagataccatatttatgctgaattattaccttttcaatagttttttttgaccttgcagactactgtattctttatacctagggaagcatgtctatgtttggaacctgcaaataatttttcagtcatcttagagatgctgcagaacatcaatgccacatcttgagtcagaagtcgagggtcatttgttcaaaagttggagaaatatcctcttttgttgcttcttctactctgtagtggagaatggggaactggtagttgtgtgggagttatgtgtctctaagatttgtcgacccattttgatggcaaggtgtattcacaagtgtgtgtaaagggggtgtggatgggacaactgcatctgcctcttgtgcatgccttgggtacttgatttcatcttgttttttcccccttttgtataaaattctcaaaattgctcatttggatttgaatatgaaaggagaaatgaaatctctaaagaatgatagtaaataccttgcactgactttattttctgatatcttaaccttctagggcataaaatcttgttattttaatttgcatctgggagaatgtctgagcaaggagacctgaatcaggcaatagcagaggaaggagggactgagcaggagacggccactccagagaacggcattgttaaatcagaaagtctggatgaagaggagaaactggaactgcagaggcggctggaggctcagaatcaagaaagaagaaaatccaagtcaggagcaggaaaaggtaaactgactcgcagccttgctgtctgtgaggaatcttctgccagaccaggaggtgaaagtcttcaggatcagactctctgaaaactgcaaatggaaaggaattcaaaagaatttagattaaaagttaaataaaaagtaggcacagtagtgctgaattttcctcaaaggctctcttttgataaggctgaaccaaatataatcccaagtatcctctctccttccttgttggagatgtcttacctctcagctccccaaaatgcacttgcctataagaaacacaattgctggttcatatgaaacttaggaaatagtgaataaggtgcatttaactttggagaaatacttttatggctttggtggagatttctcaatactgcaaaagttgtccagaaatgaatctgagctgatggtgactttaagttaatattattaatatatcactgcatatttttacccttatttttgctccttacagcaagattagtaggttataaaaatttaaatttaaacaaaattatttcatgacaaaatgggaaacttcacatcatacttatttttgtttgcctttcaggcatcatattagcttttataaaaaatggtcttgctgctgaaattgtacttattttatcagaggctgggtgcagtcaagacaaaagtaaaatggtttacctgagcccaggggagggaaaattgattaagatatcattatttttgtttggtttggttttgcttttttcctcttactttaattgaaatactctgaattcccctcatggaaacagagagcattgagagcactttctttaaaaggaccaaaaataaattcctaatagattttgtcctaagagagtgtttttttttctagcatcattttctttacatgccactcatgtcataaggcatggacaggctatctttcagtggccattactatgtttcgtacacatgctttattttacttgggctctgagaaatgtgtggctttccttcagcattttatttgtgcttctctttttaatggagattgaaaagggagaataatgtgaatatcacggcttatattattaaatgttgattgatggcttgtaatgtactgcacacaatatatgttaactctgcagaatgacagaccctgggagaagtaatgccccagttgtcccccactcctaatgccaggcagagaaggacagcctttatagacttaatctgctttttgtcccatttgacaaggtaccaggaggaaattttttaagggatcaactgtatcacagtgcccactctggacctaagtctagtgtatccatacaattggtgcagagaaataaggtgtaaatggtgctttgttcctgctggttccaagctcagaaaccaagactagctttgtaggagagaatgagagcctgcaagcctctctttggattggctgaggagtggtgggagcagggggttgatagaaaacatccagacacacatataagcaagtggccgtgctacctttttagagaataaagaaacagacttttgagtttatatgcaatgccttcattaggtaccaccggcacttacaaaatgtgcggactgaatcccagagaacactggcagatgtatacagtatatggattgtatcgcttccccaatgtttgtaaattcacagtatttggaaaactgccttcattttccagtgtgggaaaaactcttgctacctgtattacttgatctcagacccatacctgatggttcagtctgtccttaagttaaaagaattttgcttttctaatgttatactatttacctgtcagtgtattactgcaacttgaatcactcttttactgttgttggatataaacttatcctgtaccaatgtatttattaacacttgtattttattattgagcatatcaataaaaatattaaaaaataacagattgttttttaccaa

SEQ ID NO: 28330 - DNA, 657 bp, Artificial Sequence
  derived and/or modified sequence
tttgttaaaaatcagaaaacctttgacacacttttagataaatacacctactcctttgatcctttgtgtatgtattaccacagggcttaaatatcttaagattttagttaatgtcattttcatgaaagacagtcatttggaagccaagagctctatctatgttttgttcaaatagccgagtaatctactatcttggcagtaattacttctgctgcatttctaatgtgaattgcatgtgagagcttatgaatacactcttttcaagtgtatgtgggttttcaaggttgacgatgtgtcacactgtgtaagggaatcgcatggagatgggcattccgaactgttaatggggacatgggactccagttgtctctgatcacttgtgtggattttcctggcgtagaacgacagaagccgctagtaagtcgccaagacctacagcaggaattctgcaccaaagggcataaaatcttgttattttaatttgcatctgggagaatgtctgagcaaggagacctgaatcaggcaatagcagaggaaggagggactgagcaggagacggccactccagagaacggcattgttaaatcagaaagtctggatgaagaggagaaactggaactgcagaggcggctggaggctcagaatcaagaaagaaga

SEQ ID NO: 28331 - DNA, 611 bp, Artificial Sequence
  derived and/or modified sequence
agagttggcctggagagtgagcggtggagggagtggaacaaggcttcgtcaagagtccccaggagtccaggggcgcccccgagacgggttgacgatgtgtcacactgtgtaagggaatcgcatggagatgggcattccgaactgttaatggggacatgggactccagttgtctctgatcacttgtgtggattttcctggcgtagaacgacagaagccgctagtaagtcgccaagacctacagcaggaattctgcaccaaagggcataaaatcttgttattttaatttgcatctgggagaatgtctgagcaaggagacctgaatcaggcaatagcagaggaaggagggactgagcaggagacggccactccagagaacggcattgttaaatcagaaagtctggatgaagaggagaaactggaactgcagaggcggctggaggctcagaatcaagaaagaagaaaatccaagtcaggagcaggaaaaggtaaactgactcgcagccttgctgtctgtgaggaatcttctgccagaccaggaggtgaaagtcttcaggatcaggaatcaattcatttacagctttccagtttttccagcctgcaagaggaggat

SEQ ID NO: 28332 - DNA, 572 bp, Artificial Sequence
  derived and/or modified sequence
cattagagaagaagcaggcagcttgagacaggtggagctggatcaagctgtgaacgtgatttgctggaagctggttgacgatgtgtcacactgtgtaagggaatcgcatggagatgggcattccgaactgttaatggggacatgggactccagttgtctctgatcacttgtgtggattttcctggcgtagaacgacagaagccgctagtaagtcgccaagacctacagcaggaattctgcaccaaagggcataaaatcttgttattttaatttgcatctgggagaatgtctgagcaaggagacctgaatcaggcaatagcagaggaaggagggactgagcaggagacggccactccagagaacggcattgttaaatcagaaagtctggatgaagaggagaaactggaactgcagaggcggctggaggctcagaatcaagaaagaagaaaatccaagtcaggagcaggaaaaggtaaactgactcgcagccttgctgtctgtgaggaatcttctgccagaccaggaggtgaaagtcttcaggatcagactctctgaaaactgcaaatggaaag

SEQ ID NO: 28333 - protein, 151 aa, Artificial Sequence [sequence omitted]

SEQ ID NO: 28334 - DNA, 456 bp, Artificial Sequence
  derived and/or modified sequence
atggccccccgcaagggcaaggagaaaaaggaagaacaagtgattagtctgggaccccaagttgcagagggggaaaatgtcttcggcgtctgccatatcttcgcatccttcaacgatacgttcgtgcacgtgacagacctctctgggaaggaaaccatctgtcgcgtcaccggtggtatgaaagtgaaggcagaccgagatgagtcttccccctatgccgccatgctggcggcacaggacgtggcccagaggtgtaaggagctggggatcaccgcattacacattaagctgagagctacagggggaaaccggacgaagacccccggtcccggcgcccagtcagcacttcgagccctcgcccgctctggtatgaagatcgggcgcatcgaggatgtcacacctatcccctctgactcaactcggcgaaagggaggccgccggggcaggcgcctctag

SEQ ID NO: 28335 - DNA, 456 bp, Artificial Sequence
  derived and/or modified sequence
atggcacctaggaaagggaaagagaagaaagaagaacaggtgatatcactgggtcctcaggtagctgagggtgagaacgtgtttggagtatgtcacatctttgcctcctttaacgatactttcgtccacgtcacagatctctctggtaaggagacaatatgtagagtcacgggagggatgaaagtgaaagcggaccgcgatgagagtagtccatacgccgcaatgctcgccgcccaggacgttgctcagcgctgcaaagagttgggaattaccgccctccacatcaagctgcgcgccacaggaggaaataggacgaaaacccccgggccaggcgcacagtccgcattgcgggcactggcccggagcggcatgaaaatagggcggatcgaggatgtaacacctatcccctccgattcaacccggcgaaaaggggggcgccgaggacgccggttgtag

SEQ ID NO: 28336 - DNA, 456 bp, Artificial Sequence
  derived and/or modified sequence
atggcccctcgcaaaggcaaagaaaaaaaggaggagcaggtcatttccttgggcccccaagttgctgagggcgaaaacgttttcggggtctgtcatatcttcgcctccttcaacgacacattcgtccacgttaccgacctttcgggcaaggaaaccatctgccgagttacaggcggtatgaaagtcaaagctgaccgtgacgaatcatccccatacgccgcgatgctggcagcacaggatgtggctcagcgatgcaaagaactgggcataaccgccctgcatattaagttgagggcaaccggaggcaaccggacaaagactccaggccccggagcccagtccgccttacgggccctcgcgagaagcggcatgaaaattggcaggatcgaagacgttactccgattccttctgactctaccagaaggaagggcggaagacgcggtcggcggctgtag

SEQ ID NO: 28337 - DNA, 456 bp, Artificial Sequence
  derived and/or modified sequence
atggccccgaggaaaggcaaggagaagaaggaggagcaggtgatcagccttggccctcaggtggctgaaggtgagaacgtctttggcgtgtgccatatctttgcttcttttaacgataccttcgttcacgtcacagacttatctggcaaagaaaccatctgcagggtaaccggggggatgaaggttaaagccgaccgcgatgagtctagcccttacgcggctatgctcgccgctcaggacgtcgcacagcgttgcaaggaattgggtatcaccgcactccacattaagctaagggctacgggcggcaaccgcaccaaaaccccaggcccaggggctcagagcgccctgcgtgccctggctcggtctggaatgaaaattggacggattgaggacgtcacacccatcccatccgattcaacacgcagaaaaggcggacgccggggaaggcgtttgtag

SEQ ID NO: 28338 - DNA, 456 bp, Artificial Sequence
  derived and/or modified sequence
atggcccccaggaagggcaaggagaagaaggaggagcaggtgatcagcctgggcccccaggtggccgagggagaaaatgtgtttggagtgtgccacatctttgccagcttcaatgacacctttgtgcacgtgacagacctgagcggcaaggagaccatctgccgggtgactggaggcatgaaggtgaaggctgacagagatgagagcagcccctatgctgccatgctggccgcccaggatgtggcccagcgctgcaaggagctgggcatcacagccctgcacatcaagctgcgggccaccggcggcaacagaaccaagaccccaggccctggggcccagagcgccctgcgggccctggcccggagcggcatgaagattggaagaattgaagatgtgacccccatccccagcgacagcaccaggaggaaaggaggccggcggggccgccgcctgtag

SEQ ID NO: 28339 - DNA, 456 bp, Artificial Sequence
  derived and/or modified sequence
atggccccccggaagggcaaggagaagaaggaggagcaggtgatcagcttaggtccccaggtggctgaaggggaaaatgtattcggcgtttgtcatattttcgctagctttaacgacacatttgtacatgtgaccgacctttctggtaaggaaaccatttgcagggtaactggcggcatgaaagttaaggcggaccgcgacgaatccagcccttacgcagccatgctggccgctcaggatgtggcacagaggtgcaaagaacttgggattaccgcactgcatattaagttgcgcgctaccggcggaaaccgcaccaagacgcccggaccgggtgcgcaatctgccctccgagccctggcaagaagtgggatgaagatcggacgtatcgaagacgttacgcctataccttctgacagcacccggcgaaagggcggcagaagaggcagacgcctgtag

SEQ ID NO: 28340 - DNA, 456 bp, Artificial Sequence
  derived and/or modified sequence
atggccccccggaagggcaaggagaagaaggaggagcaggtgatcagcttggggcctcaggtggcagagggcgaaaatgtctttggggtatgccatatctttgcaagcttcaatgatacctttgtgcacgtcacagacttgtctggaaaagagaccatctgtcgcgttacaggagggatgaaggtgaaggctgatcgcgacgaaagctcaccatatgctgccatgctcgcagcgcaggatgtggcacaacgctgcaaggagctgggcatcactgccttgcatataaaattgcgggctaccggaggcaaccggacaaaaactccaggacctggtgcccagagcgccctgcgggcactggcccgctcagggatgaaaataggcaggatcgaagacgtgacccccattccgagtgattccacccgacggaaaggaggccggcgggggcggcggctgtag

SEQ ID NO: 28341 - DNA, 456 bp, Artificial Sequence
  derived and/or modified sequence
atggccccccggaagggcaaggagaagaaggaggagcaggtgatcagcctagggccccaggtggccgaaggcgagaacgtctttggcgtttgccacatctttgctagcttcaatgatacgtttgtgcatgtcaccgatctttccggtaaggagaccatctgtagggtcactggcggaatgaaggtgaaggctgaccgtgatgagtcgtctccgtatgccgcaatgctcgcagcacaggatgtcgcccagagatgcaaggaacttggaattacggccctgcacatcaaactgcgagccacaggagggaatagaacaaaaacaccgggccctggggcacaatccgctctgcgcgctcttgcccgatccgggatgaagatcggccgaattgaggatgtgacccctatcccttccgatagcacacggcgaaagggagggaggcgagggagacgtctttag

SEQ ID NO: 28342 - DNA, 456 bp, Artificial Sequence
  derived and/or modified sequence
atggccccccggaagggcaaggagaagaaggaggagcaggtgatcagcctgggtcctcaggtagctgagggcgagaacgtgttcggggtgtgccatatttttgcatcttttaatgacaccttcgtacacgtgactgacctctccgggaaagaaactatttgtcgtgtgaccggaggcatgaaagtcaaggccgatagggatgagagctctccttacgcagccatgcttgctgcccaggatgtggcccagcgatgcaaagaattagggattaccgccttacacatcaaattaagggccaccggcggaaacagaacaaaaacccccggccctggcgcccagtcagccctgagagctttggcccggtcgggcatgaaaattgggcggatcgaagatgtgacaccaattcctagcgactccacaaggcgaaaaggaggacggagagggcgcagactgtag

SEQ ID NO: 28343 - DNA, 456 bp, Artificial Sequence
  derived and/or modified sequence
atggcccctcgcaaaggcaaggaaaagaaggaagagcaggtgatctccctgggccctcaagtcgctgagggtgagaacgtgtttggggtgtgccatatcttcgcgtcgtttaacgacactttcgtacacgtgaccgatctgagcggaaaagagaccatatgtagggtgaccggcggaatgaaggttaaagcagatagggatgaatccagtccatatgctgccatgctagccgcacaggacgttgctcagcggtgtaaagaactgggaatcacagccctacatatcaaactccgggcaacaggaggtaaccgcaccaagactcccggacctggagcacagtctgcactgagggctctggctcggagcggcatgaaaataggtagaatagaggatgtcaccccgattccatctgattccactagacgtaagggcggaagaagaggaagaaggttgtag

SEQ ID NO: 28344 - DNA, 456 bp, Artificial Sequence
  derived and/or modified sequence
atggcccctcgcaagggcaaggaaaaaaaagaggagcaggtcatatccttgggaccacaggtcgctgaaggagagaacgtgttcggagtgtgccacatattcgccagcttcaacgacacattcgtgcacgtcacagacctgtccggcaaggaaactatctgcagagtcactggaggaatgaaagtgaaggctgaccgtgacgagagctcgccgtacgctgctatgttggcagcacaggacgtggcgcagagatgtaaggaacttggaatcacggctctgcatattaagctaagagcgaccggaggaaaccgaacaaagaccccgggacctggagctcagagcgcgctgagggctctcgcgcgatctggcatgaaaattggaaggattgaagacgttactccgattccaagcgatagcacacgacggaaaggtggccgtcggggacggcgattgtag

SEQ ID NO: 28345 - DNA, 456 bp, Artificial Sequence
  derived and/or modified sequence
atggctccgaggaagggcaaggagaagaaggaagagcaagttattagcctcgggccacaggtggccgagggagaaaacgtgtttggggtgtgccacatcttcgcgagcttcaacgatacgtttgtccacgtcacagatctgtcagggaaagagactatttgccgggtgactggaggcatgaaagtgaaagcagacagggacgagtcctctccctacgctgcaatgctagccgctcaggatgtcgcccagcgctgcaaggaattggggatcacggctctgcacataaagctgcgggcaaccggcggaaataggaccaaaacccctgggcctggcgcacagagcgcactgcgggctttagccaggagcggcatgaagattgggaggattgaggatgtgacgccaatcccctctgattccactagaagaaaaggagggcgtagaggtagacggttatag

SEQ ID NO: 28346 - DNA, 456 bp, Artificial Sequence
  derived and/or modified sequence
atggcgccacgcaaagggaaggagaaaaaagaagagcaggttatctctctgggtcctcaggtggcggagggagaaaacgttttcggtgtctgtcatatttttgccagcttcaatgacacatttgtccatgttacggatctttccggtaaggaaacaatctgtagagtaactggaggtatgaaggtgaaagccgaccgggatgagtcatctccatacgcagctatgcttgctgctcaggacgtagctcagcggtgtaaggagctgggcatcacagcccttcacatcaagctgcgggcaactggtggcaaccgcaccaaaaccccaggaccaggggctcagagtgccctgagagctctggcacgttccggcatgaaaattggacggatagaagacgtcacccccatacccagcgactccacacgcagaaagggcggacgcagagggaggcgcttgtag

SEQ ID NO: 28347 - DNA, 711 bp, Artificial Sequence
  derived and/or modified sequence
ggcccgggcgcgacaatcggggggcatcctgcggcgaggggaccctgtggggcttgggacgagagacgggggtctttccgtgggaaccgagctaggtgccgggcaagagacgcgcggctggcccacctggatcctggccaactcgggattgagttcgttcctggtctcagaaggcccgttttgctttcagggaggagcttgtgaaaaatggcacctcgaaaggggaaggaaaagaaggaagaacaggtcatcagcctcggacctcaggtggctgaaggagagaatgtatttggtgtctgccatatctttgcatccttcaatgacacttttgtccatgtcactgatctttctggcaaggaaaccatctgccgtgtgactggtgggatgaaggtaaaggcagaccgagatgaatcctcaccatatgctgctatgttggctgcccaggatgtggcccagaggtgcaaggagctgggtatcaccgccctacacatcaaactccgggccacaggaggaaataggaccaagacccctggacctggggcccagtcggccctcagagcccttgcccgctcgggtatgaagatcgggcggattgaggatgtcacccccatcccctctgacagcactcgcaggaaggggggtcgccgtggtcgccgtctgtgaacaagattcctcaaaatattttctgttaataaattgccttcatgtaaa

SEQ ID NO: 28348 - DNA, 1599 bp, Artificial Sequence
  derived and/or modified sequence
ctcccactctctctttccggtgtggagtctggagacgacgtgcagaaatggcacctcgaaaggggaaggaaaagaaggaagaacaggtcatcagcctcggacctcaggtggctgaaggagagaatgtatttggtgtctgccatatctttgcatccttcaatgacacttttgtccatgtcactgatctttctggcaaggaaaccatctgccgtgtgactggtgggatgaaggtaaaggcagaccgagatgaatcctcaccatatgctgctatgttggctgcccaggatgtggcccagaggtgcaaggagctgggtatcaccgccctacacatcaaactccgggccacaggaggaaataggaccaagacccctggacctggggcccagtcggccctcagagcccttgcccgctcgggtatgaagatcgggcggattgaggatgtcacccccatcccctctgacagcactcgcaggaaggggggtcgccgtggtcgccgtctgtgaacaagattcctcaaaatattttctgttaataaattgccttcatgtaaactgtttcaactccagccttctctccttcatcaggggctactcaggcatttgatttcttcctcctatttggcttcttgggagaaaggagcctgaggagagctgagatcctggtgctgcatttggggtcttttccatgctacttgcggcattaagttgccttggtcatctaaagcagaccaaggcgttggagacctcgttttgagtggagatgctggttctaaatatggaccaattcttaaagagccagagtgggaactgttgatccaagtgtagcctgaagcgaaagaggagccttccagacccatgccatatataaacacacgtgggtgtgcattctccccccacaccttctgtgcaaagctgggagctcactccactgcgtcttgctttttttcacttggcagatcttggagattgttccacatcagtacataaagtacataaagattgtcaccccacaaatacacaccaagtcctattttcatcagcgataaaaaagaaaagttcttgctttccggaagcttgcatgcggctctgagtacccagtgacaccagatggtactcagcgttttgcaagggattaccacaaggccccgtgatggtgcctgccatggttaggacaggctggtggctgggtagggttagtgagacccagtggagaggatgctgtgtgtcacaggctggagaggtgagaccattgaggtagtcagttgtagaggaaagaaaccagcaagaggggaaaatctgttgggatgctgcttttagcctttgatggcgtgttccaggcagagggaataagcaaataaatgggtcctgagacaaggggttactgtgatgaggcggcgttggttacatgccaaaccttgctagggattttaataacaacattgaatcttaacctgatgaaataacagtactcctggggaggcgggagggatagcattaggagatatacctaatgctaaatgacgagttaatgggtgcagcacaccaacatggcacatgtatacatatgtaacaaacctgcacgttgtgcacatgtacccta

SEQ ID NO: 28349 - DNA, 784 bp, Artificial Sequence
  derived and/or modified sequence
ctccgccccctcccactctctctttccggtgtggagtctggagacgacgtgcaggtaggaggcccgggcgcgacaatcggggggcatcctgcggcgaggggaccctgtggggcttgggacgagagacgggggtctttccgtgggaaccgagctaggtgccgggcaagagacgcgcggctggcccacctggatcctggccaactcgggattgagttcgttcctggtctcagaaggcccgttttgctttcagggaggagcttgtgaagtaaggaaatggcacctcgaaaggggaaggaaaagaaggaagaacaggtcatcagcctcggacctcaggtggctgaaggagagaatgtatttggtgtctgccatatctttgcatccttcaatgacacttttgtccatgtcactgatctttctggcaaggaaaccatctgccgtgtgactggtgggatgaaggtaaaggcagaccgagatgaatcctcaccatatgctgctatgttggctgcccaggatgtggcccagaggtgcaaggagctgggtatcaccgccctacacatcaaactccgggccacaggaggaaataggaccaagacccctggacctggggcccagtcggccctcagagcccttgcccgctcgggtatgaagatcgggcggattgaggatgtcacccccatcccctctgacagcactcgcaggaaggggggtcgccgtggtcgccgtctgtgaacaagattcctcaaaatattttctgttaataaattgccttcatgtaaactgtttc

SEQ ID NO: 28350 - DNA, 592 bp, Artificial Sequence
  derived and/or modified sequence
gttaacgcactgggtcgtgctcattggtctgatttgaagataggaacatttaacttcgtacacccaagacttacacttgaaaaatggcacctcgaaaggggaaggaaaagaaggaagaacaggtcatcagcctcggacctcaggtggctgaaggagagaatgtatttggtgtctgccatatctttgcatccttcaatgacacttttgtccatgtcactgatctttctggcaaggaaaccatctgccgtgtgactggtgggatgaaggtaaaggcagaccgagatgaatcctcaccatatgctgctatgttggctgcccaggatgtggcccagaggtgcaaggagctgggtatcaccgccctacacatcaaactccgggccacaggaggaaataggaccaagacccctggacctggggcccagtcggccctcagagcccttgcccgctcgggtatgaagatcgggcggattgaggatgtcacccccatcccctctgacagcactcgcaggaaggggggtcgccgtggtcgccgtctgtgaacaagattcctcaaaatattttctgttaataaattgccttcatgtaaactgtt

SEQ ID NO: 28351 - DNA, 456 bp, Artificial Sequence
  derived and/or modified sequence
atggcccccagaaagggcaaggagaagaaggaggagcaggtgatcagcctgggcccccaggtggccgagggcgagaacgtgttcggcgtgtgccacatcttcgccagcttcaacgacaccttcgtgcacgtgaccgacctgagcggcaaggagaccatctgcagagtgaccggcggcatgaaggtgaaggccgacagagacgagagcagcccctacgccgccatgctggccgcccaggacgtggcccagagatgcaaggagctgggcatcaccgccctgcacatcaagctgagagccaccggcggcaacagaaccaagacccccggccccggcgcccagagcgccctgagagccctggccagaagcggcatgaagatcggcagaatcgaggacgtgacccccatccccagcgacagcaccagaagaaagggcggcagaagaggcagaagactgtag

SEQ ID NO: 28352 - DNA, 1473 bp, Artificial Sequence
  derived and/or modified sequence
atgaacggcgctctcgaccatagtgatcagccggaccccgatgctattaaaatgttcgtgggtcaaatcccgcggtcatggagcgaaaaagagctcaaggagttatttgagccatacggcgctgtctaccaaataaacgtgctgcgggataggagccagaacccgccccagtcaaagggatgttgctttgtgaccttctataccagaaaagccgcactcgaagctcagaatgctctccataatataaagaccttgcctggcatgcaccacccaattcagatgaagcctgccgacagcgagaagagcaatgccgttgaggatcgaaaactgttcatcggcatggtgagcaagaagtgtaatgaaaacgacatccgggtcatgttctctcctttcggtcagattgaagagtgccgcatcttacgcggccccgacggtctttcacggggctgtgcattcgtgacattcagcacccgagcaatggcgcagaacgcaattaaggctatgcatcagtcccagaccatggaaggttgtagttcccccatcgtcgtgaaatttgccgacacccaaaaggacaaagagcagagaagattgcagcagcagctggctcagcaaatgcagcagcttaacaccgccacctgggggaatctgactggtctgggcggcctgacaccccagtacctggcacttctgcaacaggcaaccagtagttctaatttgggagctttttcaggaattcagcagatggctggtatgaatgctctccagttacagaacctggctacactagccgcagctgctgccgccgcacagacttctgctacttccaccaacgctaatcccctgagcaccaccagcagcgccctgggcgctctcactagcccagtcgccgcatctacaccgaatagtaccgccggggcagcaatgaattcattaaccagcctcggaactctgcagggcctcgcaggagctaccgtcgggctcaataatataaacgccctggccgttgcgcagatgctctccggaatggctgccctgaatggtggtttaggcgcaaccggtctgactaatggcactgctggcactatggatgcactcacacaggcatacagcggcatccagcaatatgcggctgctgccctaccaaccttatactcacagtccctgctgcagcagcagagcgccgcgggaagtcagaaggagggtccggagggcgcaaacctgttcatctatcacttaccccaggagtttggcgaccaggatattctgcagatgttcatgccatttggaaacgtgattagcgctaaagtatttattgataagcagaccaatctgtcaaaatgtttcggtttcgtgagctacgataatcccgtgtctgctcaggccgccatccaggcaatgaacggtttccagatcggcatgaagcggcttaaagtgcaattaaaaagaagtaaaaatgactccaagccatattag

SEQ ID NO: 28353 - DNA, 1473 bp, Artificial Sequence
  derived and/or modified sequence
atgaatggcgctctcgatcacagcgaccagcccgaccccgacgccatcaagatgttcgtgggacaaataccacgtagctggagcgaaaaagaacttaaggaattgtttgaaccctacggggcagtgtatcagatcaacgtcctccgggataggtcccagaatcccccccagtctaagggctgctgtttcgttactttctacactcgtaaagcagcactggaggcccagaatgccctccataatatcaagaccttgcccggaatgcaccaccccattcagatgaaacccgcagacagcgagaagagcaacgcagtagaagacaggaaactgttcataggtatggtatccaaaaagtgcaacgagaacgacatcagagttatgttcagccccttcgggcagatcgaagagtgcagaattttacgcgggcccgatgggcttagcagaggatgcgcattcgttacatttagcacaagagctatggctcagaatgcaatcaaggccatgcaccagtcccaaaccatggagggatgttcttcacccattgtggttaaatttgccgatacacagaaggataaagaacagcggcgcctgcaacagcaactcgcccagcagatgcagcagctcaatactgcaacctggggtaacttgacagggctgggtggcctgaccccacaatatctcgcgctcctccagcaggcaaccagctcgtcaaatcttggagcattcagcggcatccagcagatggcgggaatgaacgccttgcagctgcagaacctggctacgctggccgcggctgcagcggccgcacagacttcagctacttctaccaacgccaacccactaagtactacatccagcgccctgggcgctctcacctctcccgtggccgcgagtacccctaactcgactgccggggccgctatgaatagtctaaccagcctgggcacacttcagggacttgcaggcgctacagttgggttgaacaatattaacgcactggcagtggctcaaatgttgtcaggcatggccgcactgaacggaggcttgggcgcaacaggtttgacaaatggcactgctggtaccatggatgccttaacgcaggcctatagcggtattcaacagtacgctgcagctgcactgcctaccttatactctcagtccctcctccagcagcaatccgccgccggctcgcaaaaagagggccccgaaggggctaacctcttcatttatcacctgcctcaggagttcggcgaccaagatattttgcagatgtttatgcccttcggtaatgtgatctcggccaaggtgtttatcgacaaacagacaaacctgagcaagtgcttcggctttgttagctacgataacccggtgtccgcccaggctgccatacaggccatgaatggttttcagattgggatgaagcgcctaaaggtccagctcaaaaggtccaaaaacgattctaaaccctactag

SEQ ID NO: 28354 - DNA, 1473 bp, Artificial Sequence
  derived and/or modified sequence
atgaatggggccctagatcacagcgaccagccggaccccgatgctattaagatgttcgtgggacagattccacggtcctggtccgagaaagaactaaaagagctatttgaaccatacggagctgtttatcagataaatgtccttcgggaccgtagtcaaaatcccccccagtcaaaaggatgttgctttgtgaccttctataccagaaaggcagccctggaagctcagaacgctttgcacaatattaagaccctccctggtatgcaccatcccatccagatgaaacctgctgattctgagaagtcgaatgctgtggaggatagaaagctttttatcggcatggtgtcgaaaaaatgcaatgagaatgacatccgcgtgatgttctcaccgtttggacagatagaggaatgccgcatcttgcgcggccctgacggactatcgagaggctgcgcattcgtgactttctcaacgagggctatggcccaaaatgccattaaggccatgcaccagtcacagacaatggaaggatgctcgtctccaattgtggtgaagttcgccgatacacagaaagacaaggagcagcgtcggctacagcagcagctggcccaacagatgcagcagcttaatactgccacctgggggaacctcacgggtcttggagggcttaccccccagtatttagctctgctgcagcaggcgacaagcagtagtaacttaggggctttttcaggcattcaacagatggcaggtatgaacgctcttcagctccagaatctggctactcttgccgccgctgccgccgccgcccaaactagcgcaacaagcacgaacgctaaccccctctcaactactagttcagctctgggagccctgacttctcccgtagccgccagtaccccgaattctacagcaggtgcagccatgaacagcctaacatctctaggaaccctgcagggacttgccggggcaacagtcggcctcaataatataaatgccctggccgtggctcaaatgttaagcgggatggccgccctgaacgggggtcttggcgccactgggctgactaacggaacagcaggcactatggatgcgctgacccaggcctactccggaattcagcaatacgcagctgcggcgctgcctactctgtacagtcagtccctccttcagcaacagagcgccgcaggcagccaaaaggaaggcccagagggcgctaatctgttcatctaccatcttcctcaggaattcggagaccaggatatactgcaaatgtttatgccgttcggaaatgtgattagcgctaaggtatttattgacaaacagacgaacctgagtaaatgcttcgggttcgtgagttacgataaccctgtgagcgcccaggctgccattcaggccatgaacgggtttcagatcgggatgaagcggctcaaagtccagctgaagaggtcaaaaaatgatagtaaaccctactag

SEQ ID NO: 28355 - DNA, 1473 bp, Artificial Sequence
  derived and/or modified sequence
atgaacggggccctcgatcattctgatcagcctgaccccgacgccatcaagatgtttgtgggccagatcccccggtcctggtcagagaaggaactgaaggagctttttgaaccgtacggggctgtctatcagattaacgtgctgagagaccgcagtcagaaccccccacagtccaagggctgctgtttcgtgaccttctatactagaaaagccgctctcgaagctcagaatgcgctgcacaatattaagacacttccaggcatgcaccatcccatccagatgaaaccagccgacagtgaaaagagtaacgctgtcgaggatagaaagctcttcatcgggatggtgagtaagaagtgtaacgaaaacgacattagagtgatgttttccccttttggccagatcgaggagtgtcggattctgcgtggtcccgacggactgtcaaggggatgtgcattcgtgacattctcaactcgtgctatggcccagaacgcaatcaaagcgatgcaccagtcacagacgatggaaggatgcagctcccctatcgtggtaaagttcgccgatacgcagaaagacaaggagcaacggcgactacagcagcagctcgctcagcagatgcagcagctgaatacagcaacatgggggaatctgacagggcttggcgggctcacaccacaatacctggccctgctccagcaagccacgtccagctcaaatctcggagcattctcaggaatccagcagatggctggtatgaatgcgctgcagctccagaacctagctacactagctgcagctgcggccgcagcgcagacttccgctacctctaccaacgccaaccccctgagcacgacctcatcagcactcggcgcattaacatccccggttgcagccagcacccctaactccacagcaggagccgctatgaacagcctaacatcgctgggtacgcttcaaggtctggcaggagccaccgttgggttgaacaacatcaatgccctcgctgtggctcagatgctgtccggaatggcagcgctgaatggggggctaggtgccaccggcctgactaacggaacagctggcactatggacgccctgactcaggcatacagcggtattcaacagtatgcggccgcagcgctgcccactctgtactcccagtctctgttgcagcaacagtctgctgctgggtctcagaaggagggtcccgagggggcgaaccttttcatctatcatctgcctcaagaatttggagaccaagacattctacagatgtttatgcccttcggaaatgtgatatccgccaaagtgtttatcgacaagcaaacaaatctgagtaagtgcttcggattcgtcagctatgacaacccggtttctgcacaggcagcaatccaggcaatgaatggattccaaatcggtatgaaacgccttaaagtgcagttgaagcgcagcaaaaacgactctaaaccctactag

SEQ ID NO: 28356 - DNA, 1473 bp, Artificial Sequence
  derived and/or modified sequence
atgaatggagccctggaccacagcgaccagcctgaccctgatgccatcaagatgtttgtgggccagatccccaggtcctggagcgagaaggagctgaaggagctgtttgagccctatggagctgtgtaccagatcaacgtgctgcgggacaggagccagaaccccccccagagcaagggctgctgctttgtgaccttctacaccaggaaggccgccctggaggcccagaatgccctgcacaacatcaagaccctgcccggcatgcaccaccccatccagatgaagccagctgacagcgagaagagcaatgctgtggaggacaggaagctgttcatcggcatggtgtccaagaagtgcaatgaaaatgacatccgggtgatgttcagccccttcggccagatcgaggagtgccgcatcctgcggggcccagatggcctgagccggggctgtgcctttgtgaccttcagcacccgggccatggcccagaatgccatcaaggccatgcaccagagccagaccatggagggctgcagcagccccatcgtggtgaagtttgctgacacccagaaggacaaggagcagaggcggctgcagcagcagctggcccagcagatgcagcagctgaacacagccacctggggcaacctgaccggcctgggcggcctgaccccccagtacctggccctgctgcagcaggccaccagcagcagcaacctgggcgccttcagcggcatccagcagatggccggcatgaatgccctgcagctgcagaacctggccaccctggccgctgctgctgctgctgcccagaccagcgccaccagcaccaatgccaaccccctgagcaccaccagcagcgccctgggcgccctgaccagccctgtggccgccagcacccccaacagcacagctggggccgccatgaacagcctgaccagcctgggcaccctgcagggcctggccggggccaccgtgggcctgaacaacatcaatgccctggccgtggcccagatgctgagcggcatggccgccctgaatggaggcctgggcgccaccggcctgaccaacggcacagctggcaccatggatgccctgacccaggcctacagcggcatccagcagtatgctgctgctgccctgcccaccctgtacagccagagcctgctgcagcagcagagcgctgctggcagccagaaggagggccctgagggcgccaacctcttcatctaccacctgccccaggagtttggagaccaggacatcctgcagatgttcatgccctttggaaatgtcatcagcgccaaggtgttcatcgacaagcagaccaacctgagcaagtgcttcggctttgtgtcctatgacaaccctgtgtctgcccaggccgccatccaggccatgaatggcttccagatcggcatgaagaggctgaaggtgcagctgaagaggagcaagaatgacagcaagccctactag

SEQ ID NO: 28357 - DNA, 1473 bp, Artificial Sequence
  derived and/or modified sequence
atgaacggcgccctggaccacagcgaccagcccgaccccgacgccatcaagatgttcgtcgggcagatcccccgctcttggagtgaaaaggagttaaaagagctttttgagccctatggagccgtctatcaaatcaacgttcttagggatcgcagccagaatccacctcagagcaaggggtgctgttttgtgacattttacacaaggaaagctgcgctggaagcccagaacgctttgcacaacataaagaccttgcctggcatgcaccatcctatccagatgaagcctgcggatagtgagaagtccaacgcagtggaagaccgaaaactgttcattggcatggtctccaagaagtgtaatgagaatgatattcgggttatgtttagccctttcggacagattgaggaatgcagaattttaagaggacccgacggactgtcacgcggatgcgccttcgtgacgtttagtacaagagccatggctcagaacgcaattaaggctatgcatcagagccagactatggagggatgttctagccctatcgtcgtaaagtttgctgacactcaaaaggacaaagagcaacgcagactccagcagcaactagcccagcaaatgcagcagctgaacaccgcaacctgggggaacctgacagggctcggtgggctgacccctcagtatctcgctttactgcagcaggccacctcctcatcgaacttgggggccttttctggcattcagcagatggccggcatgaatgctctccaattacagaatcttgctaccttggctgcagccgccgctgcggcccagaccagtgcaacatccacgaacgcaaaccccctgtcaacaaccagctcagccctgggggccttgaccagcccagtcgcagccagcactcccaactctactgctggagccgctatgaactctctcacttctctgggaactctccaagggttggcgggggctacagtagggctcaataacatcaatgccttggccgtggcccagatgttaagcgggatggcagccttaaacgggggcctgggtgctaccgggctaactaacgggaccgccggaaccatggatgccctcactcaggcttatagcggcatccaacagtacgcggccgcagccctcccaactctgtattcacagtcacttttacagcaacagagtgcagccggcagtcagaaggagggtcccgaaggagctaatcttttcatctatcaccttccccaagaattcggggatcaggacattcttcagatgttcatgcctttcggaaacgtcattagcgcaaaggtttttatcgacaaacagactaaccttagcaaatgttttggtttcgtgtcctacgataatcccgtttctgctcaagccgcgatccaagctatgaatggtttccagatcggcatgaagcgcttgaaggtacagctcaaacggagcaagaacgatagcaaaccttattag

SEQ ID NO: 28358 - DNA, 1473 bp, Artificial Sequence
  derived and/or modified sequence
atgaacggcgccctggaccacagcgaccagcccgaccccgacgccattaagatgtttgtcggtcagataccacgtagttggagtgaaaaagaacttaaggaactgtttgagccctacggagcagtctatcaaataaatgtactgagagaccgctcgcaaaaccctccacagtctaaaggttgctgtttcgtcacattttacactaggaaggcagcgctcgaagcccagaacgcccttcataacatcaagaccctgcctgggatgcaccacccgatccaaatgaaaccagcagactccgagaagtcaaacgcggttgaagatcggaaactattcattggcatggtgagcaagaaatgcaatgaaaacgatattcgggtcatgttctctcccttcggacagattgaggagtgtcgaatattaagaggccccgacggtctctcacgggggtgcgccttcgtaacattttctactagagcgatggcacagaacgccatcaaggctatgcatcagtctcaaactatggagggctgttcctctccaatcgttgtcaagttcgccgatactcagaaagacaaagagcaaaggcggctacagcaacaacttgcacaacaaatgcaacaactgaataccgctacctggggtaatctgacagggctggggggcctgaccccccaatacctcgcactactgcagcaggcaacgtcttcaagcaacctgggggccttctcaggcatccaacagatggctggaatgaatgctttgcaacttcagaatctagctaccctcgccgcagctgccgccgcggcccaaacatctgccacctctaccaacgcaaaccccctgtcgaccactagcagcgccctgggagccctgaccagccctgtggctgctagtacccctaactctacggccggcgccgccatgaacagccttacttcactcgggactctgcagggcctggctggagccaccgtggggcttaataacattaatgccttggccgtggcacagatgttgagcgggatggcagccctaaacgggggactgggcgccaccggcttgacgaatggtacagcaggaacaatggatgcgctgacacaggcatacagcggaatacaacagtacgccgcagccgccctgccaacattgtactctcagagccttctccagcagcaatccgcggccggttctcaaaaggagggccccgagggcgcgaatctattcatctaccatctcccacaagagttcggcgaccaggacattctgcagatgttcatgccctttgggaacgtgattagcgccaaagttttcatcgataagcagactaacctctccaaatgttttggattcgtctcgtatgacaatcccgtcagcgctcaggcggctattcaggccatgaacggtttccagatcggaatgaagcggctgaaggttcagcttaaaaggagcaagaatgacagtaaaccatattag

SEQ ID NO: 28359 - DNA, 1473 bp, Artificial Sequence
  derived and/or modified sequence
atgaacggcgccctggaccacagcgaccagcccgaccccgacgccatcaaaatgtttgtggggcagattcctagatcgtggagcgaaaaggaactgaaggagctgttcgaaccttatggggcggtgtaccagatcaacgtactgcgggacaggtctcaaaacccacctcagtccaaaggttgctgtttcgtgacgttttatacccggaaggctgcgctagaagcacagaatgcactgcacaatattaagacgctgcccggcatgcatcacccaatccaaatgaagccagccgatagcgagaaatctaacgcagttgaggaccgcaagctgttcattggaatggtgtctaagaagtgtaatgagaatgacatccgggtcatgtttagtccattcggccagatcgaggagtgccggatactgagaggtccagacggcctgtctaggggttgtgctttcgtgacgttctccacacgggccatggcgcagaacgctatcaaggccatgcatcagtcacagactatggagggctgctctagtcccatcgtagtgaagtttgcagacacacaaaaggacaaagaacagagaaggttacagcagcagcttgctcagcagatgcagcagctcaacacggccacctggggaaaccttactggtttgggaggactgacccctcagtatctcgccctgttgcagcaagctacctcaagtagcaatctgggggccttttctggaattcagcagatggctggcatgaatgccctccagctgcagaatctcgcaacactcgctgccgccgccgccgcagcccagacctccgccacctcaacaaatgcgaaccccctgtccaccacaagtagcgctctcggtgctctgactagccccgtggctgctagcactccaaacagcactgcgggtgctgcaatgaatagcttaacaagccttgggactcttcagggattagcaggcgctaccgtgggcttgaataacatcaacgccttagcagtagcgcagatgttaagtgggatggcagctctcaacggaggcctgggggcaaccggcctgacaaacggtaccgccggcacgatggacgccctcacccaggcctactcagggatacagcagtatgctgcagccgctttgccaactctttacagccagtctctgcttcagcagcagtcagcagccggatcccagaaggagggcccggaaggagcaaatctattcatttaccatctgcctcaggagtttggagatcaagacatattacagatgttcatgccatttggcaatgttatcagcgccaaggtcttcattgacaagcagacgaacctctcaaagtgtttcgggtttgtctcatatgataaccctgtctctgctcaggccgccatacaggccatgaatgggtttcagataggaatgaaacgattgaaggtgcagcttaaaagatccaagaacgactccaagccatactag

SEQ ID NO: 28360 - DNA, 1473 bp, Artificial Sequence
  derived and/or modified sequence
atgaacggcgccctggaccacagcgaccagcccgaccccgacgccatcaaaatgttcgtgggccagattccccgctcttggtccgagaaagagcttaaggagctgttcgagccctatggcgccgtctaccaaataaatgtgctgcgggataggagccagaaccctcctcaaagtaaaggatgttgttttgtaacgttctataccaggaaagccgctcttgaggcgcagaacgcgttgcacaacattaagacccttccagggatgcaccatcctatccagatgaagcctgccgactccgagaaatcaaacgccgtggaagaccgaaaactttttatcggcatggtctcaaaaaaatgtaatgagaacgatatcagggtgatgttctcaccatttggacaaatagaggaatgtagaattttgaggggccctgacggccttagccgcgggtgtgctttcgtgactttctctacccgggctatggcacaaaacgctatcaaggcaatgcaccaatctcagactatggaaggctgctcctcgcctatagtcgtgaaattcgccgacacacagaaagacaaagaacaaaggcgcctacagcaacaactggcccagcaaatgcaacagctcaacacagcaacctgggggaacctcacgggactcggcgggttgactccccagtatctggctcttctgcaacaggctacgagcagcagcaacctcggggctttcagtggcatccagcagatggccggaatgaatgctctgcaactccagaacctggctactctggcggctgctgccgccgccgcccagaccagtgcaacaagcaccaatgccaatcctctctccaccactagctccgcattgggggctttgacaagtcccgtagcagcctctacaccaaacagcactgccggcgccgctatgaactctctcacatccctgggaactcttcagggtcttgccggagcaacagtaggcttaaataatatcaacgctctcgccgtggcacaaatgctgagcggcatggccgctctgaacggtgggctcggagcgacaggcctgacaaacggcacagcgggcacaatggatgcacttacacaggcttattccggcatccagcagtatgcagctgccgccctccccacactgtactcccagagcctgctccagcaacagagcgctgccggaagccaaaaagagggaccagagggcgccaatctatttatataccaccttccacaggaatttggcgaccaagacatcctgcagatgtttatgccttttggcaatgttatatctgccaaagtatttatcgataaacagactaatctctccaagtgctttggtttcgtcagttacgataatccggtgtccgcccaggccgctatccaggccatgaacggttttcaaatcggcatgaagcgtctaaaagttcagctgaagcggtctaaaaatgattcgaaaccgtactag

SEQ ID NO: 28361 - DNA, 1473 bp, Artificial Sequence
  derived and/or modified sequence
atgaatggggctctggaccatagcgaccaaccagatcccgacgccatcaagatgttcgtaggtcagattcccaggagttggagtgaaaaggaattgaaagaactgttcgaaccctatggtgcagtgtatcagatcaacgtccttcgagatcgcagccaaaacccccctcagtctaagggttgctgctttgtcaccttttacactcgaaaggccgctctcgaggctcagaacgccctgcataacattaagacactgcccggaatgcatcatcccatacagatgaagcccgctgactccgagaagagtaatgccgttgaggacagaaaattgtttataggcatggtgagcaaaaaatgtaatgaaaacgacatccgcgtgatgtttagcccctttggacagatagaggaatgccggatccttaggggacccgatggactctcgcgtgggtgtgcctttgtgaccttcagcaccagggcaatggcccagaacgcaattaaggctatgcatcagtcccaaaccatggaagggtgctcttcacccatcgtggtgaagttcgccgatactcaaaaagacaaagaacagcgcagactgcagcaacagctggcacagcagatgcagcaactgaatacggccacctggggtaatttgaccggcctaggcggacttacgcctcaatatctggcacttctccaacaggccacgagctcgtcaaatcttggagcattctctgggatccagcagatggcaggaatgaacgccttgcagttacagaatctggccacgttggccgctgctgctgcagcggctcagactagcgccaccagtaccaacgctaacccgctgtccaccacatcaagcgccctcggcgctttaacatcacctgttgccgcatccaccccaaattctacagctggcgctgccatgaacagtctgacttctctcgggacgctgcagggactggccggagccactgtcggcctgaacaacatcaacgccctggccgtggcccaaatgctatctggaatggccgctctgaatggaggtctgggcgctaccgggctcacgaatggcacggcaggcacaatggacgctctgacgcaggcgtacagtggaatccagcagtacgcggctgccgcacttccaaccctgtattcccaaagtctattgcaacagcagagtgcagccggatcacaaaaggagggtcccgagggagccaatttgtttatctatcacctccctcaggaatttggagatcaggatatcctgcagatgtttatgccgttcgggaatgtaatcagtgccaaagtctttatcgataagcagactaatttgagcaaatgttttggtttcgtgtcttatgataatccagtgtcagcgcaggcggcaattcaggcaatgaacggattccaaatcggaatgaagcggcttaaagttcagcttaagaggagcaagaatgactcaaaaccatactag

SEQ ID NO: 28362 - DNA, 1473 bp, Artificial Sequence
  derived and/or modified sequence
atgaacggagctctcgaccattctgaccagcctgatccagatgccatcaaaatgtttgtgggccagatccctcggtcctggtcagagaaggagttgaaagagctgtttgagccatatggtgccgtgtatcagatcaacgtcctgcgggataggtctcagaaccctcctcagtcaaaaggctgttgtttcgtgaccttttacaccaggaaagctgcactcgaggcccagaacgctctgcacaatatcaagactctgccgggaatgcatcaccccatccagatgaagccggctgatagcgagaaatctaacgctgtggaggatagaaagctgttcattggcatggtgtcaaagaaatgcaacgagaacgacatacgcgttatgtttagccctttcggacagattgaagagtgccggatccttcgagggcctgacggtctgtcccgcggatgcgccttcgtcacattctccacacgcgctatggctcagaacgccatcaaagccatgcaccagagccagactatggagggatgctcgtctcctattgtcgttaagtttgccgacacacagaaagacaaagagcagaggcggctgcaacaacaactggcccagcagatgcagcagctcaatacagctacttgggggaatctgactggactgggtggactcacaccgcagtacctcgcactcctgcagcaggcgacgtcatccagcaacctcggggcattttctggcatacagcaaatggccggaatgaacgccttacagttgcagaatctggccaccctggccgcagcagcagccgcagctcagacgagtgccacctccacaaacgcaaaccctctgtcaactaccagttctgctctgggggctctgacgtccccagtagccgcaagtaccccaaacagcactgcaggcgcagcgatgaactccttgactagcctgggcactctgcaaggcctcgctggcgctaccgtgggcctcaataatatcaacgccttggccgtggctcagatgttgagtggcatggccgcactgaatggaggactgggggcaactgggctcacaaacggtaccgccggaaccatggatgccctgacacaggcctacagcggtatccagcagtacgcagccgcagccctgcctacactgtacagccagagcctgcttcaacagcaatccgctgctggatcgcagaaagagggacccgaaggtgctaatctgtttatatatcacctgccccaggagttcggtgatcaggatattctgcaaatgtttatgccctttggtaacgtgattagtgccaaggttttcattgacaaacagaccaacctcagcaagtgctttggctttgtgagctacgacaatccagtgagcgctcaggccgctatccaggcgatgaacggctttcagatagggatgaagcgactcaaagtccagctgaaacgcagcaagaacgattccaagccgtactag

SEQ ID NO: 28363 - DNA, 1473 bp, Artificial Sequence
  derived and/or modified sequence
atgaacggcgcactggaccattctgatcaaccggatccagatgccattaaaatgtttgtaggacaaattcctcggtcatggagcgagaaagagctcaaagagttgtttgaaccctacggcgcagtctatcagataaatgtgctgcgagatcggagtcaaaacccaccacaatctaagggatgttgcttcgtgaccttctataccagaaaggccgctcttgaggcccagaatgcactacacaatattaagacactgcccggaatgcatcaccccatccaaatgaaacccgctgactcagaaaagagcaacgccgttgaagacaggaagttatttatcggcatggtgtccaagaaatgtaatgaaaatgatattcgtgtgatgttttctcctttcggccagatagaagaatgccgcatcctgcggggacccgatggcctcagtcgcggatgcgcattcgtgacattctccacgcgcgcaatggcacagaatgctatcaaggccatgcaccagagccagacaatggaaggttgttcgtcccccatagtggtgaaattcgccgatacacagaaagacaaggaacagcgccgtttacagcaacaactcgctcaacagatgcagcagcttaacactgctacctggggtaatctgacagggctggggggattgaccccccagtatcttgccctcttgcagcaagcaacctcctcctcaaatctgggtgctttctcaggcattcaacagatggccggaatgaacgccttgcaactacagaacttagccactctggccgcagcagctgctgccgctcaaactagcgctacgtcaacaaacgcaaaccctttgtcaacaacttccagtgcattgggcgcattaacgagtcctgtcgctgctagtacccccaacagcaccgcgggtgcagcgatgaactccctgaccagtctgggcacgcttcagggtctagcaggcgctaccgtgggactgaataatatcaatgccttagctgtagcccaaatgctttccggaatggccgcacttaatgggggactcggagctacgggactaactaacggcacggccggaacaatggacgccttgacacaggcgtactccggcatccagcagtatgccgctgccgctcttcccaccctgtatagtcagagcctgttgcagcagcagagcgccgcaggctcccaaaaggagggcccagaaggcgcaaatctgttcatttaccacctgccgcaggagtttggcgaccaggacatccttcagatgttcatgccttttggtaatgtgatctctgctaaagtcttcattgataagcaaacgaacctcagtaaatgcttcgggttcgtcagctacgacaatccggtgtcggctcaggcggctatccaggcaatgaatggctttcagatcggaatgaaacgtctcaaggtgcaactgaaaagatcaaaaaatgattccaagccttattag

SEQ ID NO: 28364 - DNA, 1473 bp, Artificial Sequence
  derived and/or modified sequence
atgaacggcgctctggaccattccgatcagccggatccagatgccatcaagatgttcgtcgggcagatcccccgatcttggagcgaaaaggagctgaaggaattgttcgagccctacggagctgtgtatcagatcaacgttttgagagacaggtcccagaacccccctcagtctaagggctgctgttttgtgacgttttacaccagaaaagccgcactcgaagcacaaaacgcactgcataatataaagacccttccaggaatgcaccaccctattcagatgaaaccagcagactctgaaaaaagcaatgccgtggaggatagaaagctcttcatcggcatggtttctaagaaatgtaatgaaaatgatatccgcgtcatgttcagcccattcggacagattgaagagtgccgtatcttgagggggcctgacggcttgtccagaggatgtgccttcgtgaccttcagtacacgtgcgatggctcagaacgccattaaggcaatgcaccaatcacaaaccatggaaggatgcagttcaccgatcgtagttaaatttgctgacactcagaaagacaaagagcaaaggaggctgcagcagcaattagcccagcagatgcagcagctcaacactgccacatggggaaatctcacggggcttggagggctgaccccccagtatttagccctcttacagcaggccaccagctcttccaaccttggtgcgttttcaggcatacaacagatggctgggatgaacgctctgcagttgcagaatctcgctaccctcgcagctgcggctgctgcggcacagactagtgcaacaagtaccaatgcgaatccactgtctaccacctcaagtgccctgggagccctcaccagccccgtcgcagccagtaccccaaacagcacggccggagccgctatgaactcactgacttccttaggaacacttcaaggcctggccggtgcgactgtcggacttaataatataaatgctcttgcggttgcccagatgctttcaggcatggccgctctcaacggcggattaggggctaccggcctgacgaatggcacggcgggaaccatggatgctctgacgcaagcatactctggaattcaacagtacgcagctgcagcactgcccacgctgtattcccagtcacttcttcagcagcagtcagcggcaggatctcagaaggaagggccagagggcgcaaatctgttcatctaccacctcccacaggagtttggggaccaggacatactgcagatgttcatgcctttcggtaacgtgatctcagccaaggtgttcatcgacaaacaaacgaatctgagcaagtgtttcggctttgtgtcctatgataatcccgtatcggcccaggcagccatccaggctatgaacggcttccaaattggtatgaagagactcaaggtccaactgaaaaggagcaagaacgattctaaaccttactag

SEQ ID NO: 28365 - DNA, 1473 bp, Artificial Sequence
  derived and/or modified sequence
atgaacggcgccctggaccacagcgaccagcccgaccccgacgccatcaagatgttcgtgggccagatccccagaagctggagcgagaaggagctgaaggagctgttcgagccctacggcgccgtgtaccagatcaacgtgctgagagacagaagccagaaccccccccagagcaagggctgctgcttcgtgaccttctacaccagaaaggccgccctggaggcccagaacgccctgcacaacatcaagaccctgcccggcatgcaccaccccatccagatgaagcccgccgacagcgagaagagcaacgccgtggaggacagaaagctgttcatcggcatggtgagcaagaagtgcaacgagaacgacatcagagtgatgttcagccccttcggccagatcgaggagtgcagaatcctgagaggccccgacggcctgagcagaggctgcgccttcgtgaccttcagcaccagagccatggcccagaacgccatcaaggccatgcaccagagccagaccatggagggctgcagcagccccatcgtggtgaagttcgccgacacccagaaggacaaggagcagagaagactgcagcagcagctggcccagcagatgcagcagctgaacaccgccacctggggcaacctgaccggcctgggcggcctgaccccccagtacctggccctgctgcagcaggccaccagcagcagcaacctgggcgccttcagcggcatccagcagatggccggcatgaacgccctgcagctgcagaacctggccaccctggccgccgccgccgccgccgcccagaccagcgccaccagcaccaacgccaaccccctgagcaccaccagcagcgccctgggcgccctgaccagccccgtggccgccagcacccccaacagcaccgccggcgccgccatgaacagcctgaccagcctgggcaccctgcagggcctggccggcgccaccgtgggcctgaacaacatcaacgccctggccgtggcccagatgctgagcggcatggccgccctgaacggcggcctgggcgccaccggcctgaccaacggcaccgccggcaccatggacgccctgacccaggcctacagcggcatccagcagtacgccgccgccgccctgcccaccctgtacagccagagcctgctgcagcagcagagcgccgccggcagccagaaggagggccccgagggcgccaacctgttcatctaccacctgccccaggagttcggcgaccaggacatcctgcagatgttcatgcccttcggcaacgtgatcagcgccaaggtgttcatcgacaagcagaccaacctgagcaagtgcttcggcttcgtgagctacgacaaccccgtgagcgcccaggccgccatccaggccatgaacggcttccagatcggcatgaagagactgaaggtgcagctgaagagaagcaagaacgacagcaagccctactag

SEQ ID NO: 28366 - protein, 197 aa, Artificial Sequence
  derived and/or modified sequence
MASQKRPSQRHGSKYLATASTMDHARHGFLPRHRDTGILDSIGRFFGGDRGAPKRGSGKVPWLKPGRSPLPSHARSQPGLCNMYKDSHHPARTAHYGSLPQKSHGRTQDENPVVHFFKNIVTPRTPPPSQGKGRGLSLSRFSWGAEGQRPGFGYGGRASDYKSAHKGFKGVDAQGTLSKIFKLGGRDSRSGSPMARR

SEQ ID NO: 28367 - DNA, 594 bp, Artificial Sequence
  derived and/or modified sequence
atggcctcacagaaaagacccagccaacgacatggtagtaaatatctggcaacggctagcactatggatcacgctcgccatgggttcctgcctcgccatcgcgataccggaatccttgatagtataggcagatttttcggtggggatcggggggctccgaagcgtgggagcggaaaggttccatggctgaagcctggtaggtctccactgccatcacatgcccggagtcaaccagggctctgcaacatgtataaggatagccatcaccctgcacgaacagctcattatggcagcctaccccagaaatcacacggtaggacgcaggacgagaaccccgtggtccatttcttcaagaacatcgtgactcctcgaacacctccaccctctcaagggaaaggtcgaggactgtccctgtcccgctttagctggggcgcggaagggcagcggcccggatttggatacggggggagagcaagcgactacaaatccgcccataaaggcttcaaaggcgtggacgctcaaggaacactttctaaaatattcaaactgggcggtagagactctagaagcggctcccccatggcgagacgctag

SEQ ID NO: 28368 - DNA, 594 bp, Artificial Sequence
  derived and/or modified sequence
atggccagccagaagaggcccagccagagacatggcagcaagtacctggccacagccagcaccatggaccacgcccggcacggcttcctgcccaggcaccgggacaccggcatcctggacagcatcggccgcttcttcggcggggacagaggagcccccaagaggggcagcggcaaggtgccctggctgaagccaggccgcagccccctgcccagccacgcccggagccagcccggcctgtgcaacatgtacaaggacagccaccacccagccaggacagcccactacggcagcctgccccagaagagccacggccgcacccaggatgagaaccctgtggtgcacttcttcaagaacatcgtgacccccaggaccccaccacccagccagggcaagggccggggcctgagcctgagccgcttctcctggggcgctgagggccagaggcctggcttcggctacggcggccgggccagtgactacaagagcgcccacaagggcttcaagggcgtggatgcccagggcaccctgagcaagatcttcaagctgggcggccgggacagccgcagcggcagccccatggcccggaggtag

SEQ ID NO: 28369 - DNA, 2281 bp, Artificial Sequence
  derived and/or modified sequence
aacaccttcaaagacaggccctctgagtccgacgagctccagaccatccaagaagacagtgcagccacctccgagagcctggatgtgatggcgtcacagaagagaccctcccagaggcacggatccaagtacctggccacagcaagtaccatggaccatgccaggcatggcttcctcccaaggcacagagacacgggcatccttgactccatcgggcgcttctttggcggtgacaggggtgcgcccaagcggggctctggcaaggtaccctggctaaagccgggccggagccctctgccctctcatgcccgcagccagcctgggctgtgcaacatgtacaaggactcacaccacccggcaagaactgctcactacggctccctgccccagaagtcacacggccggacccaagatgaaaaccccgtagtccacttcttcaagaacattgtgacgcctcgcacaccacccccgtcgcagggaaaggggagaggactgtccctgagcagatttagctggggggccgaaggccagagaccaggatttggctacggaggcagagcgtccgactataaatcggctcacaagggattcaagggagtcgatgcccagggcacgctttccaaaatttttaagctgggaggaagagatagtcgctctggatcacccatggctagacgctgaaaacccacctggttccggaatcctgtcctcagcttcttaatataactgccttaaaactttaatcccacttgcccctgttacctaattagagcagatgacccctcccctaatgcctgcggagttgtgcacgtagtagggtcaggccacggcagcctaccggcaatttccggccaacagttaaatgagaacatgaaaacagaaaacggttaaaactgtccctttctgtgtgaagatcacgttccttcccccgcaatgtgcccccagacgcacgtgggtcttcagggggccaggtgcacagacgtccctccacgttcacccctccacccttggactttcttttcgccgtggctgcggcacccttgcgcttttgctggtcactgccatggaggcacacagctgcagagacagagaggacgtgggcggcagagaggactgttgacatccaagcttcctttgtttttttttcctgtccttctctcacctcctaaagtagacttcatttttcctaacaggattagacagtcaaggagtggcttactacatgtgggagcttttggtatgtgacatgcgggctgggcagctgttagagtccaacgtggggcagcacagagagggggccacctccccaggccgtggctgcccacacaccccaattagctgaattcgcgtgtggcagagggaggaaaaggaggcaaacgtgggctgggcaatggcctcacataggaaacagggtcttcctggagatttggtgatggagatgtcaagcaggtggcctctggacgtcaccgttgccctgcatggtggccccagagcagcctctatgaacaacctcgtttccaaaccacagcccacagccggagagtccaggaagacttgcgcactcagagcagaagggtaggagtcctctagacagcctcgcagccgcgccagtcgcccatagacactggctgtgaccgggcgtgctggcagcggcagtgcacagtggccagcactaaccctccctgagaagataaccggctcattcacttcctcccagaagacgcgtggtagcgagtaggcacaggcgtgcacctgctcccgaattactcaccgagacacacgggctgagcagacggccccgtggatggagacaaagagctcttctgaccatatccttcttaacacccgctggcatctcctttcgcgcctccctccctaacctactgacccaccttttgattttagcgcacctgtgattgataggccttccaaagagtcccacgctggcatcaccctccccgaggacggagatgaggagtagtcagcgtgatgccaaaacgcgtcttcttaatccaattctaattctgaatgtttcgtgtgggcttaataccatgtctattaatatatagcctcgatgatgagagagttacaaagaacaaaactccagacacaaacctccaaatttttcagcagaagcactctgcgtcgctgagctgaggtcggctctgcgatccatacgtggccgcacccacacagcacgtgctgtgacgatggctgaacggaaagtgtacactgttcctgaatattgaaataaaacaataaacttttaatggtatttgca

SEQ ID NO: 28370 - DNA, 594 bp, Artificial Sequence
  derived and/or modified sequence
atggccagccagaagcggcccagccagcggcacggcagcaagtacctggctacagcttccacaatggatcacgcaagacacggttttcttccacgacatcgggatacaggcatactagattctatagggagattctttggaggagacaggggcgctcctaaacggggctccggcaaggttccttggctaaaaccagggcggtccccgctcccttctcatgccagatcccaacctgggttgtgtaacatgtacaaggactcccatcaccctgctaggacagctcactacgggtcattgccacagaaatcgcacggaagaacacaggacgagaacccagtagttcatttctttaagaacattgttaccccgcgcactccgccgccatcgcaaggtaagggacgcggcctgtcactgagcagattctcctggggggccgagggccaaaggccaggtttcgggtacggaggccgggcaagcgattacaaatccgcccacaagggcttcaaaggggtggatgcccaggggaccttgagcaagatttttaagttagggggaagagattccaggagcggaagtccgatggctcggcgatag

SEQ ID NO: 28371 - DNA, 594 bp, Artificial Sequence
  derived and/or modified sequence
atggcctcacaaaagcgcccatctcagagacacggctctaagtacctcgcaaccgcaagtaccatggatcacgcccgacatggcttcctgcctcggcaccgggatactgggatactggactctatcgggaggttctttgggggtgacaggggtgcgccaaaacgaggatccgggaaagtaccctggcttaaacctgggaggtcccctcttccttcccatgcccgaagtcaaccgggtctttgcaacatgtacaaagactcccaccacccagctaggacggctcattacggctcccttccacagaagtcacacggtaggacccaggatgaaaatcccgtggtacatttcttcaaaaacatcgttacccctaggaccccccctccctcccagggtaaggggcgaggtctgagcctgagccgattttcttggggggctgagggtcaacgaccgggatttggctatggtggcagagcctctgattacaaaagcgcacacaagggatttaagggagtggacgcccagggcaccctcagcaagatctttaagttgggcggtagagacagtcgcagcggtagtcccatggcgaggcgctag

SEQ ID NO: 28372 - DNA, 594 bp, Artificial Sequence
  derived and/or modified sequence
atggccagccagaagagacccagccagagacacggcagcaagtacctggccaccgccagcaccatggaccacgccagacacggcttcctgcccagacacagagacaccggcatcctggacagcatcggcagattcttcggcggcgacagaggcgcccccaagagaggcagcggcaaggtgccctggctgaagcccggcagaagccccctgcccagccacgccagaagccagcccggcctgtgcaacatgtacaaggacagccaccaccccgccagaaccgcccactacggcagcctgccccagaagagccacggcagaacccaggacgagaaccccgtggtgcacttcttcaagaacatcgtgacccccagaacccccccccccagccagggcaagggcagaggcctgagcctgagcagattcagctggggcgccgagggccagagacccggcttcggctacggcggcagagccagcgactacaagagcgcccacaagggcttcaagggcgtggacgcccagggcaccctgagcaagatcttcaagctgggcggcagagacagcagaagcggcagccccatggccagaagatag

SEQ ID NO: 28373 - protein, 485 aa, Artificial Sequence
  derived and/or modified sequence
MYIKMATLANGQADNASLSTNGLGSSPGSAGHMNGLSHSPGNPSTIPMKDHDAIKLFIGQIPRNLDEKDLKPLFEEFGKIYELTVLKDRFTGMHKGCAFLTYCERESALKAQSALHEQKTLPGMNRPIQVKPADSESRGGSSCLRQPPSQDRKLFVGMLNKQQSEDDVRRLFEAFGNIEECTILRGPDGNSKGCAFVKYSSHAEAQAAINALHGSQTMPGASSSLVVKFADTDKERTMRRMQQMAGQMGMFNPMAIPFGAYGAYAQAMQQQAALMASVAQGGYLNPMAAFAAAQMQQMAALNMNGLAAAPMTPTSGGSTPPGITAPAVPSIPSPIGVNGFTGLPPQANGQPAAEAVFANGIHPYPAQSPTAADPLQQAYAGVQQYAGPAAYPAAYGQISQAFPQPPPMIPQQQREGPEGCNLFIYHLPQEFGDAELMQMFLPFGFVSFDNPASAQTAIQAMNGFQIGMKRLKVQLKRPKDANRPY

SEQ ID NO: 28374 - DNA, 1458 bp, Artificial Sequence
  derived and/or modified sequence
atgtatattaagatggccacattggccaatggacaagccgataatgcctcactctctaccaatggtcttggcagcagcccagggtctgcgggccacatgaacgggctgtcccattcccctggcaacccaagcacgattccaatgaaagatcacgacgccatcaaattgttcatcggccagattcctcggaaccttgacgaaaaggacttgaaacctcttttcgaggagtttggcaagatatacgaattgacggtactgaaggacagatttaccgggatgcacaaaggttgcgcgttcctgacctactgtgagcgcgagagtgccttaaaagcacaatcagcgcttcatgaacagaagacccttccaggaatgaatagacccatccaggtgaaacccgccgatagcgagtctagaggtggttcctcctgcttgaggcagccaccgtctcaggaccgcaagctgtttgttgggatgctaaataagcaacaatcagaggatgacgtgcggaggcttttcgaagctttcggtaatattgaggagtgcacgatccttaggggccccgacggaaatagtaagggatgtgccttcgtcaaatactcttcccacgcagaagcccaagctgccataaacgccctgcatgggtcacagactatgcccggagcctccagttcacttgtagtaaagtttgccgatacagataaggaacgaaccatgagaagaatgcaacagatggccggccaaatgggtatgtttaatcccatggcaattccctttggggcatacggtgcttacgcccaagctatgcagcagcaagctgccctgatggcgtctgtcgcccagggcgggtacttgaatcccatggctgcattcgctgccgcccagatgcaacagatggccgctttgaatatgaatggtcttgccgccgcacccatgactccgacctccggaggtagcacacccccaggcataacagctccagcggtaccaagcatccccagtccaatcggggtcaacggctttactggtctgccacctcaggctaacgggcagccagcagcagaggccgtgtttgccaatgggatacacccatatccggctcagagcccaaccgccgcggaccctctccagcaagcatacgcgggagttcaacagtacgccggtccagcagcctaccccgccgcatatggtcagatcagtcaagcctttccccaaccacccccaatgattccccagcagcaaagagaagggccagaggggtgtaacctgtttatctaccatcttccccaggaatttggtgacgctgaactgatgcagatgttcctaccttttggcttcgtgagtttcgataaccccgcaagtgcacagaccgcaatccaggccatgaatggcttccagattggcatgaagagactcaaagtgcagctaaagagacccaaagatgctaatcggccttattag

SEQ ID NO: 28375 - DNA, 1458 bp, Artificial Sequence
  derived and/or modified sequence
atgtacatcaagatggccaccctggccaacggccaggccgacaatgccagcctgagcaccaacggcctgggcagcagccctggcagcgctggccacatgaatggcctgagccacagccctggcaaccccagcaccatccccatgaaggaccatgatgccatcaagctgttcatcggccagatccccaggaacctggatgagaaggacctgaagcccctgtttgaggagtttgggaagatctatgagctgactgtgctgaaggaccgcttcaccggcatgcacaagggctgtgccttcctgacctactgtgagcgggagagcgccctgaaggcccagagcgccctgcacgagcagaagaccctgcccggcatgaaccggcccatccaggtgaagccagctgacagcgagagcagaggaggcagcagctgcctgcggcagccccccagccaggacaggaagctgtttgtgggcatgctgaacaagcagcagagtgaagatgatgtgagaagactctttgaggcctttggaaacatcgaggagtgcaccatcctgcggggcccagatggcaacagcaagggctgtgcctttgtgaagtacagcagccatgctgaggcccaggccgccatcaatgccctgcacggcagccagaccatgcctggggccagcagcagcctggtggtgaagtttgctgacacagacaaggagaggaccatgaggaggatgcagcagatggccggccagatgggcatgttcaaccccatggccatcccctttggagcctatggagcctatgcccaggccatgcagcagcaggccgccctgatggcctctgtggcccagggcggctacctgaaccccatggccgcctttgctgctgcccagatgcagcagatggccgccctgaacatgaatggcctggccgccgcccccatgacccccaccagcggcggcagcaccccacctggcatcacagccccagctgtgcccagcatccccagccccatcggcgtgaatggcttcaccggcctgcccccccaggccaacggccagcctgctgctgaggccgtgtttgccaacggcatccacccctacccagcccagagccccacagctgctgaccccctgcagcaggcctatgctggggtgcagcagtatgccggccctgctgcctacccagctgcctacggccagatcagccaggccttcccccagcccccacccatgatcccccagcagcagcgggagggccctgagggctgcaacctcttcatctaccacctgccccaggagtttggagatgctgagctgatgcagatgttcctgccctttggatttgtgtcctttgacaacccagccagcgcccagacagccatccaggccatgaatggcttccagatcggcatgaagaggctgaaggtgcagctgaagaggcccaaggatgccaaccggccctactag

SEQ ID NO: 28376 - DNA, 1458 bp, Artificial Sequence
  derived and/or modified sequence
atgtacatcaagatggccaccctggccaacggccaggccgacaacgccagcctgtccacaaatggtctcggctcctccccggggtctgccggacacatgaacggactgtcacattcaccgggcaacccctctaccatacccatgaaggatcacgacgcaattaaactttttattggccaaattcctagaaatttggacgagaaggatttaaaacccctatttgaggagtttggcaaaatctacgagttgacagttctgaaagataggtttacaggcatgcataaaggctgtgcttttctgacctactgtgaaagagaatctgccctgaaggctcagagcgcattacacgagcagaagactctccccgggatgaataggccaattcaagtaaagcccgctgactccgagtcccggggagggtccagttgtctgaggcagcccccttcccaggacagaaagctgtttgtaggcatgctgaataaacagcagagcgaggatgacgtgagacgtttattcgaggcattcggcaacatcgaagaatgcactatactgcgcggcccagatgggaactctaaaggctgtgcctttgtgaagtactctagccacgccgaagctcaggctgctattaatgctctccacggttctcagaccatgccaggggcaagcagctctcttgttgtgaaattcgcagatacagacaaggagcggacaatgcggaggatgcaacagatggctggccagatgggaatgttcaatcctatggcaatccccttcggcgcgtatggcgcatatgcccaagcaatgcaacagcaggctgcactgatggcctctgtggcccagggaggttatctgaatcctatggccgcgttcgcagcggctcagatgcagcaaatggcggcactgaacatgaacggcttggctgcagcacctatgacccccacgagtgggggaagcaccccgcccgggatcaccgccccggctgttcctagcattccctcgcctatcggggtgaacgggtttaccgggctgccgcctcaggcaaacgggcaacccgccgccgaggccgtcttcgcaaatgggatccacccttatcccgcgcagtccccaacagccgcagatcccctacaacaagcctacgccggtgtccagcagtacgctggacctgccgcctaccccgcagcttacggccagatttcccaggccttccctcagcccccccctatgattccgcagcagcagagggaaggccctgaggggtgtaacctctttatctatcacctgccccaggagtttggagacgcggaactgatgcagatgtttttgccattcgggtttgtgagctttgacaatcccgccagtgctcagaccgccatccaggcaatgaatggctttcagatcgggatgaaaaggttgaaggtgcagctaaaacggcccaaggacgctaaccggccgtactag

SEQ ID NO: 28377 - DNA, 1458 bp, Artificial Sequence
  derived and/or modified sequence
atgtatatcaagatggctacattagccaacggacaggccgacaacgcctcactgagtacaaacgggctgggtagttcgcctggttcggcagggcatatgaacggtttgagtcacagcccaggcaacccttccactatccccatgaaagaccacgatgccattaaactttttattggacagatcccaagaaatttagatgaaaaggacctgaaacctttatttgaggaattcggaaagatctacgagctgacagtgctgaaggacaggttcactggaatgcataaggggtgtgcattcctcacctactgcgagagggaaagtgctctcaaagcccagtcggccttgcacgagcagaagacactacccggaatgaaccggccaatccaggtcaagcccgctgactcagagagccggggtggttcctcttgcttgagacagcccccttcacaggaccgaaagttgttcgtcggcatgcttaacaagcaacagtcagaggatgacgtgcggcgtctctttgaagccttcggaaatatcgaagagtgcacgatcctgcgcggaccagatggcaattctaaaggctgtgcatttgtcaaatattcatcacatgctgaggcacaggcagccataaatgctcttcatgggagtcagacaatgccaggcgcaagttcttctctcgttgttaagttcgctgataccgacaaagagaggaccatgcgaagaatgcagcagatggcaggacagatgggtatgtttaatcccatggcaatcccgtttggggcttacggcgcttacgctcaggctatgcagcagcaggcagcactcatggcatctgtggcgcagggaggctacctaaatcctatggcagccttcgcagccgctcagatgcagcagatggcggctctgaacatgaatggcttggcagccgctcccatgacaccgacgagcggtggttctactccacctggaattactgctccagccgtcccatccatcccatctcccatcggcgtgaatggatttaccggtcttccacctcaggctaatggacagcctgcagccgaggccgtgttcgccaatggaattcatccataccctgctcagtctccaaccgcagctgaccccttgcaacaggcgtacgccggagttcaacagtacgcgggacccgcagcttatccggcagcgtatggacagatcagtcaggcctttccccagccaccaccaatgatcccccaacagcagagggaaggacccgaggggtgcaatttattcatctaccacctaccgcaggagttcggtgacgccgagttaatgcagatgttcctgcccttcggattcgtgagctttgataaccccgctagcgcccagacagctatccaggctatgaacggattccaaatcggaatgaaaaggttgaaggtgcaactgaagcgtccaaaggacgccaacaggccatactag

SEQ ID NO: 28378 - DNA, 4049 bp, Artificial Sequence
  derived and/or modified sequence
gtccagcctgtttaaacggaaaggacagagatcctgtctgttcaatgtaaaaaaaaaaaaaaaaaaaaaaaaaagaaaaaaagaaaaaaaaaatcagatcagaccgagagagagaggagagagggagagagagagggagagagagagggagagagagaggagagggagggagggagagagagaggggggagagcagagagagagcgcgagcgcgagcgagcgagagaagaggagaaagagagagagcagagagcgagcggagagcgaggtgtagagaaaccgagggggagagaacccgagtgtgtgtatgcgtgtgcgtgtgtgagcgcgagcgagcgagagagaggagcgagagagtgtgagcgagaaagaataaaaggaaagaagattttctctatgtatataaagatggccacgttagcaaacggacaggctgacaacgcaagcctcagtaccaacgggctcggcagcagcccgggcagtgccgggcacatgaacggattaagccacagcccggggaacccgtcgaccattcccatgaaggaccacgatgccatcaagctgttcattgggcagatcccccgcaacctggatgagaaggacctcaagcccctcttcgaggagtttggcaaaatctacgagcttacggttctgaaggacaggttcacaggcatgcacaaaggctgcgccttcctcacctactgcgagcgtgagtcagcgctgaaggcccagagcgcgctgcacgagcagaagactctgcccgggatgaaccggccgatccaggtgaagcctgcggacagcgagagccgaggaggtagtagctgcctgcgccagcccccttcacaagatagaaaactcttcgtgggcatgctcaacaagcaacagtccgaggacgacgtgcgccgccttttcgaggcctttgggaacatcgaggagtgcaccatcctgcgcgggcccgacggcaacagcaaggggtgcgcctttgtgaagtactcctcccacgccgaggcgcaggccgccatcaacgcgctacacggcagccagaccatgccgggagcctcgtccagtctggtggtcaagttcgccgacaccgacaaggagcgcacgatgcggcgaatgcagcagatggctggccagatgggcatgttcaaccccatggccatccctttcggggcctacggcgcctacgctcaggcaatgcagcagcaagcggccctgatggcatcagtcgcgcagggcggctacctgaaccccatggctgccttcgctgccgcccagatgcagcagatggcggccctcaacatgaatggcctggcggccgcacctatgaccccaacctcaggtggcagcacccctccgggcatcactgcaccagccgtgcctagcatcccatcccccattggggtgaatggcttcaccggcctccccccacaggccaatgggcaacctgctgcggaagctgtgttcgccaatggcatccacccctacccagcacagagccccaccgccgcggaccccctgcagcaggcctacgccggagtgcagcagtatgcaggtccagctgcctaccctgctgcctatggtcagataagccaggcctttcctcagccgcctccaatgatcccccagcagcagagagaagggcccgagggctgtaacctgttcatctaccatctgccccaggagtttggggacgctgagctgatgcagatgttcctccctttcggcttcgtgagcttcgacaacccggccagcgcgcagaccgccatccaggccatgaacggcttccagatcggcatgaagaggctcaaggtgcagctgaagcggcccaaagacgccaatcgcccgtactgagcgccggcgggagcgtcccccgggggagaccaggactcgcacagggcaggatgctgaacgggctacattaaaaaacaaacctctctctatatatatttataaatgagaactgttggatgacacctttgacatatcagccaatatcaatcaagctgaagactccagacactgtctgtgtgactgtaacatttcttcaaggaaagtatagcgtctatggagttcagagggcacgtgtttgggggaaaatatatatgacatgaagaagaagatgaagaaaaatgagaaaaaaacacacaaaaggcaactttaaaacaaaatatcacgagcagacggggaggctgaagggctgggagctgggaggagacgctgcttaccgatcccggggcttttccagcccacgggcgcctgacgcaggctggggcaagtggtgcgtggggcctggtccccaaggggcggctgagaggccgccactgagcatctctatctgtcattcctttagctatttagggaccaaaggaccaaactttttattgcagatgtgtagctctatgtcaaatagagggggaatggaggaccccctccttcctgcctcatggctgttcttgaaacagcttagagcgattctatgaaaaaatgtaataaaaaattaaaaaaaaaacaaaaaacaaaaaaaacaacaaaaaaaggaaaaataacgcttcaatgcttttaaaacagcaagataatagttctttgatactttgagaggcgctttgatgaccctcatccaagtctatgacactttcctatggttttctgtattctatgtctggatggagctgttaaaagatgaacaaattggtggatatttggggaaagcaacacaaatcttaaaactcacccgtgaagtgtgagaaaacaaggaggggaacaaatgggacttaccaagcaaggtcattgttgtgaaaagtctgtaaatgcttctaactcttccccctcttaaaatcataatagttgtacagaattttaaaaaggaaaagtttaaaatacctatataatagaagaaaaattagaggaaagcaaaaaataaaaaaaaaaaataaaaaaggaaaaaaaaaacctatagaagttagcattactgctaaaatcccagatgttgtaggactgtacttttgtagagtttagacagagcatcaatcccttctccccgcgagtgcagtcggatgccgttgtccccaagggccaggccgaactcgccccacacctgcgggcgcctggctgccgacgccggtggaggccacgccgtcggtcgggaacggtcgcgtcgcccgggtcgccgccgccgccgccgccgtcatcctcgcctctcgcttccctctgggagctgcgcgcgcttcactcaccttccgcttcactcgccttccacgcttgctccagagactttccgggcaagggagaactgggaactttcatcttaaaacaactagacaacacacacacacacaaaaccttaaaaaagagagagaaaaataaacaatctttgaagaatttctgaaactgtttacaaggaattttgaaaaacagggatgtttaaatgatgccggctctgtttttctgtaaataaatttgcatattttgtaggacttttaattgtaatgatagagaaaaaaacaaggaaaactatttaatgaaagcacgatatttatctttggtaaatgactttagagcagttaaagacattgcttaaaaaactcagaatcagaaaaaacactgaattatttaagaacacatatattttaaagtataacatatttattataatttatttgcacccttgggaagattgctttggcattctgccttgattccttctcattgatgtccaggtcatctggaggccgggggttctcagacctaccagtttccctttagaagaacaaatttccagttcctctagggcctcctgcctttcctttctttctgtcaattttgttgttgttgttgtttttcattttctttttttctcttgactcctccttttaggatgtccagatgtaaaaaaaaaaaaaaaaaaaagaaaaaaagaaaaaaaaaagaaaacagctgcagttcagtacaactgctcttttcacactcaactccctaaaactccttgtaaccttctgtaactattggatgacgctttctccagcttagccctaaataaagcacagttt

SEQ ID NO: 28379 - DNA, 1458 bp, Artificial Sequence
  derived and/or modified sequence
atgtacatcaagatggccaccctggccaacggccaggccgacaacgccagcctgagcaccaacggcctgggcagcagccccggcagcgccggccacatgaacggcctgagccacagccccggcaaccccagcaccatccccatgaaggaccacgacgccatcaagctgttcatcggccagatccccagaaacctggacgagaaggacctgaagcccctgttcgaggagttcggcaagatctacgagctgaccgtgctgaaggacagattcaccggcatgcacaagggctgcgccttcctgacctactgcgagagagagagcgccctgaaggcccagagcgccctgcacgagcagaagaccctgcccggcatgaacagacccatccaggtgaagcccgccgacagcgagagcagaggcggcagcagctgcctgagacagccccccagccaggacagaaagctgttcgtgggcatgctgaacaagcagcagagcgaggacgacgtgagaagactgttcgaggccttcggcaacatcgaggagtgcaccatcctgagaggccccgacggcaacagcaagggctgcgccttcgtgaagtacagcagccacgccgaggcccaggccgccatcaacgccctgcacggcagccagaccatgcccggcgccagcagcagcctggtggtgaagttcgccgacaccgacaaggagagaaccatgagaagaatgcagcagatggccggccagatgggcatgttcaaccccatggccatccccttcggcgcctacggcgcctacgcccaggccatgcagcagcaggccgccctgatggccagcgtggcccagggcggctacctgaaccccatggccgccttcgccgccgcccagatgcagcagatggccgccctgaacatgaacggcctggccgccgcccccatgacccccaccagcggcggcagcaccccccccggcatcaccgcccccgccgtgcccagcatccccagccccatcggcgtgaacggcttcaccggcctgcccccccaggccaacggccagcccgccgccgaggccgtgttcgccaacggcatccacccctaccccgcccagagccccaccgccgccgaccccctgcagcaggcctacgccggcgtgcagcagtacgccggccccgccgcctaccccgccgcctacggccagatcagccaggccttcccccagcccccccccatgatcccccagcagcagagagagggccccgagggctgcaacctgttcatctaccacctgccccaggagttcggcgacgccgagctgatgcagatgttcctgcccttcggcttcgtgagcttcgacaaccccgccagcgcccagaccgccatccaggccatgaacggcttccagatcggcatgaagagactgaaggtgcagctgaagagacccaaggacgccaacagaccctactag

SEQ ID NO: 28380 - protein, 484 aa, Artificial Sequence
  derived and/or modified sequence
MYIKMATLANGQADNASLSTNGLGSSPGSAGHMNGLSHSPGNPSTIPMKDHDAIKLFIGQIPRNLDEKDLKPLFEEFGKIYELTVLKDRFTGMHKGCAFLTYCERESALKAQSALHEQKTLPGMNRPIQVKPADSESRGGSSCLRQPPSHRKLFVGMLNKQQSEDDVRRLFEAFGNIEECTILRGPDGNSKGCAFVKYSSHAEAQAAINALHGSQTMPGASSSLVVKFADTDKERTMRRMQQMAGQMGMFNPMAIPFGAYGAYAQAMQQQAALMASVAQGGYLNPMAAFAAAQMQQMAALNMNGLAAAPMTPTSGGSTPPGITAPAVPSIPSPIGVNGFTGLPPQANGQPAAEAVFANGIHPYPAQSPTAADPLQQAYAGVQQYAGPAAYPAAYGQISQAFPQPPPMIPQQQREGPEGCNLFIYHLPQEFGDAELMQMFLPFGFVSFDNPASAQTAIQAMNGFQIGMKRLKVQLKRPKDANRPY

SEQ ID NO: 28381 - DNA, 1455 bp, Artificial Sequence
  derived and/or modified sequence
atgtatatcaagatggccaccctcgccaacggacaggctgacaatgcctcactcagtaccaacgggttagggagctctccaggctcggccggtcacatgaacggactttcccactctcccgggaatcccagtactatcccaatgaaggatcacgacgctattaagctgtttatcggccaaatccctcgcaatctcgatgagaaagacctcaagcccttatttgaagaatttggtaaaatctatgagttgacagtgctcaaggataggttcactgggatgcataaggggtgcgccttcttgacgtattgcgaacgtgaatccgccctaaaggcccagtctgcactgcacgagcagaaaaccctgccgggtatgaaccgacccatccaagtgaagcctgccgactcagagagtcgcggagggtcttcctgcttgagacagccgccatcacataggaagttattcgtcggcatgcttaataagcaacagtcggaggacgacgtccgccgactgttcgaggcttttgggaatattgaggaatgcactatcctcagaggacctgatgggaactccaagggctgcgcgttcgtgaaatatagtagccacgccgaagctcaggccgccataaacgcacttcacggttcccagaccatgcccggtgcttcttctagccttgtggttaaatttgcagacacagataaggagcgtacaatgcgtcgcatgcagcagatggcaggccagatggggatgttcaacccaatggcgatccctttcggcgcctacggcgcctatgcccaagctatgcaacagcaggccgccctgatggctagcgttgctcagggcggctacctgaacccaatggccgcctttgccgctgcccaaatgcaacagatggccgccctgaacatgaacggcctggccgctgcaccgatgaccccaaccagcggggggagcacaccaccaggaattacagcgccagcagtcccatctatccccagtcccatcggggtaaacggattcactggcctaccacctcaggcaaatggccagcccgccgccgaggccgtcttcgcgaatgggatccacccctatccagctcagtctcccaccgcagcagatccacttcagcaggcctacgctggcgtccagcagtatgctggccctgccgcttaccctgccgcgtatggccaaattagtcaggccttcccacaaccaccacccatgatacctcagcagcagagggagggtccagaggggtgtaatctatttatctatcacctcccgcaggaatttggggacgccgagctgatgcagatgttcctcccttttggtttcgtgtctttcgataacccggctagtgcacagacggcgatccaagccatgaatgggttccagatagggatgaaacgcctaaaggtacagttaaaaaggccgaaagacgctaatcggccttactag

SEQ ID NO: 28382 - DNA, 1455 bp, Artificial Sequence
  derived and/or modified sequence
atgtacatcaagatggccaccctggccaacggccaggccgacaatgccagcctgagcaccaacggcctgggcagcagccctggcagcgctggccacatgaatggcctgagccacagccctggcaaccccagcaccatccccatgaaggaccatgatgccatcaagctgttcatcggccagatccccaggaacctggatgagaaggacctgaagcccctgtttgaggagtttgggaagatctatgagctgactgtgctgaaggaccgcttcaccggcatgcacaagggctgtgccttcctgacctactgtgagcgggagagcgccctgaaggcccagagcgccctgcacgagcagaagaccctgcccggcatgaaccggcccatccaggtgaagccagctgacagcgagagcagaggaggcagcagctgcctgcggcagccccccagccacaggaagctgtttgtgggcatgctgaacaagcagcagagtgaagatgatgtgcggcggctgtttgaggccttcggcaacattgaagaatgtaccatcctgcggggcccagatggcaacagcaagggctgtgcctttgtgaagtacagcagccacgccgaggcccaggccgccatcaatgccctgcacggcagccagaccatgcctggggccagcagcagcctggtggtgaagtttgctgacacagacaaggagaggaccatgaggaggatgcagcagatggccggccagatgggcatgttcaaccccatggccatcccctttggagcctacggggcctatgcccaggccatgcagcagcaggccgccctgatggcctctgtggcccagggcggctacctgaaccccatggccgcctttgctgctgcccagatgcagcagatggccgccctgaacatgaatggcctggccgccgcccccatgacccccaccagcggcggcagcaccccacctggcatcacagccccagctgtgcccagcatccccagccccatcggcgtgaatggcttcaccggcctgcccccccaggccaacggccagcctgctgctgaggccgtgtttgccaacggcatccacccctacccagcccagagccccacagctgctgaccccctgcagcaggcctatgccggcgtgcagcagtatgccggccctgctgcctacccagctgcctacggccagatcagccaggccttcccccagcccccacccatgatcccccagcagcagcgggagggccctgagggctgcaacctcttcatctaccacctgccccaggagtttggagatgctgagctgatgcagatgttcctgcccttcggctttgtgtcctttgacaacccagccagcgcccagacagccatccaggccatgaatggcttccagatcggcatgaagaggctgaaggtgcagctgaagaggcccaaggatgccaaccggccctactag

SEQ ID NO: 28383 - DNA, 1455 bp, Artificial Sequence
  derived and/or modified sequence
atgtacatcaagatggccaccctggccaacggccaggccgacaacgcatcattgtccaccaatgggctcgggagtagccccgggagtgctgggcacatgaacggcctgtcccatagtccaggcaacccctctaccatccccatgaaagatcatgatgcaatcaagctgttcatcggccaaattccacggaatctcgacgagaaagacctcaagccactgtttgaggagttcggcaagatttacgaactcactgtgctcaaagaccgctttaccggcatgcacaaggggtgtgctttcttgacctattgcgagcgggaatcagcgctgaaggcccagtccgccctgcacgagcagaagacgttgccgggcatgaaccgcccaatccaagtgaaacctgccgacagtgagtcacgcggcggatccagctgcctgaggcaaccaccgtcccaccggaagctatttgtgggaatgttaaacaagcagcagtctgaggatgacgtacgtagactctttgaggcctttggaaatatcgaggagtgtacgatcctcagaggtcctgacggtaattcaaaaggatgtgccttcgtcaagtatagctcccatgctgaagctcaagccgctattaacgccctgcacggcagtcagacaatgcccggagctagtagcagcttggtcgtcaagtttgccgatactgacaaggaacgtactatgcgtcggatgcaacagatggctggacagatgggaatgttcaatccaatggcaatcccattcggggcttacggtgcttatgcccaggcaatgcagcagcaggccgctcttatggcatccgtcgctcaggggggctatttgaatcccatggcagcattcgcggcagcacaaatgcagcagatggccgcattaaacatgaatggtttggctgctgcaccaatgacgccgacaagcggcggctccactcccccagggatcaccgcccccgctgtgccctcgatccctagtccaatcggcgtaaatggattcacaggactccctccccaagcaaacggccagccggcggccgaggctgtttttgccaacggcatccatccgtaccccgcccagtcacccacggctgcagaccctctgcagcaggcttatgcaggtgtacaacaatacgccggccccgccgcctaccccgctgcatacggacagatcagtcaagccttccctcagccaccacccatgatccctcagcagcagagagagggacccgagggatgcaacctgttcatctaccacctcccccaggaatttggggatgccgaactgatgcagatgtttttgccatttggctttgtcagcttcgataaccccgcgtctgcccagacagccatccaagccatgaacggcttccagataggtatgaaaaggctgaaagtccagcttaagcggcccaaagacgccaaccgaccctattag

SEQ ID NO: 28384 - DNA, 1455 bp, Artificial Sequence
  derived and/or modified sequence
atgtatatcaagatggccacattggcaaacggacaagctgacaatgcatccctgtctacgaacgggctgggctcctccccaggaagtgcgggacacatgaatggcctgtcccactccccaggcaatccgagcaccatacccatgaaggatcacgacgctattaagctgttcatcgggcagattcctcgcaacttggatgagaaggatctgaaacccctgttcgaggaatttggtaaaatatatgaattgaccgtacttaaagacaggttcaccgggatgcataaggggtgtgcattcttgacatactgtgaacgagagagtgctcttaaagctcagagtgctctccatgagcaaaagactttgccaggcatgaacagacctatccaggtgaagcccgcagacagtgagtcacgtggtggatctagttgcctgcgacagccaccatctcatcggaagctgtttgtaggaatgctgaataagcagcaaagcgaggacgatgtccgcaggctctttgaggcctttggtaatatcgaggagtgcacgatactcagagggcctgacggaaattcgaagggctgtgcatttgtgaaatacagctctcatgccgaggcccaagccgcaatcaatgccctacacggaagtcaaaccatgccaggtgcctccagcagcctcgtcgtcaagttcgccgatacggacaaagagcgcaccatgcgaaggatgcagcaaatggccggacaaatgggaatgttcaaccccatggcaatccccttcggcgcatacggcgcatatgcacaggcgatgcagcagcaagcagccttgatggcctctgtagcacagggaggctaccttaatcccatggctgctttcgcagcagctcagatgcagcagatggccgctctgaacatgaatgggctggccgcagcacccatgaccccaaccagcgggggttccacaccgcctggcatcaccgcccctgcagtgccaagtatcccgtctcccatcggcgtaaacggcttcactggtcttccacctcaggctaatggtcagccagctgccgaggccgtcttcgccaacggcatccatccttatcctgctcagagtcccacagccgcagatccactccagcaggcctatgccggagtgcaacaatacgcaggccctgccgcatatcccgcagcgtacgggcagatatctcaagcattcccccagccacctcctatgataccccagcaacagcgtgaagggccagaaggctgcaacctcttcatataccacctgccacaggagtttggggatgctgagctaatgcagatgttcctgccgttcggttttgtgagtttcgacaacccagcctctgcccagaccgccattcaggctatgaacggctttcagattggcatgaaaagactgaaggtccagcttaagcgaccaaaggacgctaatcgcccatactag

SEQ ID NO: 28385 - DNA, 4046 bp, Artificial Sequence
  derived and/or modified sequence
gtccagcctgtttaaacggaaaggacagagatcctgtctgttcaatgtaaaaaaaaaaaaaaaaaaaaaaaaaagaaaaaaagaaaaaaaaaatcagatcagaccgagagagagaggagagagggagagagagagggagagagagagggagagagagaggagagggagggagggagagagagaggggggagagcagagagagagcgcgagcgcgagcgagcgagagaagaggagaaagagagagagcagagagcgagcggagagcgaggtgtagagaaaccgagggggagagaacccgagtgtgtgtatgcgtgtgcgtgtgtgagcgcgagcgagcgagagagaggagcgagagagtgtgagcgagaaagaataaaaggaaagaagattttctctatgtatataaagatggccacgttagcaaacggacaggctgacaacgcaagcctcagtaccaacgggctcggcagcagcccgggcagtgccgggcacatgaacggattaagccacagcccggggaacccgtcgaccattcccatgaaggaccacgatgccatcaagctgttcattgggcagatcccccgcaacctggatgagaaggacctcaagcccctcttcgaggagtttggcaaaatctacgagcttacggttctgaaggacaggttcacaggcatgcacaaaggctgcgccttcctcacctactgcgagcgtgagtcagcgctgaaggcccagagcgcgctgcacgagcagaagactctgcccgggatgaaccggccgatccaggtgaagcctgcggacagcgagagccgaggaggtagtagctgcctgcgccagcccccttcacatagaaaactcttcgtgggcatgctcaacaagcaacagtccgaggacgacgtgcgccgccttttcgaggcctttgggaacatcgaggagtgcaccatcctgcgcgggcccgacggcaacagcaaggggtgcgcctttgtgaagtactcctcccacgccgaggcgcaggccgccatcaacgcgctacacggcagccagaccatgccgggagcctcgtccagtctggtggtcaagttcgccgacaccgacaaggagcgcacgatgcggcgaatgcagcagatggctggccagatgggcatgttcaaccccatggccatccctttcggggcctacggcgcctacgctcaggcaatgcagcagcaagcggccctgatggcatcagtcgcgcagggcggctacctgaaccccatggctgccttcgctgccgcccagatgcagcagatggcggccctcaacatgaatggcctggcggccgcacctatgaccccaacctcaggtggcagcacccctccgggcatcactgcaccagccgtgcctagcatcccatcccccattggggtgaatggcttcaccggcctccccccacaggccaatgggcaacctgctgcggaagctgtgttcgccaatggcatccacccctacccagcacagagccccaccgccgcggaccccctgcagcaggcctacgccggagtgcagcagtatgcaggtccagctgcctaccctgctgcctatggtcagataagccaggcctttcctcagccgcctccaatgatcccccagcagcagagagaagggcccgagggctgtaacctgttcatctaccatctgccccaggagtttggggacgctgagctgatgcagatgttcctccctttcggcttcgtgagcttcgacaacccggccagcgcgcagaccgccatccaggccatgaacggcttccagatcggcatgaagaggctcaaggtgcagctgaagcggcccaaagacgccaatcgcccgtactgagcgccggcgggagcgtcccccgggggagaccaggactcgcacagggcaggatgctgaacgggctacattaaaaaacaaacctctctctatatatatttataaatgagaactgttggatgacacctttgacatatcagccaatatcaatcaagctgaagactccagacactgtctgtgtgactgtaacatttcttcaaggaaagtatagcgtctatggagttcagagggcacgtgtttgggggaaaatatatatgacatgaagaagaagatgaagaaaaatgagaaaaaaacacacaaaaggcaactttaaaacaaaatatcacgagcagacggggaggctgaagggctgggagctgggaggagacgctgcttaccgatcccggggcttttccagcccacgggcgcctgacgcaggctggggcaagtggtgcgtggggcctggtccccaaggggcggctgagaggccgccactgagcatctctatctgtcattcctttagctatttagggaccaaaggaccaaactttttattgcagatgtgtagctctatgtcaaatagagggggaatggaggaccccctccttcctgcctcatggctgttcttgaaacagcttagagcgattctatgaaaaaatgtaataaaaaattaaaaaaaaaacaaaaaacaaaaaaaacaacaaaaaaaggaaaaataacgcttcaatgcttttaaaacagcaagataatagttctttgatactttgagaggcgctttgatgaccctcatccaagtctatgacactttcctatggttttctgtattctatgtctggatggagctgttaaaagatgaacaaattggtggatatttggggaaagcaacacaaatcttaaaactcacccgtgaagtgtgagaaaacaaggaggggaacaaatgggacttaccaagcaaggtcattgttgtgaaaagtctgtaaatgcttctaactcttccccctcttaaaatcataatagttgtacagaattttaaaaaggaaaagtttaaaatacctatataatagaagaaaaattagaggaaagcaaaaaataaaaaaaaaaaataaaaaaggaaaaaaaaaacctatagaagttagcattactgctaaaatcccagatgttgtaggactgtacttttgtagagtttagacagagcatcaatcccttctccccgcgagtgcagtcggatgccgttgtccccaagggccaggccgaactcgccccacacctgcgggcgcctggctgccgacgccggtggaggccacgccgtcggtcgggaacggtcgcgtcgcccgggtcgccgccgccgccgccgccgtcatcctcgcctctcgcttccctctgggagctgcgcgcgcttcactcaccttccgcttcactcgccttccacgcttgctccagagactttccgggcaagggagaactgggaactttcatcttaaaacaactagacaacacacacacacacaaaaccttaaaaaagagagagaaaaataaacaatctttgaagaatttctgaaactgtttacaaggaattttgaaaaacagggatgtttaaatgatgccggctctgtttttctgtaaataaatttgcatattttgtaggacttttaattgtaatgatagagaaaaaaacaaggaaaactatttaatgaaagcacgatatttatctttggtaaatgactttagagcagttaaagacattgcttaaaaaactcagaatcagaaaaaacactgaattatttaagaacacatatattttaaagtataacatatttattataatttatttgcacccttgggaagattgctttggcattctgccttgattccttctcattgatgtccaggtcatctggaggccgggggttctcagacctaccagtttccctttagaagaacaaatttccagttcctctagggcctcctgcctttcctttctttctgtcaattttgttgttgttgttgtttttcattttctttttttctcttgactcctccttttaggatgtccagatgtaaaaaaaaaaaaaaaaaaaagaaaaaaagaaaaaaaaaagaaaacagctgcagttcagtacaactgctcttttcacactcaactccctaaaactccttgtaaccttctgtaactattggatgacgctttctccagcttagccctaaataaagcacagttt

SEQ ID NO: 28386 - DNA, 1455 bp, Artificial Sequence
  derived and/or modified sequence
atgtacatcaagatggccaccctggccaacggccaggccgacaacgccagcctgagcaccaacggcctgggcagcagccccggcagcgccggccacatgaacggcctgagccacagccccggcaaccccagcaccatccccatgaaggaccacgacgccatcaagctgttcatcggccagatccccagaaacctggacgagaaggacctgaagcccctgttcgaggagttcggcaagatctacgagctgaccgtgctgaaggacagattcaccggcatgcacaagggctgcgccttcctgacctactgcgagagagagagcgccctgaaggcccagagcgccctgcacgagcagaagaccctgcccggcatgaacagacccatccaggtgaagcccgccgacagcgagagcagaggcggcagcagctgcctgagacagccccccagccacagaaagctgttcgtgggcatgctgaacaagcagcagagcgaggacgacgtgagaagactgttcgaggccttcggcaacatcgaggagtgcaccatcctgagaggccccgacggcaacagcaagggctgcgccttcgtgaagtacagcagccacgccgaggcccaggccgccatcaacgccctgcacggcagccagaccatgcccggcgccagcagcagcctggtggtgaagttcgccgacaccgacaaggagagaaccatgagaagaatgcagcagatggccggccagatgggcatgttcaaccccatggccatccccttcggcgcctacggcgcctacgcccaggccatgcagcagcaggccgccctgatggccagcgtggcccagggcggctacctgaaccccatggccgccttcgccgccgcccagatgcagcagatggccgccctgaacatgaacggcctggccgccgcccccatgacccccaccagcggcggcagcaccccccccggcatcaccgcccccgccgtgcccagcatccccagccccatcggcgtgaacggcttcaccggcctgcccccccaggccaacggccagcccgccgccgaggccgtgttcgccaacggcatccacccctaccccgcccagagccccaccgccgccgaccccctgcagcaggcctacgccggcgtgcagcagtacgccggccccgccgcctaccccgccgcctacggccagatcagccaggccttcccccagcccccccccatgatcccccagcagcagagagagggccccgagggctgcaacctgttcatctaccacctgccccaggagttcggcgacgccgagctgatgcagatgttcctgcccttcggcttcgtgagcttcgacaaccccgccagcgcccagaccgccatccaggccatgaacggcttccagatcggcatgaagagactgaaggtgcagctgaagagacccaaggacgccaacagaccctactag

SEQ ID NO: 28387 - protein, 448 aa, Artificial Sequence
  derived and/or modified sequence
MYIKMATLANGQADNASLSTNGLGSSPGSAGHMNGLSHSPGNPSTIPMKDHDAIKLFIGQIPRNLDEKDLKPLFEEFGKIYELTVLKDRFTGMHKGCAFLTYCERESALKAQSALHEQKTLPGMNRPIQVKPADSESRGEDRKLFVGMLNKQQSEDDVRRLFEAFGNIEECTILRGPDGNSKGCAFVKYSSHAEAQAAINALHGSQTMPGASSSLVVKFADTDKERTMRRMQQMAGQMGMFNPMAIPFGAYGAYAQALMQQQAALMASVAQGGYLNPMAAFAAAQMQQMAALNMNGLAAAPMTPTSGGSTPPGITAPAVPSIPSPIGVNGFTGLPPQANGQPAAEAVFANGIHPYPAQSPTAADPLQQAYAGVQQYAGPAAYPAAYGQISQAFPQPPPMIPQQQREGFVSFDNPASAQTAIQAMNGFQIGMKRLKVQLKRPKDANRPY

SEQ ID NO: 28388 - DNA, 1347 bp, Artificial Sequence
  derived and/or modified sequence
atgtacattaagatggcgactctggccaatggacaggcagataacgcttctctctcaaccaacggcctggggtccagcccaggcagcgcagggcatatgaacgggttatctcactctccaggaaacccctcgaccatccctatgaaggaccatgatgcaatcaagcttttcattggacagattcctaggaaccttgatgaaaaggatttgaaaccactgttcgaggaattcggtaagatctatgaactcactgtgctgaaagaccgctttaccggtatgcataagggctgtgcctttctaacctactgtgagagggagagtgcccttaaggcccagtccgccttgcacgagcaaaagactctgcccggcatgaacaggccaatccaagtgaaacctgcagattcagagtctagaggagaggaccgaaagctgttcgtgggcatgctgaataagcaacaatcggaggacgatgttcgtagactttttgaagcgttcggcaatattgaggaatgcaccatacttcgcgggccagacggaaattcaaaaggatgcgcctttgtgaagtattccagtcatgccgaggcgcaagccgcaatcaatgccctgcacggcagccagactatgccaggggctagcagcagcctcgtcgtcaaattcgctgacacagataaagagcgcactatgcgccgaatgcagcagatggcaggacagatggggatgtttaatcctatggcaattccttttggggcatacggcgcatacgcccaggcactcatgcagcaacaggctgccctcatggcatcagtggcccagggaggctatttaaatcctatggctgcttttgccgcagctcagatgcaacagatggctgcattaaatatgaatggcctggccgctgctcctatgaccccaacgtcgggtggttccacgccacctgggattactgcgcctgctgtccccagcattcccagtcccataggggtcaacggcttcaccggtttgcctccgcaggccaacgggcagcctgcagctgaggctgtgttcgccaatgggattcacccatatccagctcagtcacctacagccgcagatcccctccagcaggcctatgctggcgtgcagcagtacgcaggccctgctgcctatccagctgcctatggacagatatctcaagctttcccccagcccccaccgatgattcctcagcagcagagggaggggttcgtgtccttcgacaatccagcctcggcccagaccgctatacaagcaatgaacggattccagatcggcatgaagagattgaaagtccagctcaagcgaccgaaagacgccaacaggccctactag

SEQ ID NO: 28389 - DNA, 1347 bp, Artificial Sequence
  derived and/or modified sequence
atgtacatcaagatggccaccctggccaacggccaggccgacaatgccagcctgagcaccaacggcctgggcagcagccctggcagcgctggccacatgaatggcctgagccacagccctggcaaccccagcaccatccccatgaaggaccatgatgccatcaagctgttcatcggccagatccccaggaacctggatgagaaggacctgaagcccctgtttgaggagtttgggaagatctatgagctgactgtgctgaaggaccgcttcaccggcatgcacaagggctgtgccttcctgacctactgtgagcgggagagcgccctgaaggcccagagcgccctgcacgagcagaagaccctgcccggcatgaaccggcccatccaggtgaagccagctgacagcgagagcagaggagaggacaggaagctgtttgtgggcatgctgaacaagcagcagagtgaagatgatgtgagaagactctttgaggcctttggaaacatcgaggagtgcaccatcctgcggggcccagatggcaacagcaagggctgtgcctttgtgaagtacagcagccatgctgaggcccaggccgccatcaatgccctgcacggcagccagaccatgcctggggccagcagcagcctggtggtgaagtttgctgacacagacaaggagaggaccatgaggaggatgcagcagatggccggccagatgggcatgttcaaccccatggccatcccctttggagcctatggagcctatgcccaggccctgatgcagcagcaggccgccctgatggcctctgtggcccagggcggctacctgaaccccatggccgcctttgctgctgcccagatgcagcagatggccgccctgaacatgaatggcctggccgccgcccccatgacccccaccagcggcggcagcaccccacctggcatcacagccccagctgtgcccagcatccccagccccatcggcgtgaatggcttcaccggcctgcccccccaggccaacggccagcctgctgctgaggccgtgtttgccaacggcatccacccctacccagcccagagccccacagctgctgaccccctgcagcaggcctatgccggcgtgcagcagtatgccggccctgctgcctacccagctgcctacggccagatcagccaggccttcccccagcccccacccatgatcccccagcagcagcgggagggctttgtgtcctttgacaacccagccagcgcccagacagccatccaggccatgaatggcttccagatcggcatgaagaggctgaaggtgcagctgaagaggcccaaggatgccaaccggccctactag

SEQ ID NO: 28390 - DNA, 1347 bp, Artificial Sequence
  derived and/or modified sequence
atgtacatcaagatggccaccctggccaacggccaggccgacaacgcctctttaagtacaaatggactgggatcatcacccggctctgcaggtcatatgaatggactgagccattcgcccggcaatcccagcacgatccccatgaaggatcatgacgccattaaactgttcattggccaaattccgcggaaccttgatgagaaagatcttaagcccctgttcgaggagtttggcaagatatacgagctgactgtgttaaaggataggttcaccgggatgcacaagggttgcgcattcttgacatattgtgaaagagagagtgccttaaaagcgcagtccgccttgcacgagcagaagacattgcccggtatgaaccgccctattcaggtgaaaccagcggactccgagtctcgaggtgaagaccgcaagctctttgtgggaatgctcaacaagcagcagtcagaggacgatgtgcgcaggctgtttgaggccttcggcaacatagaagagtgcacgatcttgagaggtccggacggaaatagtaagggctgtgcattcgtgaaatattcatctcacgctgaggcacaggccgccattaacgcattgcatggcagtcagacaatgcctggagcctccagttccctggtggtgaagtttgccgacacagacaaggaaagaactatgcgccgcatgcagcagatggcggggcagatggggatgtttaaccccatggccataccgttcggggcgtatggggcctacgcacaggcccttatgcagcagcaagcagcgctcatggccagtgtggcgcagggagggtatttgaaccctatggcggcctttgctgcagcccaaatgcagcagatggcagctctgaacatgaatggtctggccgccgcgcccatgacgcctacctcaggcggaagtactccccctggcataacagcacctgctgtcccgtcgatcccctctccgattggtgtcaacggttttactggcctccctccacaagccaacggacagccggcagctgaggccgtgtttgccaatggcatacatccctatcccgcccagtcacccacggcagcagatccgctgcaacaagcctacgccggcgtgcaacagtacgcagggccagccgcataccctgccgcatacggacagatttcccaggcgttccctcagccgcctcccatgataccccaacagcagagagagggcttcgtctcattcgacaaccccgcttcggcccagacggcaatacaggcaatgaatgggtttcagatcggcatgaaacgactgaaagtgcagctgaaacgtcctaaggatgcaaaccgtccatactag

SEQ ID NO: 28391 - DNA, 1347 bp, Artificial Sequence
  derived and/or modified sequence
atgtacatcaagatggctacccttgcgaatgggcaagctgacaacgcttcactctccactaacggactgggctcctcaccagggtccgcaggacacatgaatggcttgagccatagtccagggaacccaagcactattccaatgaaggaccacgatgcaatcaaactttttatcggccagatcccacgaaacctggacgaaaaggatcttaaaccgctgtttgaggaattcggcaaaatctacgagctgacagtgctcaaggatcgattcacaggcatgcacaagggctgtgcgtttttaacttactgtgagagagagtctgctctgaaagcccagtccgctctccatgaacaaaagacactgcccggtatgaatagaccgattcaagtcaagcctgctgactcagagtctcgaggtgaagataggaaactgttcgtgggcatgctgaataagcaacaatccgaggatgatgtgcggaggctcttcgaagcattcgggaatatcgaagaatgcacaatcctccgaggtccagatggtaacagtaagggctgcgctttcgtcaagtatagttctcatgcggaggcccaggcggctataaatgcgttacacgggagtcagactatgccaggcgcttcgtcatccctggtagttaaattcgctgacacagataaagagcgcacaatgcggagaatgcagcaaatggccggtcagatgggcatgtttaaccctatggctattccttttggggcatatggcgcttacgctcaggcgctgatgcagcagcaagctgcactgatggcatcagtggcccaggggggatacctcaatccaatggccgctttcgcagccgcacagatgcagcagatggccgctcttaatatgaacggtctggctgccgctccaatgactcctactagcgggggtagcacacccccagggatcacggctccggctgtccccagtatcccgagtcctattggtgttaacggctttaccgggttgcccccacaagctaatgggcagcccgcagcggaagcagtgttcgctaacggaattcacccctaccccgctcaatctcctactgccgcagatcctctgcagcaagcgtacgccggagtgcagcagtacgcaggtccagccgcttaccccgcagcttatggtcagatatcgcaggctttccctcagccacctccaatgatccctcagcagcagcgtgaaggtttcgttagtttcgataacccagcaagtgcccagactgccattcaggcaatgaacggatttcagatcgggatgaagcggcttaaagtacagctgaagcgaccaaaagatgccaaccgtccctattag

SEQ ID NO: 28392 - DNA, 3938 bp, Artificial Sequence
  derived and/or modified sequence
gtccagcctgtttaaacggaaaggacagagatcctgtctgttcaatgtaaaaaaaaaaaaaaaaaaaaaaaaaagaaaaaaagaaaaaaaaaatcagatcagaccgagagagagaggagagagggagagagagagggagagagagagggagagagagaggagagggagggagggagagagagaggggggagagcagagagagagcgcgagcgcgagcgagcgagagaagaggagaaagagagagagcagagagcgagcggagagcgaggtgtagagaaaccgagggggagagaacccgagtgtgtgtatgcgtgtgcgtgtgtgagcgcgagcgagcgagagagaggagcgagagagtgtgagcgagaaagaataaaaggaaagaagattttctctatgtatataaagatggccacgttagcaaacggacaggctgacaacgcaagcctcagtaccaacgggctcggcagcagcccgggcagtgccgggcacatgaacggattaagccacagcccggggaacccgtcgaccattcccatgaaggaccacgatgccatcaagctgttcattgggcagatcccccgcaacctggatgagaaggacctcaagcccctcttcgaggagtttggcaaaatctacgagcttacggttctgaaggacaggttcacaggcatgcacaaaggctgcgccttcctcacctactgcgagcgtgagtcagcgctgaaggcccagagcgcgctgcacgagcagaagactctgcccgggatgaaccggccgatccaggtgaagcctgcggacagcgagagccgaggagaagatagaaaactcttcgtgggcatgctcaacaagcaacagtccgaggacgacgtgcgccgccttttcgaggcctttgggaacatcgaggagtgcaccatcctgcgcgggcccgacggcaacagcaaggggtgcgcctttgtgaagtactcctcccacgccgaggcgcaggccgccatcaacgcgctacacggcagccagaccatgccgggagcctcgtccagtctggtggtcaagttcgccgacaccgacaaggagcgcacgatgcggcgaatgcagcagatggctggccagatgggcatgttcaaccccatggccatccctttcggggcctacggcgcctacgctcaggcactgatgcagcagcaagcggccctgatggcatcagtcgcgcagggcggctacctgaaccccatggctgccttcgctgccgcccagatgcagcagatggcggccctcaacatgaatggcctggcggccgcacctatgaccccaacctcaggtggcagcacccctccgggcatcactgcaccagccgtgcctagcatcccatcccccattggggtgaatggcttcaccggcctccccccacaggccaatgggcaacctgctgcggaagctgtgttcgccaatggcatccacccctacccagcacagagccccaccgccgcggaccccctgcagcaggcctacgccggagtgcagcagtatgcaggtccagctgcctaccctgctgcctatggtcagataagccaggcctttcctcagccgcctccaatgatcccccagcagcagagagaaggcttcgtgagcttcgacaacccggccagcgcgcagaccgccatccaggccatgaacggcttccagatcggcatgaagaggctcaaggtgcagctgaagcggcccaaagacgccaatcgcccgtactgagcgccggcgggagcgtcccccgggggagaccaggactcgcacagggcaggatgctgaacgggctacattaaaaaacaaacctctctctatatatatttataaatgagaactgttggatgacacctttgacatatcagccaatatcaatcaagctgaagactccagacactgtctgtgtgactgtaacatttcttcaaggaaagtatagcgtctatggagttcagagggcacgtgtttgggggaaaatatatatgacatgaagaagaagatgaagaaaaatgagaaaaaaacacacaaaaggcaactttaaaacaaaatatcacgagcagacggggaggctgaagggctgggagctgggaggagacgctgcttaccgatcccggggcttttccagcccacgggcgcctgacgcaggctggggcaagtggtgcgtggggcctggtccccaaggggcggctgagaggccgccactgagcatctctatctgtcattcctttagctatttagggaccaaaggaccaaactttttattgcagatgtgtagctctatgtcaaatagagggggaatggaggaccccctccttcctgcctcatggctgttcttgaaacagcttagagcgattctatgaaaaaatgtaataaaaaattaaaaaaaaaacaaaaaacaaaaaaaacaacaaaaaaaggaaaaataacgcttcaatgcttttaaaacagcaagataatagttctttgatactttgagaggcgctttgatgaccctcatccaagtctatgacactttcctatggttttctgtattctatgtctggatggagctgttaaaagatgaacaaattggtggatatttggggaaagcaacacaaatcttaaaactcacccgtgaagtgtgagaaaacaaggaggggaacaaatgggacttaccaagcaaggtcattgttgtgaaaagtctgtaaatgcttctaactcttccccctcttaaaatcataatagttgtacagaattttaaaaaggaaaagtttaaaatacctatataatagaagaaaaattagaggaaagcaaaaaataaaaaaaaaaaataaaaaaggaaaaaaaaaacctatagaagttagcattactgctaaaatcccagatgttgtaggactgtacttttgtagagtttagacagagcatcaatcccttctccccgcgagtgcagtcggatgccgttgtccccaagggccaggccgaactcgccccacacctgcgggcgcctggctgccgacgccggtggaggccacgccgtcggtcgggaacggtcgcgtcgcccgggtcgccgccgccgccgccgccgtcatcctcgcctctcgcttccctctgggagctgcgcgcgcttcactcaccttccgcttcactcgccttccacgcttgctccagagactttccgggcaagggagaactgggaactttcatcttaaaacaactagacaacacacacacacacaaaaccttaaaaaagagagagaaaaataaacaatctttgaagaatttctgaaactgtttacaaggaattttgaaaaacagggatgtttaaatgatgccggctctgtttttctgtaaataaatttgcatattttgtaggacttttaattgtaatgatagagaaaaaaacaaggaaaactatttaatgaaagcacgatatttatctttggtaaatgactttagagcagttaaagacattgcttaaaaaactcagaatcagaaaaaacactgaattatttaagaacacatatattttaaagtataacatatttattataatttatttgcacccttgggaagattgctttggcattctgccttgattccttctcattgatgtccaggtcatctggaggccgggggttctcagacctaccagtttccctttagaagaacaaatttccagttcctctagggcctcctgcctttcctttctttctgtcaattttgttgttgttgttgtttttcattttctttttttctcttgactcctccttttaggatgtccagatgtaaaaaaaaaaaaaaaaaaaagaaaaaaagaaaaaaaaaagaaaacagctgcagttcagtacaactgctcttttcacactcaactccctaaaactccttgtaaccttctgtaactattggatgacgctttctccagcttagccctaaataaagcacagttt

SEQ ID NO: 28393 - DNA, 1347 bp, Artificial Sequence
  derived and/or modified sequence
atgtacatcaagatggccaccctggccaacggccaggccgacaacgccagcctgagcaccaacggcctgggcagcagccccggcagcgccggccacatgaacggcctgagccacagccccggcaaccccagcaccatccccatgaaggaccacgacgccatcaagctgttcatcggccagatccccagaaacctggacgagaaggacctgaagcccctgttcgaggagttcggcaagatctacgagctgaccgtgctgaaggacagattcaccggcatgcacaagggctgcgccttcctgacctactgcgagagagagagcgccctgaaggcccagagcgccctgcacgagcagaagaccctgcccggcatgaacagacccatccaggtgaagcccgccgacagcgagagcagaggcgaggacagaaagctgttcgtgggcatgctgaacaagcagcagagcgaggacgacgtgagaagactgttcgaggccttcggcaacatcgaggagtgcaccatcctgagaggccccgacggcaacagcaagggctgcgccttcgtgaagtacagcagccacgccgaggcccaggccgccatcaacgccctgcacggcagccagaccatgcccggcgccagcagcagcctggtggtgaagttcgccgacaccgacaaggagagaaccatgagaagaatgcagcagatggccggccagatgggcatgttcaaccccatggccatccccttcggcgcctacggcgcctacgcccaggccctgatgcagcagcaggccgccctgatggccagcgtggcccagggcggctacctgaaccccatggccgccttcgccgccgcccagatgcagcagatggccgccctgaacatgaacggcctggccgccgcccccatgacccccaccagcggcggcagcaccccccccggcatcaccgcccccgccgtgcccagcatccccagccccatcggcgtgaacggcttcaccggcctgcccccccaggccaacggccagcccgccgccgaggccgtgttcgccaacggcatccacccctaccccgcccagagccccaccgccgccgaccccctgcagcaggcctacgccggcgtgcagcagtacgccggccccgccgcctaccccgccgcctacggccagatcagccaggccttcccccagcccccccccatgatcccccagcagcagagagagggcttcgtgagcttcgacaaccccgccagcgcccagaccgccatccaggccatgaacggcttccagatcggcatgaagagactgaaggtgcagctgaagagacccaaggacgccaacagaccctactag

SEQ ID NO: 28394 - DNA, 516 bp, Artificial Sequence
  derived and/or modified sequence
atggcatctcagaagaggccttcccagaggcacggctcgaagtatctcgcgacagcctcaacgatggatcatgcccgccatggatttctccctagacaccgcgacacaggcattctcgattcaatcggtcgttttttcgggggtgatcggggcgctcccaagcgcggaagtggaaaggactcccaccacccggcgagaacggcccattacgggtcgttgccacagaaatcacatggtaggactcaggacgagaaccctgtcgtgcacttctttaagaatatagtgacaccccgcacaccccctccctcccagggaaagggaagaggtctctccctctcccgtttctcttggggcgctgagggtcagaggcctggatttggttatgggggccgggcttccgactacaagtctgcccataaaggctttaaaggcgtggatgcgcaaggaaccctgtcaaaaatcttcaagctgggaggtagggacagtcgtagcggatcgcccatggcccggaggtag

SEQ ID NO: 28395 - DNA, 516 bp, Artificial Sequence
  derived and/or modified sequence
atggccagccagaagaggcccagccagagacatggcagcaagtacctggccacagccagcaccatggaccacgcccggcacggcttcctgcccaggcaccgggacaccggcatcctggacagcatcggccgcttcttcggcggggacagaggagcccccaagaggggcagcggcaaggacagccaccacccagccaggacagcccactacggcagcctgccccagaagagccacggccgcacccaggatgagaaccctgtggtgcacttcttcaagaacatcgtgacccccaggaccccaccacccagccagggcaagggccggggcctgagcctgagccgcttctcctggggcgctgagggccagaggcctggcttcggctacggcggccgggccagtgactacaagagcgcccacaagggcttcaagggcgtggatgcccagggcaccctgagcaagatcttcaagctgggcggccgggacagccgcagcggcagccccatggcccggaggtag

SEQ ID NO: 28396 - DNA, 516 bp, Artificial Sequence
  derived and/or modified sequence
atggccagccagaagcggcccagccagcggcacggcagcaagtacctcgctactgcatctacgatggaccacgccaggcacggctttcttccacgccacagagataccggcattctcgattcaatcggacggttcttcggaggagatagaggggctcctaaacggggctccgggaaggacagccatcaccccgcccggactgcccactacggatcactacctcagaagtcacacggacgcacccaggatgagaatcctgtggttcacttcttcaaaaatattgtaaccccacgcactccaccccccagtcaggggaaaggcagggggcttagtctgagccggttttcctggggcgccgagggtcagaggccggggtttgggtatggaggccgggccagcgactacaagtcagcacacaagggtttcaagggagtggatgcccaggggactttgtctaaaatctttaagttagggggacgggattctcgttccggatcccccatggcaagaaggtag

SEQ ID NO: 28397 - DNA, 516 bp, Artificial Sequence
  derived and/or modified sequence
atggcctcacagaaaaggcctagtcagcgtcatggatctaagtacctggccactgcctccaccatggaccacgctcgtcacggctttctgccgcgtcaccgcgacaccggcatactggactccataggcagatttttcggtggggacaggggggcaccaaagcgcggttctgggaaagactcccatcatccagccaggaccgctcactatggctcactccctcagaagtcccacggtaggactcaagacgagaacccggtggtgcatttcttcaagaacatcgtcacacccaggacaccacctcctagccagggaaagggtcggggtctttcactttctcggttttcctggggcgctgagggccagaggccgggattcggatatgggggaagggcatctgattataagtctgcacataaaggattcaagggagtggatgcccaggggaccttaagcaagatatttaaactgggcggaagagattctcgctccggatctcctatggcacgccgatag

SEQ ID NO: 28398 - DNA, 516 bp, Artificial Sequence
  derived and/or modified sequence
atggccagccagaagagacccagccagagacacggcagcaagtacctggccaccgccagcaccatggaccacgccagacacggcttcctgcccagacacagagacaccggcatcctggacagcatcggcagattcttcggcggcgacagaggcgcccccaagagaggcagcggcaaggacagccaccaccccgccagaaccgcccactacggcagcctgccccagaagagccacggcagaacccaggacgagaaccccgtggtgcacttcttcaagaacatcgtgacccccagaacccccccccccagccagggcaagggcagaggcctgagcctgagcagattcagctggggcgccgagggccagagacccggcttcggctacggcggcagagccagcgactacaagagcgcccacaagggcttcaagggcgtggacgcccagggcaccctgagcaagatcttcaagctgggcggcagagacagcagaagcggcagccccatggccagaagatag

SEQ ID NO: 28399 - protein, 845 aa, Artificial Sequence
  derived and/or modified sequence
MPKAPKQQPPEPEWIGDGESTSPSDKVVKKGKKDKKIKKTFFEELAVEDKQAGEEEKVLKEKEQQQQQQQQQQKKKRDTRKGRRKKDVDDDGEEKELMERLKKLSVPTSDEEDEVPAPKPRGGKKTKGGNVFAALIQDQSEEEEEEEKHPPKPAKPEKNRINKAVSEEQQPALKGKKGKEEKSKGKAKPQNKFAALDNEEEDKEEEIIKEKEPPKQGKEKAKKAEQGSEEEGEGEEEEEEGGESKADDPYAHLSKKEKKKLKKQMEYERQVASLKAANAAENDFSVSQAEMSSRQAMLENASDIKLEKFSISAHGKELFVNADLYIVAGRRYGLVGPNGKGKTTLLKHIANRALSIPPNIDVLLCEQEVVADETPAVQAVLRADTKRLKLLEEERRLQGQLEQGDDTAAERLEKVYEELRATGAAAAEAKARRILAGLGFDPEMQNRPTQKFSGGWRMRVSLARALFMEPTLLMLDEPTNHLDLNAVIWLNNYLQGWRKTLLIVSHDQGFLDDVCTDIIHLDAQRLHYYRGNYMTFKKMYQQKQKELLKQYEKQEKKLKELKAGGKSTKQAEKQTKEALTRKQQKCRRKNQDEESQEAPELLKRPKEYTVRFTFPDPPPLSPPVLGLHGVTFGYQGQKPLFKNLDFGIDMDSRICIVGPNGVGKSTLLLLLTGKLTPTHGEMRKNHRLKIGFFNQQYAEQLRMEETPTEYLQRGFNLPYQDARKCLGRFGLESHAHTIQICKLSGGQKARVVFAELACREPDVLILDEPTNNLDIESIDALGEAINEYKGAVIVVSHDARLITETNCQLWVVEEQSVSQIDGDFEDYKREVLEALGEVMVSRPRE

SEQ ID NO: 28400 - protein, 238 aa, Artificial Sequence
  derived and/or modified sequence
MPKAPKQQPPEPEWIGDGESTSPSDKVVKKGKKDKKIKKTFFEELAVEDKQAGEEEKVLKEKEQQQQQQQQQQKKKRDTRKGRRKKDVDDDGEEKELMERLKKLSRGFNLPYQDARKCLGRFGLESHAHTIQICKLSGGQKARVVFAELACREPDVLILDEPTNNLDIESIDALGEAINEYKGAVIVVSHDARLITETNCQLWVVEEQSVSQIDGDFEDYKREVLEALGEVMVSRPRE

SEQ ID NO: 28401 - protein, 340 aa, Artificial Sequence [sequence omitted]

SEQ ID NO: 28402 - protein, 533 aa, Artificial Sequence
  derived and/or modified sequence
MPKAPKQQPPEPEWIGDGESTSPSDKVVKKGKKDKKIKKTFFEELAVEDKQAGEEEKVLKEKEQQQQQQQQQQQKKKRDTRKGRRKKDVDDDGEEKELMERLKKLSVPTSDEEDEVPAPKPRGGKKTKGGNVFAALIQDQSEEEEEEEKHPPKPAKPEKNRINKAVSEEQQPALKGKKGKEEKSKGKAKPQNKFAALDNEEEDKEEEIIKEKEPPKQGKEKAKKAEQGSEEEGEGEEEEEEGGESKADDPYAHLSKKEKKKLKKQMEYERQVASLKAANAAENDFSVSQAEMSSRQAMLENASDIKLEKFSISAHGKELFVNADLYIVAGRRYGLVGPNGKGKTTLLKHIANRALSIPPNIDVLLCEQEVVADETPAVQAVLRDDTAAERLEKVYEELRATGAAAAEAKARRILAGLGFDPEMQNRPTQKFSGGWRMRVSLARALFMEPTLLMLDEPTNNLDIESIDALGEAINEYKGAVIVVSHDARLITETNCQLWVVEEQSVSQIDGDFEDYKREVLEALGEVMVSRPRE

SEQ ID NO: 28403 - protein, 532 aa, Artificial Sequence
  derived and/or modified sequence
MPKAPKQQPPEPEWIGDGESTSPSDKVVKKGKKDKKIKKTFFEELAVEDKQAGEEEKVLKEKEQQQQQQQQQQKKKRDTRKGRRKKDVDDDGEEKELMERLKKLSVPTSDEEDEVPAPKPRGGKKTKGGNVFAALIQDQSEEEEEEEKHPPKPAKPEKNRINKAVSEEQQPALKGKKGKEEKSKGKAKPQNKFAALDNEEEDKEEEIIKEKEPPKQGKEKAKKAEQGSEEEGEGEEEEEEGGESKADDPYAHLSKKEKKKLKKQMEYERQVASLKAANAAENDFSVSQAEMSSRQAMLENASDIKLEKFSISAHGKELFVNADLYIVAGRRYGLVGPNGKGKTTLLKHIANRALSIPPNIDVLLCEQEVVADETPAVQAVLRDDTAAERLEKVYEELRATGAAAAEAKARRILAGLGFDPEMQNRPTQKFSGGWRMRVSLARALFMEPTLLMLDEPTNNLDIESIDALGEAINEYKGAVIVVSHDARLITETNCQLWVVEEQSVSQIDGDFEDYKREVLEALGEVMVSRPRE

SEQ ID NO: 28404 - DNA, 2538 bp, Artificial Sequence
  derived and/or modified sequence
atgcccaaggcccctaaacagcaaccgcctgaacctgagtggatcggcgatggagagagcacgagcccatctgacaaggtggtgaaaaagggcaaaaaggacaagaagatcaaaaaaaccttttttgaggaattggcagtggaggacaagcaagctggagaagaggaaaaagtgttgaaagagaaggagcagcagcagcagcaacagcaacagcaacagaagaagaaacgtgataccagaaaagggcgtcgcaaaaaggacgtagatgacgatggcgaggagaaagagctcatggaaaggctgaagaaacttagcgtgcccacttccgatgaggaagacgaggtccctgccccaaaacctagggggggtaagaaaacaaagggtgggaacgtgttcgcagccctcattcaggaccagtctgaggaagaggaggaagaggagaagcacccgcctaagcctgccaagccagaaaagaataggattaacaaagccgtctccgaggaacaacagccggccctgaagggaaagaagggcaaagaggaaaagtccaagggtaaggccaaacctcagaacaaatttgcagcactggataatgaagaggaggataaagaagaggagatcattaaggaaaaagaaccacccaagcaaggtaaggagaaagctaagaaggcagaacaaggcagtgaggaggaaggagaaggagaagaggaagaggaagagggtggcgagagcaaagctgacgacccttacgcccatctctccaaaaaagagaagaaaaaattgaaaaagcaaatggaatacgagcggcaggtcgcatcccttaaagctgcgaatgctgccgagaacgactttagtgtctcacaggccgagatgtcgtccagacaggcaatgttggagaacgctagcgacataaagctggagaaattctctatttccgctcatggcaaggaactgttcgtgaacgcagatctgtacattgtggccggcagacggtatggtttagtaggacccaatggcaaggggaaaactacactcctaaaacacatagccaatagggccctatcgattccacccaacattgacgttctgctttgcgagcaggaggttgtagcggacgagactcctgcagttcaggctgtgctgagggcggacacgaaaagactgaagctgctggaggaagaacgccgcctgcaaggacagctggagcagggggacgacactgctgcagaacggctcgagaaagtgtatgaagagctgcgagccaccggagctgctgcagctgaagccaaggcgaggagaattctcgccgggctcggtttcgatcctgaaatgcagaaccgccctacacagaaattttcaggcggttggaggatgcgcgtgtccctggccagagcgctgtttatggagcccaccctcttaatgcttgatgagcccaccaatcatctcgacctgaatgctgtcatctggcttaacaactatctgcagggctggcggaagactcttctaattgtgtcacacgaccagggttttttggatgacgtctgcaccgacattatccacctcgacgcacagcggctccattactacagagggaactatatgacatttaaaaagatgtaccagcagaagcagaaagagctcctcaagcaatatgagaaacaagaaaaaaaactcaaagagcttaaagccggcggtaaatccactaagcaagccgaaaaacaaaccaaggaagctctgacacgcaagcagcagaaatgccgccgcaagaaccaggacgaggagtctcaggaagcacctgaactcctgaaacgccccaaggaatatacagttaggtttacctttcctgacccgccccctctgtctccaccagtgcttggactccacggagtgacattcgggtatcagggccagaaaccgctgttcaaaaacctggattttggcattgacatggactcccgaatctgtattgtgggaccaaacggggtaggcaaatcaaccctgcttctgctcctcactggcaagctaacacccacacacggagagatgagaaagaaccatagactgaaaataggattttttaaccagcagtatgcagagcagttgcgcatggaggagacccccacggagtacctccaacggggattcaatctgccatatcaggacgccaggaagtgcttgggaaggttcgggctggaatctcatgcccataccatccagatctgtaaattatctgggggacaaaaggctcgggttgtttttgccgagctagcttgccgggaacccgatgtgttaattctggatgaacccacaaacaatttagacatcgagtcgatagatgcactaggtgaagcaataaatgagtacaagggagcagtgatagttgtttctcacgatgccaggcttatcaccgagaccaattgtcagttatgggtggtagaggaacagtctgtatcacagatcgacggagattttgaagactacaaacgggaagttctcgaagcgttaggtgaggtcatggtgagtcggccaagagagtag

SEQ ID NO: 28405 - DNA, 2538 bp, Artificial Sequence
  derived and/or modified sequence
atgccaaaagcaccaaaacagcagccccctgaacctgaatggatcggagacggcgagagcacctccccaagtgacaaggtcgtgaagaaagggaaaaaagacaaaaagataaagaaaacgttcttcgaagaactcgccgttgaggacaaacaagcaggcgaagaagagaaagtgcttaaggagaaagagcagcaacagcagcaacaacagcaacagcagaaaaaaaaacgagacacacggaagggaagaaggaagaaggacgtggatgatgacggagaggagaaggaactgatggaacgcctcaagaaactgtctgtgcccacaagcgacgaggaagatgaagtgcctgctcccaaaccgcggggaggaaagaagaccaaaggtggcaacgtctttgcagctctgatccaggaccagagtgaagaggaggaggaagaggagaagcatcccccaaagcccgcaaagccagagaagaaccgaataaacaaggctgtttctgaggaacagcagcctgccttaaaaggaaaaaaaggcaaagaagaaaagagcaaagggaaggctaagccccagaacaagtttgccgcattagataatgaagaggaggataaggaagaggagattattaaggaaaaggaaccccctaaacagggcaaagagaaggccaagaaggcagagcagggctctgaggaggagggcgagggcgaggaagaggaggaggagggaggggagagcaaagcagacgacccctatgcacatctgtcgaaaaaagaaaagaagaaacttaagaaacaaatggagtatgagaggcaggtcgcaagcctgaaagccgctaatgccgcagagaacgatttctcggtgtcccaggctgagatgtcttccaggcaggcaatgctagagaacgcaagtgatataaaattggaaaaattttccataagcgcccacggtaaggagttattcgtcaatgccgacctgtatatagttgcaggccgcaggtacggtctggtcggccctaacggaaaaggtaaaacaaccctgctgaagcacatagctaaccgcgcccttagcattccacccaatattgatgtgttgttatgtgagcaggaagtagtggctgacgagactccagcagttcaggcagttctcagagccgatacaaaaagactgaagctactcgaagaggagcgaaggctccaagggcaactagaacagggggatgatactgcagccgaacggctcgagaaggtgtatgaggaactgcgagcaaccggagccgcggcggcagaggccaaagctcgtaggattctggctgggctcggctttgatcccgagatgcagaatcggcccacccaaaagttttctggcggctggagaatgcgggtgtcactcgccagggccctgttcatggagcctactttactcatgctggacgaacctaccaatcacctggatttgaatgcagtgatctggctgaacaattatctgcaagggtggcggaaaacactgctcattgtaagccatgaccagggattcctggacgacgtgtgcaccgacataattcatctggatgcccagaggcttcactattatcgtgggaactacatgacattcaaaaagatgtaccagcaaaagcaaaaggagctactgaaacaatatgaaaagcaggagaagaagctgaaagaattgaaggctgggggcaagtccacaaaacaagcagaaaagcagaccaaggaggctcttacacgtaagcagcagaagtgccgcaggaagaaccaagatgaagaatcccaggaagccccagaactcctgaagcggcccaaagagtacactgtccgttttaccttccccgatccccctccactttcgccaccggtgttgggcctgcatggcgtcacatttggataccaaggacaaaaaccccttttcaagaatctggactttgggatcgacatggactcgcgaatatgcatagtgggccccaacggggttggaaagagcacacttctgctgctgctcactggcaaactgacgccaacacacggcgaaatgaggaagaatcaccgcctcaaaatcggctttttcaaccagcagtacgcagaacagctgagaatggaggagaccccaaccgagtacttacaaaggggatttaatcttccctaccaggacgcccggaagtgtcttggtcggttcggattagagtcacatgctcatacaatacagatttgcaagctaagcgggggacagaaagcccgcgtggtgttcgctgagctggcctgtcgcgaacccgacgtgcttatcctagatgaacccacaaataaccttgatattgaatccattgatgccttgggcgaagcgatcaatgagtacaagggcgctgttattgtcgtttctcatgatgctcggttgataacggagactaactgccagctgtgggtcgtcgaagagcagagcgtgagccagatcgatggagacttcgaagactataaacgcgaggtcctcgaagctctgggggaagtgatggtgagtagaccccgggaatag

SEQ ID NO: 28406 - DNA, 1023 bp, Artificial Sequence
  derived and/or modified sequence
atgcctaaagcgcccaagcagcaacccccagaacctgagtggatcggcgacggagagagcaccagcccctctgacaaggttgtgaaaaaggggaagaaggataagaagatcaagaaaacattttttgaagaactggcagttgaagacaagcaggcaggggaagaggagaaggtactgaaggaaaaggaacagcaacagcagcagcagcagcagcagcagcagaaaaagaagcgggacaccagaaaaggacgacgtaaaaaggacgttgatgacgacggggaagaaaaagagttaatggaaagactcaagaaactgtctgtacctaccagcgacgaagaagatgaggtgccagcccctaaaccacgcggtgggaagaagaccaagggggggaatgtgtttgccgcgctgatccaggaccagagtgaagaagaggaagaagaggagaaacatccccctaagccagcgaaaccagagaaaaacaggatcaataaagctgtatccgaggagcaacagccagccctcaaagggaagaaaggcaaagaggagaagtccaaaggaaaggccaagcctcaaaacaagtttgcggcgctggataacgaagaagaagataaagaagaggagatcattaaggagaaggaacctcctaagcagggcaaggaaaaagccaaaaaagccgagcagggctctgaagaagaaggagagggggaggaagaagaagaagagggaggagagagcaaggcggatgatccatacgcccacctgtccaagaaggaaaaaaagaagctgaagaaacagatggagtacgagaggcaagttgcctctttgaaagcagcgaacgccgcagaaaatgacttcagcgtgagccaggcagaaatgagctctagacaggctatgctcgaaaacgcttccgacataaagctagaaaagtttagcattagcgcacacggtaaagagctcttcgtgaatgcagatctatacatcgtggccgggcggcggtacggccttgtgggccctaatgggtag

SEQ ID NO: 28407 - DNA, 2538 bp, Artificial Sequence
  derived and/or modified sequence
atgccgaaagcaccaaagcagcaaccccccgagccggaatggatcggcgatggggagtcgacctctccatccgataaagtcgttaagaaggggaagaaggacaagaagatcaaaaagacattcttcgaagaactggctgttgaggacaagcaggccggcgaagaagagaaggtgttgaaagagaaggaacagcagcagcagcagcagcaacagcagcagaagaagaaaagagatacacgcaaagggagaaggaagaaagacgtggacgatgatggggaagaaaaggaactgatggaaaggctgaaaaaactgagtgtccccacaagcgacgaagaggacgaagtgcctgcacccaaaccaaggggtgggaagaagacaaagggaggcaatgtctttgcagccctgattcaagatcaaagtgaagaggaggaagaggaagaaaaacacccaccaaaacccgctaagccagaaaagaatcggatcaataaagccgtatccgaggaacagcagcccgccctgaagggcaaaaaaggcaaggaggagaaaagcaaaggaaaggcaaagccccaaaacaaattcgccgcactcgacaacgaagaagaagacaaagaagaagagataatcaaggagaaggaacctcccaagcagggaaaagaaaaagccaagaaagcagaacaagggagtgaggaggaaggcgagggggaggaagaggaggaggaaggcggggagtccaaggcagatgacccttacgcacacttatccaagaaagaaaagaaaaagcttaagaaacagatggagtatgaacgacaagtcgcctcactcaaggcagcgaacgccgccgaaaatgatttctcggtgagtcaggcagaaatgtctagccgacaggccatgttagaaaacgcttccgacataaagctggaaaagttctccatcagtgctcatggtaaagagctgttcgtcaatgccgatctgtatatcgtcgccggcaggcgatatggcctggtgggaccaaacggtaaaggaaaaactacattactgaaacatatagctaatagagccctaagtatcccaccaaatatcgacgtgctgctatgtgagcaagaagtcgtcgctgatgagacacctgctgtccaagcagtgctcagggccgatactaagcgtctgaagcttctggaggaggaacggagactgcaaggccagctcgagcaaggagacgacacagccgccgaaaggttagaaaaggtttacgaagagctgagagccaccggagcagcggccgcagaggccaaggctcgtagaatcctggctggtctagggttcgacccagagatgcagaatcgacccactcagaagttcagcgggggttggagaatgcgggtctccttggcgagagctcttttcatggaacccaccctgttgatgctcgatgagcctactaatcatttggatctaaacgccgtaatttggctcaacaattaccttcaaggttggagaaagaccctgctcattgtcagtcacgatcagggttttctggacgacgtctgcactgatatcattcacctcgacgcccagcgactccattattaccgtggcaattacatgacctttaagaagatgtatcagcagaaacaaaaggagcttctcaagcagtatgagaaacaggagaaaaagctgaaggagctaaaggctggtggcaaatctacgaaacaagccgaaaagcaaactaaagaagccctcacaagaaagcaacaaaagtgtcggaggaagaatcaagatgaagaaagccaagaagcacccgaattactcaaaaggcctaaggaatataccgtgcgttttacatttcctgacccgccacccttatctccgcccgtcctcgggctccatggcgttaccttcggatatcaaggccagaagcccttgtttaagaatctggactttggcatagatatggacagccgcatatgcattgttggtccaaatggagtcggcaaaagcaccctgctgttgctgttaaccggcaagttaacacccacgcacggggaaatgaggaaaaaccatcgcttgaaaataggcttttttaaccagcagtatgccgaacaactccgaatggaggagactcctaccgaatacctgcaacgggggtttaatctgccctatcaggacgcccgtaagtgcctcggcagatttgggctggagtctcacgctcatacaattcaaatatgcaaactatcaggcggacaaaaggccagagtcgtattcgctgagttggcttgcagagagccagacgtattgatacttgatgaacctactaataatttagacatagaaagcattgatgccctgggtgaggcaataaatgaatataaaggcgccgtgatcgtggtctctcacgacgctcgcctgatcactgagacaaattgtcaactgtgggtggtggaggaacagtccgtaagtcaaattgatggcgactttgaagactataaacgcgaagttctggaagccctgggtgaagtcatggtttctagaccccgagagtag

SEQ ID NO: 28408 - DNA, 1023 bp, Artificial Sequence
  derived and/or modified sequence
atgccgaaagcgccaaaacagcagcccccagagcccgagtggatcggggatggcgagtccacatccccctccgacaaggttgttaagaagggtaagaaggacaagaaaatcaagaaaacgtttttcgaggaattggcggttgaggacaagcaggctggagaggaggagaaagtgctgaaagaaaaggaacagcagcagcagcagcagcagcagcagcagcagaagaaaaagcgggacacacggaagggccggagaaaaaaggacgtcgacgacgacggagaggaaaaagaactcatggagcggctgaaaaaactgagtgtccccaccagcgatgaagaagatgaggtgcctgcgcccaagcctagaggcgggaaaaaaaccaagggaggaaatgtgttcgcagccctgattcaggaccagtcagaggaggaagaggaggaagaaaaacatcccccgaagccagccaagccagagaaaaacagaataaataaagctgtgtccgaggagcagcaaccggccctaaaagggaaaaagggcaaggaagaaaaaagtaagggtaaagccaaaccacagaacaaattcgcagctctagacaatgaagaggaagataaagaagaggagatcatcaaagagaaagaacctcccaagcaggggaaagagaaggccaaaaaagcagaacagggctctgaggaagagggcgagggtgaagaagaggaagaagaggggggcgagtcaaaagctgacgacccctatgctcatcttagtaaaaaggagaagaaaaagctgaagaaacagatggaatacgagcgccaggtggcctccttaaaggctgctaatgcggcagagaatgattttagcgtgtcccaggctgagatgagctcaaggcaggccatgttagaaaatgctagcgacataaaattagaaaagttttccatttcagcccatggaaaagaactctttgtcaatgctgacctgtacatagtcgccggccggagatacggtcttgtgggtccgaacggctag

SEQ ID NO: 28409 - DNA, 2538 bp, Artificial Sequence
  derived and/or modified sequence
atgccaaaggctccaaagcagcagccaccagagccggaatggatcggggacggcgaatccacatctccatcagacaaagtagttaaaaagggtaaaaaagataagaagatcaaaaagactttttttgaagagcttgctgttgaagacaagcaggcaggtgaggaggaaaaggttcttaaagagaaagaacagcagcagcagcagcagcagcagcagcagaagaaaaagagagacacgcgcaaggggcgcagaaaaaaggacgtcgacgatgacggggaggagaaggaactgatggagaggctcaagaagctctccgtgcccaccagcgatgaagaagatgaagtgcctgcgccaaagcccagaggtgggaaaaaaaccaaaggtggcaatgtgtttgccgctctcatccaagaccagagtgaagaagaggaggaggaggagaagcatccacctaaaccggcgaagccagaaaaaaatcgtataaataaagctgtatccgaagagcagcagccagccctgaagggaaagaagggaaaagaggagaaaagcaagggcaaagccaaaccacagaataagttcgctgccttggataatgaggaagaggacaaggaagaagaaatcatcaaagagaaggagccaccaaagcaggggaaagagaaggctaagaaggccgagcagggcagtgaagaagagggagaaggcgaggaggaagaggaggaggggggagaaagcaaggctgatgatccctacgcccacctgtctaagaaagagaaaaagaaactaaagaaacagatggagtatgagcgacaagtagcctcacttaaggcggccaatgccgcagaaaacgatttttcagtgtcacaggctgagatgtcttcccgccaagctatgttggaaaatgcttccgacataaagctagagaagttctctatctctgcccacggcaaggagttatttgtcaacgctgacctgtacatcgttgccggacggcgttatggcctagttggtcccaacgggaagggcaagactacacttctgaagcacatcgctaatcgggcgctgtccatcccacccaatatcgatgtcctcctgtgcgaacaggaagtggttgccgacgagacccctgccgttcaggccgtgctgcgggcagacaccaaacggctgaagctgttggaagaggagcgaagattgcaaggccaattagagcagggggatgatacagccgcagagcgattggagaaggtgtatgaagaactgcgagccactggcgctgcagctgcagaagccaaagctcgccggattctggccggccttgggttcgaccctgagatgcaaaataggcccactcagaagttttcaggcggatggaggatgagggtatccctggccagggccctgttcatggagccaactcttctgatgctcgatgagcctactaatcacctggacctcaatgcagtcatctggctcaacaattacttgcagggctggcggaagactcttttaatcgttagccatgatcaggggtttctggacgacgtgtgtacagacatcatccacttagacgcacagcgcctacattattatcgggggaactacatgacctttaagaagatgtaccagcaaaagcagaaagagctcttgaagcagtacgaaaaacaggagaagaagttaaaagaactcaaagcgggtggtaagtcgaccaaacaagccgaaaaacagaccaaagaggctctgacccgaaagcagcagaagtgccgcaggaagaatcaggacgaagaaagccaagaagctcccgagttactgaaacggcctaaggagtatactgtgcggtttacttttccagaccccccccctttgtccccgcctgtactcgggttacatggggtcacctttggataccaaggccagaagcctctttttaagaatcttgatttcggtatcgacatggactcaagaatatgcatcgtgggtccaaatggcgttggcaagagcaccctgttgctgttgctgacgggaaagttgaccccaacacatggagagatgcgaaagaaccatagactcaaaataggattcttcaatcagcaatacgcggagcagcttcggatggaggaaacacccaccgagtacttgcagagagggtttaatctcccctaccaagatgccagaaagtgcctcgggcgatttggcctggagagccacgcccatactattcagatctgcaagctctccgggggtcagaaggcaagagtggtattcgccgaactggcctgtagggagcctgacgtcctaatcctggatgaacctaccaataatctcgacatcgagtcaatcgacgctctgggtgaagctatcaatgaatataagggggccgtcattgtagtttcccatgatgctcggctaatcacggaaaccaattgccagctctgggtggtcgaggagcagtccgtgtctcagatcgacggagactttgaggactataaaagggaggttctagaggctctgggagaggtgatggtaagccgtcctagagagtag

SEQ ID NO: 28410 - DNA, 1023 bp, Artificial Sequence
  derived and/or modified sequence
atgcccaaggccccaaagcaacagcctccggaacctgagtggatcggcgacggcgagtccaccagccctagcgacaaggtggtcaaaaagggcaaaaaggacaagaaaatcaagaagaccttctttgaggaacttgctgtcgaggacaagcaggctggagaggaagaaaaagtgcttaaggagaaggagcagcaacagcaacagcaacagcagcagcagcagaaaaagaagagagacacacgtaaaggaaggcgcaaaaaggacgtagatgatgacggcgaagaaaaggagctaatggaacgcctgaagaaactctccgtgcctacgtctgacgaggaggacgaggtccccgcccctaaaccgcgcggaggaaagaaaaccaagggtgggaatgtgtttgcagcccttatacaggatcagagcgaagaggaagaagaagaggagaagcatccccctaaaccagctaagccagagaaaaaccgcatcaataaggctgtgtccgaggaacaacagccagctctgaaaggaaagaaggggaaggaggagaagtcgaaaggaaaggccaaacctcagaataaatttgccgccctcgataacgaagaagaggataaagaggaggaaataattaaagaaaaagaaccaccaaaacaggggaaagaaaaggccaagaaggcggaacagggaagtgaagaggaaggggagggggaggaagaggaagaggagggcggtgagagcaaggcggatgatccctatgctcacctatccaaaaaggaaaagaagaagcttaagaaacagatggagtatgagagacaggtggcaagtctgaaggccgctaatgccgctgagaatgacttttctgtttcccaggccgagatgtcatcgagacaggcaatgcttgagaacgcctcagatattaagctcgagaaattctccatttccgctcatggcaaggagctgtttgtaaatgccgatctgtacatagtagcgggacggcgctacggcctcgtcggcccgaacggttag

SEQ ID NO: 28411 - DNA, 2538 bp, Artificial Sequence
  derived and/or modified sequence
atgccaaaggcacccaaacaacagcctcccgagcccgaatggataggcgacggcgaatccactagtcctagtgacaaagtggttaaaaagggaaagaaggacaagaagataaagaagacattcttcgaagaattggctgttgaagataagcaagctggagaggaggagaaagtgttgaaggaaaaggagcagcagcagcagcagcagcagcagcagcagaagaaaaaacgagatacacggaaaggacgccggaaaaaggacgtggatgatgatggcgaagagaaggaattaatggagcgtctgaagaagcttagcgtgccgactagcgacgaggaagatgaggttccggccccaaaacctagagggggaaaaaaaaccaagggaggcaatgttttcgcagccttgatccaagatcaaagcgaggaagaagaggaggaggagaagcaccctcctaagcctgccaaaccagagaagaatagaattaacaaggcggtgtcggaagagcagcagccagctctaaaggggaaaaaaggaaaggaagaaaagtctaaggggaaggcgaagccccaaaacaaattcgccgctctcgataacgaggaggaggacaaagaggaggaaattatcaaggagaaagaaccaccaaagcaaggaaaagagaaggcgaagaaagccgagcagggctccgaggaggagggagaaggtgaggaggaggaggaggagggcggtgagagcaaggccgacgacccctatgcgcacctcagtaaaaaggaaaagaaaaagctcaaaaagcaaatggagtatgagaggcaggtcgcatcactaaaggccgcaaatgccgctgaaaacgacttttcagtgtcccaggccgagatgagctcgcgacaggccatgcttgagaacgcatccgatatcaagctggagaagttttctatttctgcccatggcaaggaactcttcgttaatgctgatctgtacattgtggcagggagaaggtacggcctcgtcggacccaacggcaaaggcaagactacactactcaaacacattgcgaacagagcactgagcattccaccaaatatcgacgtcctgctttgcgagcaagaagtcgtagccgatgaaacacctgccgtgcaggcagttctgcgggcagataccaaacgcctcaaactgctggaggaggaacgacgtctgcaagggcagctggaacaaggcgacgacacagccgccgagaggcttgaaaaggtctatgaggaactacgcgccaccggcgcagcagccgccgaggccaaggcccggcgaatcctcgctggactcggtttcgatccagaaatgcagaatcgccccactcagaagttttctggcgggtggaggatgcgtgtcagcctggctcgggcactctttatggaacccaccctgcttatgctcgatgaaccaaccaaccatctcgatctcaacgccgtaatctggctgaacaactacctgcaagggtggcgtaagactttgctaatcgttagccatgaccaaggcttccttgacgacgtgtgcaccgatatcattcaccttgatgcccaacggctgcactactatcgcgggaactacatgactttcaagaaaatgtaccaacagaaacagaaggaactgcttaaacagtatgaaaagcaagagaagaaattaaaagaacttaaggctgggggcaaatccaccaaacaggcggaaaaacagactaaggaggcactcacccggaagcagcagaaatgccgcaggaagaatcaagatgaggagagtcaggaggcgccagagctgttgaaaaggccaaaggaatatacggtccggtttacctttccagatccacctcccctgtcgccccctgtcctggggctccacggggtgaccttcggctatcagggacagaagccactgttcaaaaatctcgattttggcatcgatatggatagtcggatctgtattgtaggacctaacggcgttgggaaatcgacccttctcctgctgttaaccggcaagctgaccccgacccatggcgaaatgcgcaagaaccaccgccttaagatcggattctttaatcagcagtatgccgaacagctgcgtatggaggaaactcccacagagtacttacagagggggttcaacctgccctatcaagacgctcgaaaatgcctcggcaggtttggtctcgaaagtcatgctcacactatccagatctgcaaattatctggagggcaaaaggctcgggttgtcttcgccgaactggcttgtagggaacctgatgtgcttattctggatgaacctacaaacaacttagatatcgagagtattgacgcactgggtgaggcaataaacgagtacaagggtgcagtgatcgtggtgagccacgacgcaagattgatcaccgagaccaactgccagctttgggtggtggaagagcagtcagtttctcaaatcgatggcgatttcgaggactacaagcgggaggtcctggaggcactgggcgaagttatggtctcccgtcccagggaatag

SEQ ID NO: 28412 - DNA, 1023 bp, Artificial Sequence
  derived and/or modified sequence
atgccgaaggccccaaagcagcagcctcctgagcccgagtggattggcgatggggagtccacatctccttccgacaaggttgtgaaaaagggcaagaaagataagaagattaagaagacctttttcgaagagttggcagtcgaagataagcaggccggggaggaagagaaagtacttaaggaaaaggagcagcagcagcagcaacaacagcagcaacagcaaaagaagaagagagacaccagaaaaggtcgccggaagaaggacgtggacgacgatggagaagaaaaggagctgatggaaaggctcaaaaaactgagcgtccctactagtgacgaggaggacgaggtgccagctccaaagccaaggggcggaaagaagaccaagggcggtaacgtttttgccgcgctgattcaagaccaaagcgaggaagaagaggaggaagagaaacatccccccaaacctgccaaacccgaaaagaatagaattaacaaggccgtttctgaggagcagcagccagcacttaaggggaaaaaaggtaaggaagagaagtcaaaaggcaaagctaagccacagaacaaatttgctgcgctggataatgaagaagaagataaagaggaggaaatcatcaaagaaaaagagccaccgaagcaggggaaagaaaaggcgaagaaggccgagcaaggctcggaggaggaaggcgagggggaggaagaagaggaagaaggaggcgaatcgaaagccgatgacccttacgcccatctgagtaaaaaggaaaagaagaaactcaaaaagcagatggaatacgagagacaggtcgcatctttaaaggctgcgaacgccgccgaaaacgattttagcgtgagccaggccgagatgagctccaggcaggcaatgctcgaaaacgcttccgacatcaagttagagaagttttccatctccgcccatggcaaggagctgtttgtaaacgccgatctctacattgtagctggccgcaggtatggcttagtgggacctaacggatag

SEQ ID NO: 28413 - DNA, 1023 bp, Artificial Sequence
  derived and/or modified sequence
atgccaaaggctcccaagcagcagcctcccgagcccgagtggataggcgacggcgaaagcacgtccccaagcgacaaggtcgttaagaaggggaagaaggacaaaaagatcaagaaaacctttttcgaggagctggcagtcgaagacaaacaggctggcgaagaagaaaaagtgctcaaagagaaagagcagcagcagcagcagcaacagcagcagcaacaaaaaaagaagagggatacacgcaaaggacgcaggaaaaaggacgtcgatgatgacggggaagagaaggagctcatggaaaggctcaaaaagctgagtgtcccgaccagcgacgaggaggatgaagtgcccgcccccaaaccacgcggcgggaagaaaaccaaaggcggaaacgtcttcgcggccctgatccaggatcagtcagaggaggaggaggaggaagagaagcatcctccaaaacctgcgaaacccgagaaaaacagaattaacaaggcagtctcagaggagcagcagccagcccttaaagggaagaaggggaaggaggagaagtccaaaggcaaggcaaaacctcagaataagtttgctgcactggacaacgaagaggaagataaggaagaggagattattaaggagaaggagcctcctaaacagggaaaggaaaaagccaagaaagcagagcagggctcagaggaagagggcgaaggtgaggaggaagaagaggagggtggagaatcaaaagccgacgatccatacgcacacctgagcaagaaggagaaaaagaagctcaagaaacagatggagtacgagcgccaggtggcctctctaaaggctgctaatgcggccgagaacgacttttcagtctctcaggctgaaatgtcctcccggcaggccatgttggaaaacgcgtcagacatcaaactggagaagttcagcatctcagcccatggcaaggaactttttgtgaatgcggacctgtacatcgttgccggtaggcgatacggactggttggccccaacggatag

SEQ ID NO: 28414 - DNA, 1023 bp, Artificial Sequence
  derived and/or modified sequence
atgccaaaggcacccaagcagcagccccctgaaccggagtggataggggatggcgagtccaccagcccttctgacaaggtggtgaaaaaagggaagaaggataaaaaaattaaaaaaacctttttcgaggaattggccgtcgaggacaagcaggcaggagaggaagaaaaagttctgaaggaaaaggaacagcagcagcagcagcagcagcaacagcagcaaaaaaagaagcgggacacacgcaaaggccgccggaaaaaagatgtggacgatgacggcgaagaaaaggaactgatggaacgcttgaagaagctgtcagtgcctacctccgacgaagaagacgaggtacctgctcccaaacctcgaggcggaaagaagacgaagggcggaaatgtcttcgctgccctcatccaggatcaaagtgaggaagaggaagaagaagaaaaacatcctccaaaaccagctaagcccgaaaagaaccggatcaataaggctgtgagtgaggagcagcaaccagcccttaagggcaaaaagggaaaggaagaaaagtccaagggaaaggccaaaccgcagaacaagttcgcggctttagataatgaggaggaagacaaggaggaggagatcataaaggagaaagagccacctaaacagggcaaagaaaaagctaaaaaagctgagcaaggcagtgaggaggagggggagggcgaggaagaagaagaggaaggaggcgagtctaaggccgacgatccttacgcacacctctccaaaaaggagaagaagaaactgaagaaacagatggagtacgaaaggcaggtcgccagtctaaaggcggcaaacgcggccgagaacgatttttcagtcagtcaagcagagatgtcctcccgccaggcaatgcttgagaacgcctccgacattaagctcgagaagttttccatttccgctcacggcaaggaactgttcgtcaatgcagacctgtacatcgttgctgggcggagatacggactcgtgggaccaaacggctag

SEQ ID NO: 28415 - DNA, 1023 bp, Artificial Sequence
  derived and/or modified sequence
atgccaaaagcaccaaagcagcaacctccagaacctgagtggattggcgacggggagtccaccagcccatcagacaaggtggtcaaaaagggcaaaaaagacaagaagattaagaagaccttctttgaagagttagccgttgaagacaagcaggctggagaggaagaaaaagtgctgaaggaaaaagagcagcagcagcagcagcagcaacagcagcagcagaagaagaagcgggataccagaaaggggaggcgaaaaaaggatgtggacgacgatggggaagagaaagaactgatggaaaggctaaagaagctcagcgtcccaacatcagatgaggaagacgaagtccctgcccctaagcccagaggggggaaaaaaaccaaggggggtaacgttttcgccgccctaattcaggaccagtctgaggaggaagaggaggaagagaagcacccacccaagcctgccaagcccgagaagaataggattaataaggcagtgagtgaggagcagcaaccagcactcaaggggaaaaaaggtaaagaggagaagtcgaagggaaaggcgaagccacagaataaatttgccgctcttgacaacgaggaagaagataaggaggaggagatcatcaaagaaaaagagccacccaagcagggtaaggaaaaggccaagaaggccgagcagggaagtgaggaagagggcgagggtgaggaagaggaagaggaggggggcgagagcaaagccgatgacccttacgcccatctctccaagaaggaaaagaagaaactcaagaaacaaatggaatatgagcggcaggtcgcaagtctgaaagcggccaacgccgctgaaaacgacttctcggtgagccaggccgagatgtcttcccggcaagcgatgctggaaaacgcttcggacataaagctggagaaattctctatatccgcgcacggcaaggagctgtttgtgaacgcggacctctacatcgtggccggacgacgctacggcctggtcgggcctaacggatag

SEQ ID NO: 28416 - DNA, 1602 bp, Artificial Sequence
  derived and/or modified sequence
atgccaaaagcccccaaacagcagccaccagaaccagagtggatcggggacggggaaagcacctcccccagcgacaaagtcgtgaaaaagggaaaaaaggacaagaagatcaaaaaaaccttctttgaagagctggctgttgaggataaacaggctggggaagaagagaaggtccttaaagagaaggagcaacagcagcagcagcagcagcagcagcagcaaaagaagaaacgagacactagaaaaggcaggcgcaaaaaggacgtcgatgacgatggggaagagaaggagttgatggaaaggctgaagaaattgtccgtccccacgtccgatgaggaggacgaggtcccggccccaaaaccgaggggcgggaagaaaactaaagggggaaacgtcttcgccgctctgattcaagatcagtctgaagaagaagaggaggaggagaagcaccccccaaagcctgcgaagccagagaaaaaccgaattaacaaggcagtttccgaggaacagcagcctgcgctcaaaggaaagaaaggcaaagaagagaagagcaaaggcaaggctaagcctcagaacaaatttgccgccctggataacgaggaagaggataaggaagaagaaattattaaagagaaggagccccctaaacagggaaaagagaaggccaagaaggctgagcaggggtccgaagaggagggggagggggaagaagaagaggaggaggggggcgagtccaaggctgacgatccttatgcacatctgtcaaaaaaagaaaagaagaagctgaaaaagcagatggagtatgagagacaggtggctagcctgaaagctgcaaatgccgcagagaatgactttagtgtgagccaggcagagatgagtagtcgacaggccatgctggaaaacgcaagcgacattaagctggaaaaattttccatttcagcacacggaaaagagctcttcgttaacgccgacttatacatagtagccggcagaaggtacggattagtgggccccaacggcaaaggaaagaccactcttttgaaacacatcgctaatcgcgctctatccattcctcccaacatagatgttctactttgtgaacaggaagtcgtagcagacgagacgccagcggtgcaggctgtgctgcgcgatgacaccgcggctgaacgcctggaaaaagtgtacgaggaactccgggccacaggagccgccgccgcagaagcaaaggctcgccggatccttgcagggctgggtttcgatcccgagatgcagaaccgccccactcagaagttcagcgggggctggcggatgagggtttctttggctagggctctctttatggagccaacactgctcatgctggatgaacccacaaataatctagatattgagtccatcgatgcattgggggaggccatcaacgagtacaagggggccgttatcgtggtttcacatgacgcaagactgatcactgaaacgaactgccagctctgggtggtggaggagcagagtgtgagccagatagacggagacttcgaggattataaacgcgaggtgctggaggcactcggggaagttatggtgagccggccgcgtgaatag

SEQ ID NO: 28417 - DNA, 2538 bp, Artificial Sequence
  derived and/or modified sequence
atgccaaaggcacctaaacaacagcccccagaaccagaatggatcggagatggcgagtctacctctccttcagataaggtggttaaaaaaggcaaaaaagataaaaaaattaagaagaccttcttcgaagagctggcagtggaagacaagcaggccggcgaggaggaaaaagtgctgaaggagaaggaacagcagcagcagcagcagcagcagcagcagaagaaaaaacgagatacgaggaaaggacgtcgcaaaaaggacgtcgacgatgacggtgaggagaaggaacttatggaaagactgaagaagctcagcgtgcccacaagcgacgaagaggatgaagtacccgcccctaaaccccgcggcggcaagaagaccaagggggggaatgtcttcgcagcactcattcaagaccaaagtgaggaggaggaggaggaagagaaacatccaccaaaaccagccaagcccgaaaaaaaccgaattaataaagcggtgagcgaggaacagcagccagcactgaagggcaagaaaggcaaggaggagaagtccaaggggaaagccaaacctcagaacaaatttgcagccctcgacaatgaagaggaagataaggaagaagaaatcataaaggagaaggagccacctaaacaggggaaggagaaagctaagaaagctgagcaaggatccgaagaagaaggagagggggaagaagaagaagaggaaggaggtgagtcaaaagctgacgacccatacgctcatctgagtaaaaaagagaagaagaagctgaaaaaacaaatggagtacgagagacaagtcgcatctctgaaagctgctaacgccgcagaaaacgatttcagcgtgtcacaggctgagatgtcttcccgacaggcaatgctggaaaacgcctcagatataaaactggaaaagttcagcataagcgcccatggcaaggagcttttcgtgaacgcggatctgtacattgtcgcagggagacgatacggactggttggcccaaacgggaagggtaaaacgacattgctgaaacatatagcgaaccgagcattaagtataccccccaatattgacgtgttgctctgcgagcaggaggtagtggctgatgagacgccagcagtgcaggccgtcttgcgcgcggacactaaaaggctgaagctgctcgaagaggagcgtcgattgcaaggacagctggaacagggcgacgataccgccgccgagaggctggagaaagtgtacgaagagctccgcgccacaggtgccgcggccgctgaggccaaggccaggcgcattctagccggcttggggttcgatcccgagatgcagaatcggccgacccaaaagttctccggaggatggcgcatgcgagttagcctcgcccgcgccctgttcatggagccgacgctgctcatgttggacgagccgacaaaccacttagacttgaatgcagtcatctggctcaataattacctgcaaggatggagaaaaaccctactgatcgtctctcatgatcagggctttcttgacgatgtgtgtacagatataatccatctcgatgcccagcggcttcactactaccgaggtaattacatgacttttaagaagatgtaccagcagaaacagaaggagcttttgaaacagtacgagaagcaggagaaaaagttgaaggaattgaaggccggaggtaaatcaacaaaacaggccgaaaagcagacaaaagaagccttgactcgcaaacaacagaagtgtcggcgcaagaatcaggacgaggagtcacaggaagcccccgagctgctgaagcggcccaaagaatacacagtgaggtttactttccccgatcccccacccttaagcccccccgttctgggtttgcacggtgtgacctttggttatcagggccagaaaccactgttcaagaatcttgattttggcattgatatggacagcaggatatgtatcgtcgggccgaacggagtgggaaaatcgacgttgctcctgctgctgaccgggaaactgaccccaacacatggtgagatgcgaaagaaccaccgactgaaaatcgggttcttcaatcagcagtatgccgaacaattgaggatggaagagacgccaactgagtatctgcagaggggctttaacctgccataccaggatgcacggaaatgcctcggaagattcggactggagagtcacgcacacactatacagatatgcaaattgtccggtggccagaaagcgcgtgtagtgtttgccgaactcgcatgtagggagccagacgtcctgattttggacgagcccactaataatttggatatcgagtcaatagatgccctgggcgaggcaatcaacgagtataaaggagccgtaatagtggtgtcccatgacgcgcgcctgatcaccgagacgaactgccagctctgggtggtagaggagcagtctgtgagccagattgatggcgacttcgaggactataaacgcgaggttctggaggcactcggtgaagtaatggtgtctcggccacgcgagtag

SEQ ID NO: 28418 - DNA, 2538 bp, Artificial Sequence
  derived and/or modified sequence
atgccaaaggcccctaagcagcaacccccggaaccagagtggattggcgacggagagtctacatcacccagcgataaggtcgtgaaaaaaggcaaaaaggataaaaagatcaagaaaacgttctttgaggaattggccgtggaggataagcaagccggagaagaggagaaagtgctgaaggaaaaagaacagcagcagcagcagcagcaacagcagcaaaagaaaaagcgagatactcggaaagggcggcgcaagaaagatgtagatgatgatggcgaagagaaagagctgatggagaggctgaaaaagctgtcagtcccgaccagcgacgaggaggacgaggtccccgcaccaaagcctcgcggggggaagaagactaaaggcggcaacgtgttcgcggccttgatccaggaccaaagtgaggaagaggaggaggaggagaaacatcccccaaaaccagcaaagcctgagaagaatcgcattaacaaggccgtgagcgaggagcagcaaccagccctcaaagggaagaaaggaaaggaggaaaagagcaaaggcaaagcaaagccgcagaataagtttgccgccctcgacaacgaagaggaggacaaggaggaggagatcattaaggagaaagagccaccaaaacaggggaaggagaaggccaaaaaggccgagcagggatccgaagaggaaggcgagggcgaggaggaggaagaggaagggggtgaaagcaaagcggatgacccatatgctcatctgtctaaaaaggagaagaaaaagctgaagaagcagatggagtatgagagacaagtggcttccctgaaggcagcaaatgccgcagagaatgatttctctgtgtctcaggccgagatgagttcccgtcaggccatgcttgagaatgcttccgatataaaactggaaaaattttcaatcagtgctcatggcaaggagctcttcgtgaatgccgacctttacattgtggccggaaggagatatggcctggtgggcccaaacggcaaaggaaagactactttgctgaaacacatcgctaaccgcgcactgagtataccacccaatattgacgttctgctctgtgagcaggaagtggtagctgatgaaactcctgccgtgcaggcagtgcttcgcgccgacaccaagagactcaagctcctcgaggaagaacgaaggttgcagggacagctcgagcagggagacgacactgcagcagagagactggaaaaagtgtacgaggaactgagggcaaccggggcggccgcagccgaggccaaagcccggagaatcctggccggtctgggattcgaccctgagatgcagaatcgacccacccaaaagtttagtggaggctggcggatgcgggtctctctggcccgggcactgtttatggagccgacattattgatgctggacgaacctacaaatcatctggatctaaacgcggttatctggttgaataactacttgcagggctggcgcaagaccctcctcattgtttcccatgaccaggggtttctggacgacgtgtgtactgacatcatccacttggatgctcagcgacttcattactataggggtaactacatgacctttaaaaagatgtatcagcagaagcagaaagagctcttaaaacagtacgaaaagcaggagaagaaactgaaggaattaaaggcaggggggaaatcaacgaaacaggccgagaagcaaactaaagaagctctgacccgcaagcagcagaagtgccggagaaagaatcaagatgaggaatctcaagaagccccggaactgcttaagaggccaaaagaatatactgtgaggttcactttcccagatccaccccccctgtcacctcccgtccttggactccacggggtcacattcgggtatcaaggtcaaaaaccacttttcaaaaacttggacttcggtatagacatggattctagaatatgtatagtagggcccaacggcgtggggaaaagcaccttactacttcttcttaccggtaagttaacccccacccacggagaaatgcgtaaaaaccaccgtctgaagattggattttttaaccagcagtacgcggaacagctccgcatggaggagacccctactgagtatctgcaacgtggtttcaacctcccataccaggatgcaaggaagtgtctagggcgttttgggctggaatcccacgcccacacaatccaaatctgtaaactttccggggggcaaaaggctagggtcgtcttcgcagagttggcctgtcgggaaccagacgtccttattttggatgagcctacgaataatttagatatcgagtcgatcgatgcactcggagaggccattaatgagtacaaaggagcggttatcgttgtatcgcatgacgcacgactaattaccgaaacaaattgtcagctgtgggtcgtcgaggaacagtccgtcagccagatcgatggcgatttcgaagattataagagggaggtgcttgaggcccttggcgaggttatggttagcaggcctcgagaatag

SEQ ID NO: 28419 - DNA, 1602 bp, Artificial Sequence
  derived and/or modified sequence
atgcccaaggcccccaagcagcagcctcccgagcctgaatggatcggggacggggaatctacgagtccaagcgataaagtcgtgaagaagggtaagaaggacaaaaagatcaagaaaactttctttgaggagctggctgtggaggataagcaagctggggaggaggagaaagtgctgaaggagaaggaacagcagcagcaacagcaacagcagcagcagcaaaagaagaagcgggatacccgaaagggccggaggaagaaggacgtcgacgacgacggagaagagaaagagttgatggaaagattgaaaaagttatcagttcccacctctgatgaggaagacgaggtgcctgcccccaagccccgcggagggaagaagaccaaagggggcaacgtgttcgcagccctcatccaggaccagagtgaggaggaagaggaagaggagaagcatccccccaagccagccaaacctgaaaagaacagaatcaacaaagctgtttcagaagaacagcagccagcactgaaaggtaagaaggggaaggaagaaaaatcaaaaggtaaagcaaagccacagaacaaattcgcagccctggacaacgaagaggaggacaaagaagaagagatcataaaggaaaaagaacctcccaagcagggaaaagagaaggccaagaaggctgaacaaggcagtgaagaggaaggggagggtgaagaggaagaggaggaagggggagagtcgaaagccgacgatccctatgcccatctcagcaaaaaggagaaaaaaaagctcaagaaacagatggagtatgagagacaggtagccagcctgaaggcggccaacgccgcagaaaacgatttctctgtaagtcaggctgaaatgtcatcccgtcaagccatgcttgagaatgcatctgacatcaagctagagaaattttcaatcagtgcccacggcaaggagctgtttgtgaacgccgacctgtacattgtggccgggagacggtatggcctggtcggtcccaacggaaagggaaagacaaccctgcttaagcacattgccaacagggccctctccatcccccccaatatcgacgtcctcctgtgcgagcaggaggttgttgcagacgagacacctgctgttcaggctgtgctgcgagatgatactgccgccgaaaggttggagaaagtttatgaggaacttcgggccaccggcgcggctgccgctgaggcaaaggcgcgacgaatcctagcagggcttggatttgatcccgaaatgcaaaatcgcccaactcagaaattctccgggggctggaggatgcgcgtgtccttagcgcgagcactcttcatggagccgaccctcctgatgctggatgagcccaccaataatcttgacatagaatccattgacgcgttaggcgaagctatcaacgagtacaagggcgcagttatcgtggtgagtcatgatgcaagactgattactgaaactaactgccaactatgggtcgtagaagaacagtcagtgagccagatcgacggagatttcgaagactataaacgagaagtcctggaagccttgggtgaggttatggtgagtcgacctcgagagtag

SEQ ID NO: 28420 - DNA, 1599 bp, Artificial Sequence
  derived and/or modified sequence
atgcctaaagccccaaagcagcagccacctgagccagagtggatcggcgacggcgagtccactagccccagcgacaaggttgtgaagaaggggaagaaggacaagaagattaaaaaaactttcttcgaggaactcgccgtcgaagataaacaagcgggcgaggaggagaaggtgctgaaggagaaagagcagcagcagcagcagcagcagcaacagcagaaaaaaaagcgagatacccgtaagggacggcggaaaaaggatgtcgacgacgacggggaggagaaggaactgatggagcgactgaagaagctgtctgtgcctacatctgacgaggaggacgaagtgcccgcacctaaacctcgagggggcaaaaagactaaggggggcaacgtgttcgcagctcttattcaggaccagtcagaagaggaagaggaagaagagaagcatcctccaaagcctgcaaagccagaaaaaaatcggatcaacaaggccgtttctgaagaacaacagccagccctgaaaggcaagaaggggaaggaggagaagagcaaggggaaagctaagccccaaaataagtttgcagctctagataatgaggaggaggataaggaagaagagatcatcaaggagaaagaaccgcccaagcagggcaaggagaaagccaagaaggctgagcagggttctgaggaagagggggagggtgaggaggaagaggaggaggggggagagagcaaggcagatgacccatatgcccatctgtccaagaaggagaagaagaagctgaagaagcagatggagtatgagcgccaggtcgcgagccttaaggccgctaacgctgctgagaacgacttttccgtatcacaggctgaaatgtcttcaagacaggccatgctagagaacgccagcgacattaagctagaaaagttcagtatttcggcgcacggtaaagaactgtttgtaaatgctgatctctacatcgtggccggacgccgctacggcctcgttggacccaatgggaagggtaagactactctgctcaagcacatcgcaaatcgcgctctgtctatcccgcctaatattgatgtgctcctttgtgagcaagaggtggttgccgatgagacccccgctgtgcaagctgtgttgcgagatgacactgctgccgaacggctagagaaggtgtatgaggaactgagggctactggggccgccgccgctgaagccaaggcgaggcggattttggccggcctgggattcgacccagaaatgcagaatcgtcctacacagaaattctccggcggctggagaatgagagtatcacttgcccgggccctcttcatggagcccacgctcctgatgctggatgagccgaccaataatttggacattgagagcattgacgccttgggcgaggctatcaacgaatacaaaggggccgtgattgtcgtgtctcacgacgcgaggctcatcacggagacaaactgccagctctgggtggtggaggaacaatcggtcagtcagatcgacggggatttcgaagactacaagcgggaggtcttagaggctctcggagaagtcatggtttcacgacctagggagtag

SEQ ID NO: 28421 - DNA, 1599 bp, Artificial Sequence
  derived and/or modified sequence
atgcccaaggccccaaagcagcagccccctgaacccgaatggatcggagacggcgaatctacttccccatcagacaaagtagtgaagaaagggaaaaaggataagaagattaaaaagacgttctttgaggagctagctgtggaagataagcaagccggggaggaggaaaaggtgttgaaggaaaaagagcagcagcagcagcagcagcagcagcagcaaaaaaaaaaacgagacacaagaaagggaagacgcaaaaaggacgtcgacgacgatggcgaggagaaagagctgatggaacgcctgaagaagctgtccgtccctaccagcgacgaagaagacgaggtacctgctcctaaaccccgcggcggaaaaaagaccaagggaggcaatgtgttcgccgctctgattcaagaccagtccgaggaggaagaagaggaagaaaagcaccccccaaaaccagccaaaccggagaaaaaccggatcaacaaggcagtcagcgaggaacagcagcccgccctgaaaggtaaaaaagggaaagaggagaagtctaaggggaaggctaagccccagaataaatttgccgcgttggacaatgaagaagaagacaaagaggaggagattataaaagaaaaggagccccctaagcaaggcaaggaaaaagccaaaaaggccgaacagggtagtgaagaggagggcgaaggggaagaggaggaggaggaaggcggggaatctaaggcagatgatccgtatgcacatctgagcaagaaggaaaagaagaagctcaaaaagcagatggagtacgagcgccaagtggcaagtctgaaagccgccaacgcagccgaaaatgacttctcagtgagtcaggcggaaatgtccagcaggcaggcaatgctagaaaatgcttctgacattaagttggagaaattctctatctccgcccacgggaaggagctattcgtgaacgcagacttatatattgtcgctggaagaagatacggccttgtcggcccaaacggtaaggggaagaccactctgttgaaacatattgcaaatcgggcactgagtattccccctaacatcgatgtgctgctgtgcgagcaagaggtcgttgcagacgagacccctgcagtgcaagccgtattgcgtgatgacaccgccgccgagcgcttggagaaagtgtatgaagaactgcgcgctactggtgccgccgccgccgaggccaaggctagaaggatactcgcagggctgggcttcgacccggaaatgcagaacaggcctactcagaaattcagtggcggctggcgcatgcgcgtttccctggcccgcgccctgttcatggagcctacactgcttatgctggacgaaccaaccaataaccttgacatcgaaagtatagatgccctaggggaggccataaatgagtacaagggagcagtcattgtcgtgtcacacgatgccaggctgatcactgagacaaattgccagttgtgggtagtggaggagcagtcggtttcccagattgacggcgacttcgaagattataagcgggaagtgctggaagccctcggtgaggtcatggtgagcagaccccgggaatag

SEQ ID NO: 28422 - DNA, 1599 bp, Artificial Sequence
  derived and/or modified sequence
atgcccaaggccccaaagcaacagcctcctgaacctgagtggattggcgacggagagagcacatctccctctgataaggtcgtcaagaagggcaaaaaggataagaagattaaaaagaccttcttcgaggaattggctgtagaagacaagcaggctggagaagaagagaaagtccttaaagagaaagagcagcagcagcaacagcaacaacaacagcagaagaagaagagagatactcgcaaaggacgcagaaagaaagacgttgacgacgatggagaggagaaggagttgatggagcgattgaagaaactgagtgttcctacttccgacgaagaggacgaagtgccagcccccaagccacgggggggcaagaaaacaaaaggcggaaacgtctttgcagccttaattcaagaccaaagtgaggaagaagaggaggaagagaaacaccctcctaagcctgccaagcccgaaaagaacagaattaataaggcggtgtcagaggaacagcaaccagccctaaaggggaagaaaggaaaagaagagaagtccaagggcaaggctaaacctcaaaacaaattcgccgccctggacaacgaggaagaagataaggaggaagagataattaaggaaaaagaaccacctaagcagggcaaggagaaggccaagaaagccgaacaaggctcagaagaagagggggaaggagaggaagaagaagaagagggtggagagtcaaaagccgacgacccgtacgctcatctgtctaagaaggagaaaaagaagctgaagaaacagatggagtacgagcgccaggttgcatccctgaaagctgcaaatgccgccgagaacgatttttcagtgtcccaggctgagatgtcttccaggcaggctatgctggagaatgcatccgacatcaaactagagaaattctcgatctcagcacatgggaaagagcttttcgtcaacgctgacctgtatatcgtcgcaggacggaggtacggcctcgtgggccctaacggcaaagggaagacaacacttttgaagcatatagccaaccgtgccctgtctatacctccaaacattgacgtgctcttatgcgaacaggaagtcgtggctgatgaaacacctgccgtgcaggctgttcttcgggacgatacagctgccgaacgcttggagaaggtgtacgaggagctgagggcgacaggggctgccgccgctgaggcaaaggcaagacgaatcctggccggactgggatttgatccggaaatgcaaaaccgacctacccaaaaatttagcggtggatggaggatgagggtgagtttggcgcgtgctctgtttatggagccaaccctcttaatgttagacgaacccacaaataacttggatatcgagtcaatagatgccttgggtgaagccatcaacgagtacaagggcgcggtgatcgtggtgagtcacgacgccagactgatcaccgagactaactgccaattgtgggttgttgaagagcagtccgtctcccagatcgacggcgacttcgaggactacaagagggaagtcctggaagctctcggtgaggtgatggtgtcccgcccccgggagtag

SEQ ID NO: 28423 - DNA, 1599 bp, Artificial Sequence
  derived and/or modified sequence
atgccaaaggcccctaaacaacaaccacctgaacctgagtggatcggggacggcgagtccacttctccttcggataaggtagttaaaaaagggaaaaaggataaaaaaataaagaagacgttctttgaggaacttgctgtggaagataaacaggcgggcgaagaggagaaggtgcttaaagaaaaggaacagcagcagcagcaacagcagcaacaacagaagaagaagagagatactaggaaaggaagacgtaagaaggacgtagacgatgatggagaggaaaaggaactcatggagcgcctgaagaaactatccgttcctacttccgacgaggaggacgaagttcctgctcctaagccacggggcgggaaaaagacaaaggggggcaacgttttcgctgcgctgatccaggaccagagcgaggaggaagaagaagaggagaagcacccccctaaacctgctaaacctgaaaaaaatcgtatcaataaagctgtctctgaagaacaacagccggccctgaaggggaaaaaaggaaaagaggagaaaagcaagggcaaagccaagcctcagaacaagtttgctgccctggataatgaagaggaggataaggaggaggagattatcaaagagaaggagccacctaaacaggggaaagagaaggccaagaaggcagaacaaggcagtgaggaggaaggcgagggagaagaggaggaggaggagggaggtgagtctaaggctgacgacccgtatgcacatttgtccaagaaggaaaaaaagaagctgaagaagcagatggaatatgagaggcaggttgcatccttgaaggctgctaatgctgccgaaaatgatttctctgtcagtcaggccgagatgtcatctagacaggctatgctggagaacgcatcagatataaagcttgaaaagttttctatcagtgcccacgggaaggagctgttcgtcaatgccgacctgtatatagttgctggtagacggtatggcctcgtaggaccaaacggcaaaggaaaaacaaccctcctgaagcacattgccaaccgggctttatctatccctccaaacatcgatgtgctactctgtgagcaagaggtcgttgctgatgaaacgcctgccgtgcaggctgtactgagggatgacactgccgctgagcggctagagaaggtttacgaggagctgagagctaccggtgctgccgccgctgaagcaaaggcccgcagaatacttgccgggctgggcttcgatcctgagatgcagaaccgccccactcaaaaattctcaggtggatggcggatgagagtcagcctggcacgcgccttgttcatggaaccaacgttgctgatgcttgatgagccaacgaataaccttgacatcgaaagcatagatgcattgggcgaagctataaacgaatacaaaggtgcagtgatcgtagttagccacgatgctcgattgatcacagaaactaattgtcaactgtgggttgtggaagagcagagcgtatcccagattgacggcgactttgaagattataaacgtgaggttcttgaggctctcggagaggtgatggtctcacggccccgcgaatag

SEQ ID NO: 28424 - DNA, 1602 bp, Artificial Sequence
  derived and/or modified sequence
atgcctaaagcccccaaacagcagcctccagaacctgagtggattggcgacggagaatctaccagcccgagcgacaaggtcgtaaaaaaaggcaaaaaggataagaaaataaagaaaactttcttcgaggaactagcagtcgaggataagcaagcaggcgaggaggagaaggtgcttaaagagaaggagcagcagcaacagcagcagcaacagcaacagcagaaaaagaaaagggacacccgcaagggaagacgcaagaaagacgtggacgatgacggagaagaaaaggaactcatggagcgactaaaaaaacttagcgtgccaacttctgacgaagaagacgaggttccagcccccaagccacgcggcggtaaaaagaccaaaggcggaaacgtgttcgcggcgcttatccaagatcaatcggaggaggaggaggaagaggaaaaacatcctcctaagcctgcaaaacctgagaagaacagaattaataaggctgtgtccgaggaacagcagcccgcactgaaaggaaagaaagggaaggaggaaaaatcaaagggtaaggctaagccccaaaataaattcgctgctctggataacgaggaggaggataaggaggaggaaataattaaagagaaggagccacccaagcagggtaaggaaaaagccaaaaaagcagagcaaggcagcgaagaggagggtgaaggggaggaggaagaggaggagggaggcgaatccaaggcggatgacccctacgcccatctgagcaaaaaagaaaagaagaaactgaaaaagcaaatggaatacgaacgtcaagtcgctagtctaaaagctgccaacgcggccgaaaacgactttagcgtgagtcaagccgagatgtcctcaagacaagccatgttggagaacgccagtgacataaagctggagaaattttcaatcagcgcccacggtaaggagctctttgtgaatgccgacctatatatcgtagcagggcgtcggtacggtctggtgggtcctaacggtaagggcaaaacgacgctgcttaagcacattgctaatagggccttgtccatcccacctaacatcgatgtgctgctgtgcgagcaggaggttgtggccgacgaaaccccggctgttcaggctgttctgcgcgatgacacggccgctgaacggctggagaaagtctacgaggagctgagagccaccggtgccgccgccgcagaggccaaagccagaaggatcctagccgggttgggatttgaccctgaaatgcaaaaccggcccacccagaaattctccgggggctggcggatgagggtctcacttgcccgggccctgttcatggaaccaaccctactgatgctcgatgagcccaccaataacctcgatatcgagtccatcgatgccctcggtgaggctattaacgaatacaagggggctgtcattgttgtatcgcatgatgcccgcttgatcaccgaaacgaactgccagttgtgggtagtcgaggagcagtccgtttcccagatcgacggagatttcgaagactacaaaagagaggtcctggaggcactgggagaggtgatggtcagtaggcctcgcgaatag

SEQ ID NO: 28425 - DNA, 2538 bp, Artificial Sequence
  derived and/or modified sequence
atgcccaaggcccccaagcagcagcccccagagcctgagtggattggagatggagagagcaccagccccagcgacaaggtggtgaagaagggcaagaaggacaagaagatcaagaagaccttctttgaggagctggccgtggaggacaagcaggccggggaggaggagaaggtgctgaaggagaaggagcagcagcagcagcagcagcagcagcagcagaagaagaagagggacaccaggaaaggaagaaggaagaaggatgtggatgatgatggagaggagaaggagctgatggagcggctgaagaagctgtctgtgcccaccagtgatgaggaggatgaggtgcctgcccccaagccccggggcggcaagaagaccaagggcggcaatgtgtttgctgccctgatccaggaccagagcgaggaggaggaggaggaggagaagcacccccccaagccagccaagccagagaagaaccgcatcaacaaggctgtgtctgaggagcagcagcctgccctgaagggcaagaagggcaaggaggagaagagcaagggcaaggccaagccccagaacaagtttgctgccctggacaatgaggaggaggacaaggaggaggagatcatcaaggagaaggagccccccaagcagggcaaggagaaggccaagaaggccgagcagggcagcgaggaggagggggagggggaggaggaggaggaggagggcggggagagcaaggcagatgacccctatgcccacctgagcaagaaggagaagaagaagctgaagaagcagatggagtatgagcggcaggtggccagcctgaaggccgccaatgctgctgaaaatgacttctctgtgtcccaggccgagatgagcagccggcaggccatgctggagaatgccagtgacatcaagctggagaagttcagcatcagcgcccacggcaaggagctgtttgtgaatgctgacctgtacatcgtggccggccgccgctatggcctggtgggccccaacgggaagggcaagaccaccctgctgaagcacatcgccaacagagccctgagcatcccccccaacattgatgtgctgctgtgtgagcaggaggtggtggctgatgagaccccagctgtgcaggccgtgctgcgggctgacaccaagaggctgaagctgctggaggaggagcggcggctgcagggccagctggagcagggagatgacacagctgctgagcggctggagaaggtgtatgaggagctgcgggccaccggggctgctgctgctgaggccaaggcccggcgcatcctggccggcctgggctttgatcctgagatgcagaaccggcccacccagaagttcagcggcggctggaggatgagggtgtccctggcccgggccctcttcatggagcccaccctgctgatgctggatgagcccaccaaccacctggacctgaatgctgtgatctggctgaacaactacctgcagggctggaggaagaccctgctgattgtgtcccatgaccagggcttcctggatgatgtgtgcacagacatcatccacctggatgcccagaggctgcactactaccggggcaactacatgaccttcaagaagatgtaccagcagaagcagaaggagctgctgaagcagtatgagaagcaggagaagaagctgaaggagctgaaggccggcggcaagagcaccaagcaggccgagaagcagaccaaggaggccctgaccaggaagcagcagaagtgcaggaggaagaaccaggatgaggagagccaggaggcccctgagctgctgaagaggcccaaggagtacacagtgcgcttcaccttcccagaccccccacccctgagcccccctgtgctgggcctgcacggcgtgaccttcggctaccagggccagaagcccctcttcaagaacctggactttggcatcgacatggacagccgcatctgcatcgtgggccccaacggggtgggcaagagcaccctgctgctgctgctgaccgggaagctgacccccacccatggagagatgaggaagaaccaccggctgaagattggcttcttcaaccagcagtatgcagagcagctgaggatggaggagacccccacagagtacctgcagaggggcttcaacctgccctaccaggatgccaggaagtgcctgggccgcttcggcctggagagccacgcccacaccatccagatctgcaagctgagcggcggccagaaggcccgggtggtgtttgctgagctggcctgccgggagccagatgtgctgatcctggatgagcccaccaacaacctggacatcgagagcattgatgccctgggggaggccatcaatgagtacaagggagctgtgattgtggtgtcccatgatgcccggctcatcacagagaccaactgccagctgtgggtggtggaggagcagagcgtgtcccagattgatggagactttgaggactacaagcgggaggtgctggaggccctgggggaggtgatggtgtcccggccccgggagtag

SEQ ID NO: 28426 - DNA, 1023 bp, Artificial Sequence
  derived and/or modified sequence
atgcccaaggcccccaagcagcagcccccagagcctgagtggattggagatggagagagcaccagccccagcgacaaggtggtgaagaagggcaagaaggacaagaagatcaagaagaccttctttgaggagctggccgtggaggacaagcaggccggggaggaggagaaggtgctgaaggagaaggagcagcagcagcagcagcagcagcagcagcagcagaagaagaagagggacaccaggaagggccgcaggaagaaggatgtggatgatgatggagaggagaaggagctgatggagcggctgaagaagctgtctgtgcccaccagtgatgaagaagatgaggtgcctgcccccaagccccggggcggcaagaagaccaagggcggcaatgtgtttgctgccctgatccaggaccagagcgaggaggaggaggaggaggagaagcacccccccaagccagccaagccagagaagaaccgcatcaacaaggctgtgtctgaggagcagcagcctgccctgaagggcaagaagggcaaggaggagaagagcaagggcaaggccaagccccagaacaagtttgctgccctggacaatgaggaggaggacaaggaggaggagatcatcaaggagaaggagccccccaagcagggcaaggagaaggccaagaaggccgagcagggcagcgaggaggagggggagggggaggaggaggaggaggagggcggggagagcaaggcagatgacccctatgcccacctgagcaagaaggagaagaagaagctgaagaagcagatggagtatgaaaggcaggtggccagcctgaaggccgccaatgctgctgaaaatgacttctctgtgtcccaggccgagatgagcagccggcaggccatgctggagaatgccagtgacatcaagctggagaagttcagcatcagcgcccacggcaaggagctgtttgtgaatgctgacctgtacatcgtggccggcagaagatatggcctggtgggccccaatggatag

SEQ ID NO: 28427 - DNA, 1602 bp, Artificial Sequence
  derived and/or modified sequence
atgcccaaggcccccaagcagcagcccccagagcctgagtggattggagatggagagagcaccagccccagcgacaaggtggtgaagaagggcaagaaggacaagaagatcaagaagaccttctttgaggagctggccgtggaggacaagcaggccggggaggaggagaaggtgctgaaggagaaggagcagcagcagcagcagcagcagcagcagcagcagaagaagaagagggacaccaggaagggccgcaggaagaaggatgtggatgatgatggagaggagaaggagctgatggagcggctgaagaagctgtctgtgcccaccagtgatgaagaagatgaggtgcctgcccccaagccccggggcggcaagaagaccaagggcggcaatgtgtttgctgccctgatccaggaccagagcgaggaggaggaggaggaggagaagcacccccccaagccagccaagccagagaagaaccgcatcaacaaggctgtgtctgaggagcagcagcctgccctgaagggcaagaagggcaaggaggagaagagcaagggcaaggccaagccccagaacaagtttgctgccctggacaatgaggaggaggacaaggaggaggagatcatcaaggagaaggagccccccaagcagggcaaggagaaggccaagaaggccgagcagggcagcgaggaggagggggagggggaggaggaggaggaggagggcggggagagcaaggcagatgacccctatgcccacctgagcaagaaggagaagaagaagctgaagaagcagatggagtatgaaaggcaggtggccagcctgaaggccgccaatgctgctgaaaatgacttctctgtgtcccaggccgagatgagcagccggcaggccatgctggagaatgccagtgacatcaagctggagaagttcagcatcagcgcccacggcaaggagctgtttgtgaatgctgacctgtacatcgtggccggcagaagatatggcctggtgggccccaacgggaagggcaagaccaccctgctgaagcacatcgccaacagagccctgagcatcccccccaacattgatgtgctgctgtgtgagcaggaggtggtggctgatgagaccccagctgtgcaggccgtgctgagagatgacacagctgctgagcggctggagaaggtgtatgaggagctgcgggccactggagctgctgctgctgaggccaaggcccggcgcatcctggccggcctgggctttgatcctgagatgcagaaccggcccacccagaagttcagcggcggctggaggatgagggtgtccctggcccgggccctcttcatggagcccaccctgctgatgctggatgagcccaccaacaacctggacatcgagagcattgatgccctgggggaggccatcaatgagtacaagggagctgtgattgtggtgtcccatgatgcccggctcatcacagagaccaactgccagctgtgggtggtggaggagcagagcgtgtcccagattgatggagactttgaggactacaagcgggaggtgctggaggccctgggggaggtgatggtgtcccggccccgggagtag

SEQ ID NO: 28428 - DNA, 1599 bp, Artificial Sequence
  derived and/or modified sequence
atgcccaaggcccccaagcagcagcccccagagcctgagtggattggagatggagagagcaccagccccagcgacaaggtggtgaagaagggcaagaaggacaagaagatcaagaagaccttctttgaggagctggccgtggaggacaagcaggccggggaggaggagaaggtgctgaaggagaaggagcagcagcagcagcagcagcagcagcagcagaagaagaagagggacaccaggaaaggaagaaggaagaaggatgtggatgatgatggagaggagaaggagctgatggagcggctgaagaagctgtctgtgcccaccagtgatgaggaggatgaggtgcctgcccccaagccccggggcggcaagaagaccaagggcggcaatgtgtttgctgccctgatccaggaccagagcgaggaggaggaggaggaggagaagcacccccccaagccagccaagccagagaagaaccgcatcaacaaggctgtgtctgaggagcagcagcctgccctgaagggcaagaagggcaaggaggagaagagcaagggcaaggccaagccccagaacaagtttgctgccctggacaatgaggaggaggacaaggaggaggagatcatcaaggagaaggagccccccaagcagggcaaggagaaggccaagaaggccgagcagggcagcgaggaggagggggagggggaggaggaggaggaggagggcggggagagcaaggcagatgacccctatgcccacctgagcaagaaggagaagaagaagctgaagaagcagatggagtatgagcggcaggtggccagcctgaaggccgccaatgctgctgaaaatgacttctctgtgtcccaggccgagatgagcagccggcaggccatgctggagaatgccagtgacatcaagctggagaagttcagcatcagcgcccacggcaaggagctgtttgtgaatgctgacctgtacatcgtggccggccgccgctatggcctggtgggccccaacgggaagggcaagaccaccctgctgaagcacatcgccaacagagccctgagcatcccccccaacattgatgtgctgctgtgtgagcaggaggtggtggctgatgagaccccagctgtgcaggccgtgctgagagatgacacagctgctgagcggctggagaaggtgtatgaggagctgcgggccaccggggctgctgctgctgaggccaaggcccggcgcatcctggccggcctgggctttgatcctgagatgcagaaccggcccacccagaagttcagcggcggctggaggatgagggtgtccctggcccgggccctcttcatggagcccaccctgctgatgctggatgagcccaccaacaacctggacatcgagagcattgatgccctgggggaggccatcaatgagtacaagggggccgtcatcgtggtgtcccatgatgcccggctcatcacagagaccaactgccagctgtgggtggtggaggagcagagcgtgtcccagattgatggagactttgaggactacaagcgggaggtgctggaggccctgggggaggtgatggtgtcccggccccgggagtag

SEQ ID NO: 28429 - DNA, 2538 bp, Artificial Sequence
  derived and/or modified sequence
atgcccaaggcccccaagcagcagccccccgagcccgagtggatcggggacggtgagtccacttcgccaagtgacaaggtggtgaaaaaaggcaagaaggacaagaaaatcaaaaaaacattctttgaggagctggctgtggaggacaaacaggccggtgaggaggaaaaggtccttaaagaaaaagagcagcagcagcagcagcagcagcagcagcagaagaagaagagagataccagaaaggggcgccgaaaaaaggatgtcgacgatgatggggaggagaaagagttgatggagcggctcaagaagctctctgtgcctacttccgacgaagaagatgaggtgccagctccaaaacctcgggggggaaagaaaactaaagggggcaatgtctttgcggctctcattcaggaccagagtgaggaagaggaagaggaggagaagcaccctccaaagccagccaaaccagagaagaaccggattaataaggctgtaagcgaagagcaacagcctgcgctgaaggggaaaaaaggaaaagaggaaaagagtaaaggcaaggcaaaacctcagaataagtttgctgcactggacaacgaggaggaagacaaagaggaagaaattattaaagagaaggagcctcctaaacagggaaaagagaaagctaagaaagccgaacagggcagcgaggaggagggcgagggtgaggaggaggaagaggagggaggagagagcaaggctgatgatccgtacgctcacctcagcaagaaagaaaaaaagaaactgaagaagcagatggagtatgaacgtcaggtggcgtctctgaaggctgccaatgccgccgaaaatgacttctcagtgagtcaagccgaaatgagctcacgtcaggctatgctggaaaacgctagcgacattaagcttgagaagttttctatatcggctcacggcaaggagcttttcgttaacgctgacctctacatcgttgccggtcgtcggtatggactggtcggtccaaacggtaagggcaagaccactcttctgaagcatatcgcaaacagagcgctctccattccccccaatatcgatgtcttactgtgcgagcaggaggttgtggcagacgaaacacctgccgtacaagcggtgctgagggccgacactaagagactgaagctgttggaggaggagagaagactgcaaggccaattagagcagggagatgatactgcagccgaaagactagaaaaggtatatgaggagcttagagccacaggggccgctgccgccgaggccaaagctcggcggatattggcaggcctgggcttcgatcccgaaatgcagaatcggccaacccaaaaattctcaggcggctggcgtatgagagtttcacttgcccgggctctgttcatggagcctactctgcttatgcttgatgaacctaccaatcatctggaccttaatgcggtgatctggctgaacaactacctgcagggttggagaaagacgctgttgattgtgtcccacgatcagggatttctagatgacgtctgtacagatattatacacctcgatgcccagcggctgcattattatcggggaaactacatgacgtttaagaagatgtaccagcagaaacagaaagagttgctgaaacaatatgagaagcaagaaaagaagttgaaagagctgaaagctggtggaaaaagtaccaaacaagccgagaaacagaccaaggaggcgctgactcgtaagcagcaaaagtgtagacgaaaaaaccaagatgaagaaagtcaggaggccccagagttgctgaagaggcccaaagagtacaccgtccgcttcaccttcccggatcccccccctctgtccccccccgtattgggactacatggagtgacttttggttatcaaggccaaaagcccttgtttaaaaacctggacttcgggatagacatggatagccgaatctgtatcgtgggacccaacggcgtggggaagagcacactgctgctactgctgacaggtaaattaacacctacacatggggaaatgcgtaagaaccaccgtcttaaaattggattctttaaccagcagtacgccgagcaacttaggatggaagagaccccgaccgagtacttacaacgtgggttcaatctgccttaccaggacgcacgaaaatgtttgggccgctttggcctcgaatctcacgctcatactatccagatctgcaaactgtctggaggtcagaaggcacgcgtcgttttcgccgaactcgcatgtagagaaccggatgtgttaattttagatgaacccaccaataacctagacatcgagagcattgatgcactgggggaagctattaacgagtacaagggcgctgtcattgtagtctcccacgatgctcgactaatcactgagacaaattgtcagttgtgggttgtggaggagcagagtgtctctcagatcgacggggacttcgaagattataaaagggaggtactcgaagccctgggcgaggtcatggtgagtcgcccacgcgaatag

SEQ ID NO: 28430 - DNA, 2538 bp, Artificial Sequence
  derived and/or modified sequence
atgcccaaggcccccaagcagcagccccccgagcccgagtggatcggcgatggcgagagcacaagtccttctgacaaagtggttaaaaagggcaaaaaggacaaaaagatcaagaagacctttttcgaagagctggccgtggaggataaacaggccggcgaggaggaaaaagtactaaaggagaaggaacaacagcaacaacagcagcaacaacagcagaaaaagaaacgtgacacaaggaaggggcgcaggaagaaagacgtggatgatgacggcgaagaaaaagagctgatggagcgactgaagaaactgagtgtgcctactagtgatgaggaagatgaagtgccagcacctaagcctaggggtggaaagaagacgaagggtggaaatgtcttcgccgctcttatccaggatcagtccgaggaggaagaagaggaagaaaagcaccctcccaaaccagccaaacccgagaagaaccgcatcaacaaagctgttagtgaagagcagcaacctgcccttaaaggaaagaagggaaaggaagaaaaaagcaaagggaaagctaaaccacagaataaatttgcagcactggataatgaagaagaggacaaggaagaggagattattaaggaaaaggagcccccaaaacaaggaaaagagaaggccaagaaggctgaacaggggtcagaggaagagggagaaggcgaagaggaggaagaagaaggaggggaaagcaaagcagacgatccttacgcacatttgtctaagaaagaaaaaaaaaagctgaaaaaacagatggaatatgaacgccaggtggcctccctaaaagccgctaacgcagccgagaacgatttctcggtgagccaggctgagatgagcagtagacaggccatgctggagaatgccagcgacataaagctagagaaattttccatcagcgcccacggtaaagagttattcgttaacgccgacctgtacatcgttgcagggcgacgctacggccttgtcgggcctaacggaaaagggaagactaccctgctgaagcatattgccaacagggctctgagcatccctccgaatatcgacgtgcttctctgcgagcaggaagtcgttgccgacgagacacctgcagtgcaggccgtactccgggccgacaccaaacgtctgaagctcctcgaggaagagcgtcggttgcaggggcaactggaacagggcgacgatacagcagccgagcggttggaaaaggtctatgaagagcttcgtgccaccggagccgctgccgctgaggctaaagctcgccgtattctggctgggttgggttttgatccagaaatgcagaatcgaccaacccagaagttctctggaggatggcggatgagagtgtccctggcaagagcactcttcatggagccgactctcctgatgctggacgagcccactaatcatctagatctcaatgccgtgatctggctcaacaactacctccagggttggcgcaagacccttctcattgtgtcgcacgaccagggctttctggacgatgtgtgcaccgacatcatccacctggatgcccagcgcctgcattactatcgtggcaactacatgactttcaagaaaatgtaccaacagaagcagaaagagctcctgaaacagtatgaaaaacaggagaaaaagctgaaagagctgaaggcgggcggcaagtccacgaaacaagccgaaaaacagacaaaggaagcactgacccggaaacaacagaagtgtcgccgcaaaaaccaagatgaagagtctcaggaagcaccggagctattaaagcgccctaaggagtatacagttcgattcaccttccccgacccgcctccgctcagtccaccagtcctcggcttacacggtgtgacatttggttatcaggggcagaaacccctattcaagaacctggatttcgggatagacatggattccaggatttgtatagtcggtcctaacggagtgggcaagtccacattactgctccttcttacgggaaagcttacccctacgcatggcgagatgaggaaaaatcaccgcttgaagattggcttcttcaatcagcagtatgccgaacaactccggatggaagaaacccctaccgagtatctccagcgaggcttcaatctaccgtatcaggatgccaggaagtgcttagggcgattcggtctggagtcccatgcacatacaattcagatctgtaaactgtcaggaggccagaaagcacgagtggtgttcgctgagcttgcatgccgggaaccagacgttcttatcctggatgagcccactaacaaccttgatattgaatccatcgacgctctgggagaggcgattaacgaatacaagggggctgtgatcgttgtgagccacgatgcacgactgattactgagaccaactgccagctctgggttgttgaggagcagtcagttagccaaattgatggagacttcgaggattacaagcgtgaagtactggaggctttaggcgaagtcatggttagcagacctcgggagtag

SEQ ID NO: 28431 - DNA, 1023 bp, Artificial Sequence
  derived and/or modified sequence
atgcccaaggcccccaagcagcagccccccgagcccgagtggatcggagacggcgagtcaacaagcccctctgacaaggtggtgaagaaagggaagaaggataagaagatcaagaagacattcttcgaggagctggctgttgaagataagcaagctggtgaagaagagaaggtacttaaggaaaaggagcagcagcagcaacaacagcagcaacaacagcagaaaaaaaaacgcgacaccaggaagggtcggcgtaaaaaagacgtggatgatgacggggaggagaaggagcttatggaaagactcaaaaaactctcagttccaactagtgacgaggaagatgaagttccggcccccaagcctcggggggggaaaaagaccaaggggggaaacgtgttcgccgccctgatccaggaccagtctgaagaagaggaggaagaggagaagcacccccctaagcctgcaaaacccgagaagaacagaatcaacaaggctgttagcgaggaacagcagcctgcactcaaaggaaagaaaggcaaagaagaaaagagcaagggcaaagcgaagccgcaaaataagttcgctgcactggataacgaggaggaagataaggaagaagagataattaaagaaaaagagcctccaaaacaggggaaggagaaagcgaagaaggccgagcaggggtccgaagaggaaggggagggtgaggaagaggaggaagagggcggtgagagtaaggcagatgacccctatgcccatttgagtaaaaaggaaaaaaaaaaattgaagaagcagatggagtatgaacgacaggtagcctctttgaaggccgccaatgcagctgaaaacgactttagcgtaagccaggctgagatgagttcaagacaggcaatgctggagaacgcttcagatattaagctggaaaaattttcaatcagcgcacacggcaaagagctgtttgttaatgcagatctgtatattgtggctggaaggcgatatggcctggttggtcctaacgggtag

SEQ ID NO: 28432 - DNA, 2538 bp, Artificial Sequence
  derived and/or modified sequence
atgcccaaggcccccaagcagcagccccccgagcccgagtggatcggcgatggcgagagcacgtctccctccgataaagtagttaagaagggaaaaaaggataagaagattaagaagactttttttgaggagctcgccgtagaggataagcaggcaggtgaagaggaaaaggtcctgaaggagaaggagcagcaacagcagcaacagcagcagcagcagaaaaaaaaaagagatactcgcaagggcaggcgcaaaaaagacgtagatgatgatggggaagagaaagaactaatggagcgattgaaaaagctgtctgtcccaacctctgacgaagaagacgaggtacccgcccccaagccccgcgggggcaagaagacaaagggaggcaatgtatttgcagccctgattcaggaccaatccgaagaggaagaagaggaggaaaaacacccgccgaagccagctaaaccagaaaagaaccgaatcaataaggccgtctcagaggaacagcagccggctctgaaaggaaagaaaggaaaggaggagaaatctaaaggaaaggctaaaccccagaacaagttcgctgccctagataacgaagaggaagataaggaagaggagatcattaaggagaaagaaccacccaaacaagggaaggaaaaagctaagaaggcagagcagggctctgaagaagaaggtgaaggggaggaggaggaagaagaaggcggcgaatctaaagccgacgacccctacgctcatctgtccaagaaagagaagaaaaagctcaagaagcaaatggaatacgagcgccaggtggctagtctgaaagccgcaaatgcagcggaaaatgatttcagcgtaagccaggctgaaatgtctagcaggcaggccatgcttgagaatgcatctgacataaaattagaaaagttttccatcagtgctcacggcaaagaattgtttgtgaatgcggacttgtacatagtcgctggccgcagatacgggctcgttggccccaacggaaaagggaaaaccaccctgctgaagcacattgctaatcgcgcactcagtattccacctaatatcgatgttctcctatgcgaacaggaagttgtcgccgacgaaacccctgccgttcaagccgttctcagggctgacactaagaggctcaagctcctggaggaggaacgaagacttcagggacagcttgaacaaggagatgataccgctgccgaacgtttggagaaagtgtatgaggaactgagggccactggagcagccgcagccgaagcaaaagctagaagaatactcgctggccttgggtttgacccagaaatgcaaaacaggccgacgcaaaaattctcaggtggctggagaatgagggtctcccttgctagggcactgttcatggaaccgactttgctcatgctcgatgagcctacaaaccatctggacctgaatgccgtcatatggctgaacaactacctccaggggtggcgtaagaccctccttatcgtgagtcacgatcagggctttttggatgacgtgtgcaccgatattattcacctggatgcacagcgactacattactacagaggcaattacatgacgtttaaaaagatgtaccagcagaagcagaaggaactgctgaaacagtacgagaaacaagagaagaagctaaaggaactcaaagccggaggaaaatctacaaaacaagccgagaaacagaccaaggaagctttgaccaggaaacagcagaagtgcaggcggaagaatcaagatgaggaatcgcaggaggctccagagcttttgaagcgcccaaaagaatacacagtccggtttaccttccccgatccgcccccactctcgccacccgtcctcggtctccacggcgttaccttcgggtaccagggtcaaaagcccctatttaaaaatctcgatttcggcatagatatggattcacgtatttgtatagttggccccaatggcgtcggcaaaagcaccctgttactcctcctcacgggaaaactgactccaacacacggggagatgagaaagaaccaccgattaaagatcgggttctttaaccagcagtatgcagagcagttgaggatggaggaaacccctaccgagtacctccagagaggatttaatttgccatatcaggacgcacgtaaatgtctgggccgcttcggactcgaaagccacgcccacacgatccagatctgtaaactttccggtggccagaaagcccgcgtagtgtttgccgaattggcatgtcgggaaccagacgtactgattttagacgaacctaccaataacctcgatatcgaatctattgatgctttgggtgaagccatcaacgaatacaagggtgcagtcatcgtcgttagccatgacgcaagacttataacagaaacgaactgccagctttgggtagttgaggagcagtccgtgagccagattgacggagacttcgaggactacaagcgggaagtactcgaggccctgggcgaggtgatggtgagcagacccagagagtag

SEQ ID NO: 28433 - DNA, 1023 bp, Artificial Sequence
  derived and/or modified sequence
atgcccaaggcccccaagcagcagccccccgagcccgagtggatcggggacggcgaaagtacatccccttcagataaagttgttaaaaagggcaaaaaagataagaaaataaagaagacgttttttgaggagctggccgtggaagataaacaggcaggcgaggaagagaaggtgttgaaggaaaaagaacaacagcaacagcagcagcagcagcaacagcagaaaaagaagagagatactaggaaggggcgtagaaagaaggacgtagacgacgatggcgaggaaaaagaactaatggaacggctcaaaaaactgtccgtacctacttctgatgaggaagatgaggtccctgcccccaaacctagagggggtaagaagacaaagggcggaaatgtcttcgccgcgctgatacaggaccagagtgaagaggaagaggaagaggagaaacacccgccaaagccagccaaaccagaaaagaatcggatcaataaggctgtgtccgaggaacagcagccagcgcttaagggaaaaaaggggaaagaagagaaaagcaaaggcaaagcaaaaccacagaataaattcgctgccctagacaatgaggaggaggacaaggaagaagaaatcatcaaagagaaggaacctcctaaacagggaaaggaaaaggcaaaaaaggccgaacagggcagtgaagaggagggggagggcgaggaagaggaagaagagggaggcgagtctaaggcggacgacccatacgcccacctgtcgaagaaggagaaaaaaaagctgaagaaacagatggagtacgagagacaagtcgcctcgttaaaggcagccaacgcagccgagaacgacttttccgtgagtcaggctgagatgtcctcaaggcaggccatgctggagaacgcttccgacatcaagttggaaaaattttccatttccgcgcacggcaaggagctgtttgttaatgccgacctgtacatcgtcgcagggcggcggtatggcctcgtcggccccaatgggtag

SEQ ID NO: 28434 - DNA, 2538 bp, Artificial Sequence
  derived and/or modified sequence
atgcccaaggcccccaagcagcagccccccgagcccgagtggatcggagatggcgagtccacctctccaagtgataaggtggtgaagaagggaaagaaggacaagaagataaaaaaaacattttttgaagagctagccgttgaggataagcaggccggtgaagaagaaaaggtacttaaagagaaggaacagcaacaacagcagcaacagcagcagcagaaaaagaagagagacactcgcaaggggaggcgtaaaaaggatgtggacgacgatggagaagagaaagagctgatggaacgtctgaaaaaactttcagtgcccacgtctgatgaggaggacgaggtgccagcccctaaacctcgcggcggcaaaaagacgaagggaggtaatgtctttgctgctctgatacaggatcagagcgaggaggaggaagaggaggaaaaacacccacctaagccagccaagcctgagaagaatagaatcaacaaagcagtttccgaggagcaacagcctgcactgaagggaaagaaaggtaaagaagaaaagtctaaaggtaaggccaagccccagaacaagtttgccgccctggacaatgaggaggaagataaggaggaggagattattaaagaaaaggagcccccgaagcaggggaaagaaaaagctaaaaaggccgagcaggggtctgaagaggagggggagggagaagaagaggaggaggaaggaggagaaagcaaggctgacgatccctacgctcacttatcgaaaaaggaaaagaaaaagttgaaaaagcaaatggaatacgaaagacaggtggcgtccttaaaggctgccaacgcagcagagaatgatttttccgtgtcccaagcggagatgtcctcccggcaagcgatgctggaaaacgcctcagatattaagttggagaagttcagtatctcggcccacggaaaggagctgttcgtgaacgctgacttgtacatcgtcgctggccggcgctacggactcgtgggccccaacggcaagggtaaaaccacacttctgaaacatattgctaatcgagccctgagcataccaccaaacatcgacgtcctcctgtgtgagcaggaagtggtggccgacgagactccagctgtccaggccgtcctcagggctgataccaagcgtcttaagcttcttgaggaagagaggcgtctgcagggccagctggaacagggtgatgacaccgccgctgagcggctcgagaaagtctatgaggaactgagggccacaggggctgccgctgccgaggctaaggcacgtagaattcttgctgggttaggttttgatcccgaaatgcagaacaggccaacccagaaatttagtggagggtggagaatgcgtgtgagcctcgcccgagccctgttcatggaaccaacactgcttatgttagacgaacctacaaaccacctggacctcaacgctgttatctggctgaataactaccttcaggggtggcgcaagaccctcctgatagtaagccacgaccaaggtttcctggacgacgtctgtactgacataattcatctcgatgctcaaagactgcattactatagaggtaactacatgacattcaagaagatgtaccagcagaagcaaaaggagttgctgaagcagtatgagaaacaagagaagaagctgaaggaactaaaggctggaggtaagtctaccaaacaggcagagaaacagactaaagaagccctgacacggaagcagcagaagtgtcgccggaagaaccaggacgaggagtcacaggaggccccagaattgctgaagcgacctaaagagtatacagtgcgattcacctttcccgatcccccaccgttgtccccccctgtgctggggcttcacggagtgacattcggataccagggccaaaaaccactttttaagaatcttgatttcggaatcgacatggactcacgcatttgcattgtagggccaaatggcgtgggcaaatccactttgttgctcctgttgaccggcaagcttactcctacccatggagagatgcggaaaaatcatagattgaagattggtttcttcaaccaacaatatgccgagcaactgaggatggaggaaacaccaactgagtacttgcagagggggtttaatctgccctatcaggatgccagaaagtgtttaggaaggtttggcctggagtcgcacgcgcataccatacagatctgcaaactgagcggtggccagaaagcaagggtagtctttgcggaactcgcctgtcgtgaacccgatgtcctgattctggatgagcctaccaacaatctcgacatcgagtccatcgacgccttgggtgaggccattaatgagtataagggagcagtgatcgttgtttcacacgatgctaggctgattacagaaaccaactgccagctgtgggtggttgaagagcagtcagtgagtcagattgatggggactttgaagattacaagagagaggttctagaggcccttggtgaggtgatggtttcaagaccaagagaatag

SEQ ID NO: 28435 - DNA, 1023 bp, Artificial Sequence
  derived and/or modified sequence
atgcccaaggcccccaagcagcagccccccgagcccgagtggatcggggatggagaatcaaccagccctagtgacaaggtggtgaaaaagggtaaaaaggacaaaaagataaagaaaacgttcttcgaggagttggcagtggaggataagcaggcaggtgaggaagagaaagtgctcaaagagaaagaacagcagcaacagcagcagcagcagcagcaacagaagaaaaaaagggatacaagaaaaggacggagaaaaaaggacgtagacgacgacggagaagaaaaggaattaatggagcgtcttaagaagttgtctgtgccaacttcggacgaggaggatgaagttcctgcgcccaaacctcggggaggaaaaaagactaagggagggaatgtgtttgccgcactcatacaggaccagtcagaggaagaggaagaggaagaaaagcacccgccaaaacccgcgaagccggaaaagaacagaattaacaaggccgtgagcgaagaacagcaaccggccttaaagggcaaaaagggaaaggaggagaagagcaaaggaaaggccaagccacagaacaaattcgctgctcttgataacgaagaggaagataaagaagaggagattatcaaagagaaggaacctcccaaacagggtaaagagaaagccaaaaaagcggaacaggggtctgaggaagagggcgaaggtgaggaggaggaggaggaaggcggagaatctaaagccgacgatccctacgctcatctttccaaaaaggaaaagaagaagttgaagaagcaaatggaatatgaaaggcaagtcgccagtttgaaagccgctaatgctgccgaaaatgatttctccgtttctcaggcagaaatgtcgagtagacaggccatgctggagaatgccagcgatattaagctggaaaaatttagcatctccgctcacggcaaggagctgttcgtcaacgcagatctatatatcgtggccggaaggcggtacggattggtcggccccaacggctag

SEQ ID NO: 28436 - DNA, 2538 bp, Artificial Sequence
  derived and/or modified sequence
atgcccaaggcccccaagcagcagccccccgagcccgagtggatcggggatggcgaaagcacatctccctcagataaggtggtcaagaaaggaaagaaagataaaaaaatcaagaaaaccttcttcgaagagctggctgtcgaggacaagcaggctggggaggaagagaaggtgctgaaagagaaagaacaacagcagcagcagcagcagcagcagcagaaaaagaagcgtgacacaagaaaaggcaggcgcaaaaaggatgtagacgacgatggggaagaaaaggagctgatggagcgtctgaaaaagctgtctgtgcccacctccgacgaagaggacgaagtccctgctcccaaaccgcgcggtgggaagaagactaaaggcggtaacgtgttcgcagccctgatccaagaccagtccgaggaggaggaggaagaagagaaacaccccccaaagccagccaaacctgaaaaaaaccgcattaacaaagcggtgtccgaggagcagcagcccgccttgaaaggtaaaaaggggaaagaggagaagtcaaaaggaaaggcaaagccgcaaaataagttcgcggctctggataacgaggaggaagataaggaagaagagatcattaaggagaaagagccacccaaacaggggaaggagaaggcaaagaaggcggagcagggatctgaggaggaaggcgagggagaggaagaggaagaggagggtggtgaatccaaggccgacgacccctatgcacatctgagcaagaaagagaagaaaaaactaaaaaaacagatggagtacgagagacaggtcgcctccctgaaggccgctaatgcagcagagaacgatttttccgtgagccaggctgaaatgtcctcccgacaagctatgctggagaatgcttcagacattaagctggaaaaattctctatcagcgcacacgggaaagagctctttgttaacgctgatctgtatattgttgcgggacggagatacggactcgtcggccccaacggcaaggggaaaacaacactattaaaacatattgcaaaccgggctttgtcgatccctcccaacattgacgtgctgttgtgtgaacaagaggtggttgctgacgagacgcccgcagtccaggcagtcctgagagccgacacaaaaaggctgaagttgttggaagaggagaggaggctccagggccagctggaacagggcgacgatacggcagcggagcgcctggagaaggtatatgaagagctgagagcaactggcgctgcagccgctgaggccaaagctagacggatcctggcaggactgggttttgaccccgagatgcagaatcgcccaacacagaagtttagtggcggctggaggatgcgagttagtctggctcgcgccttatttatggaacctaccctgctcatgctggacgaaccgacaaaccacctcgacctgaatgccgttatttggctgaataactacttacaaggttggcgcaagacattactgatagtatcccacgaccaaggctttttggatgacgtgtgtactgacatcatccacctcgatgcacaacgtctccattattacagaggcaactacatgacattcaaaaaaatgtatcaacaaaaacagaaggaactcctcaaacaatacgaaaaacaggaaaagaaactcaaagaactgaaggccggtggcaaatcaaccaaacaggccgagaaacagaccaaagaagccttgactcggaaacagcagaaatgcagaaggaagaaccaggacgaggagtcacaggaggcccccgaactactaaagcggccaaaagagtatacagtccgtttcacctttccagaccctccacctctgagtccacctgtattgggcttgcacggggtcacatttggctaccagggacagaagccattatttaagaacctggacttcggaatcgatatggactccagaatctgtatagtgggacccaacggggttggaaagtcgacactgctcctgctcctgacaggcaagttgactcccactcacggtgaaatgcgcaaaaaccaccggctaaagattggcttcttcaaccaacagtacgcggagcagcttcgtatggaagagacacctacagagtacttgcagcggggcttcaacctgccatatcaggacgcgcgcaaatgtttggggaggttcggattggaaagccatgcacatacgatccagatctgcaaattgagcgggggccagaaagcgcgggtagtctttgcagaattggcctgccgagaacctgatgtgctcatcctcgacgagcccaccaataatctggatatcgagagcatagacgctttgggcgaggccattaatgagtataagggagcagttatcgtggtcagccatgatgccagactgatcacggaaactaattgccagctgtgggtggtggaagaacagtccgtatcacagatcgacggcgatttcgaggattataagcgggaggtcttggaggctttgggcgaagtgatggttagtagaccacgggaatag

SEQ ID NO: 28437 - DNA, 1023 bp, Artificial Sequence
  derived and/or modified sequence
atgcccaaggcccccaagcagcagccccccgagcccgagtggatcggcgatggggagtctacttctccaagcgataaggtggtgaagaagggcaaaaaagataaaaagattaaaaaaactttctttgaggagctggctgtggaagataaacaggctggggaagaagaaaaagtgctgaaggaaaaagagcagcagcagcagcagcaacagcagcagcaacagaagaaaaagcgggacactcgtaaaggcagaagaaagaaggatgtggacgacgatggagaagagaaggagctgatggagaggcttaagaaattatccgtgccgacctccgatgaagaggatgaggtcccggcccccaagccacgggggggaaagaaaacgaaggggggaaatgtgtttgctgcgctgatccaggatcagtctgaagaagaggaggaggaagagaagcatcctcctaaacctgcaaaacctgagaagaaccgcataaacaaggccgtatcggaggagcaacaaccagcactgaaagggaaaaagggcaaggaggagaagagtaaagggaaagccaaacctcagaacaagttcgccgcactggataacgaggaggaggacaaagaggaggaaattattaaggaaaaagaacctcccaaacaaggaaaagaaaaagcaaaaaaggccgagcaaggctccgaggaagagggtgaaggggaggaggaggaggaggagggtggggaatctaaagcagatgatccgtacgcgcatctgtctaaaaaggaaaagaaaaagctgaaaaaacaaatggaatatgagcgccaagttgcttctctgaaagccgctaatgccgccgagaatgatttttcagtgtcccaagccgaaatgtcctcgagacaggcaatgcttgaaaatgcctctgatattaagctggagaagttttcgatttccgcccatggtaaggagctgtttgttaacgctgacctttatattgtcgctgggcggagatatggcctagtgggtccgaacggctag

SEQ ID NO: 28438 - DNA, 1023 bp, Artificial Sequence
  derived and/or modified sequence
atgcccaaggcccccaagcagcagccccccgagcccgagtggatcggcgatggggagagcacttctccctctgataaagtcgtgaagaaaggcaaaaaggataaaaaaattaagaagacgttctttgaggagctggctgtggaggacaaacaggcaggagaggaagaaaaagtcctaaaggagaaggaacagcagcagcagcagcagcagcagcaacaacagaagaagaagcgcgatacccggaagggaaggcggaagaaggatgttgacgatgatggggaagagaaagaactgatggaaaggttgaagaaactctccgttcccacatctgacgaggaggatgaggtgccggcccctaagccacggggcggaaaaaaaaccaaagggggcaacgtgttcgctgcccttatccaagaccaatctgaagaagaggaagaagaggagaaacaccctccaaagcctgcaaaaccagagaaaaatagaatcaacaaagcagtgagcgaagaacagcagcccgctctcaagggaaaaaaaggaaaggaagagaagtcaaagggaaaagcaaaacctcagaacaagtttgccgcactggacaatgaggaggaggacaaggaggaagagattattaaggaaaaggagccgccaaagcaaggcaaagaaaaagctaagaaagctgagcaggggagcgaagaagagggggagggggaagaggaggaagaggaagggggcgagtctaaggcagatgacccttatgcacacttatcaaagaaagaaaagaaaaaactaaaaaagcaaatggagtacgagaggcaggttgcatcactcaaggccgcaaacgcagccgagaatgatttctccgtgagccaagcagagatgagctcccgtcaggcaatgctcgaaaatgctagcgatattaagctcgagaaatttagcataagcgctcatggaaaagaactatttgtgaatgccgacttgtacattgtggctggtaggcggtacggtctggtgggacccaatggatag

SEQ ID NO: 28439 - DNA, 1023 bp, Artificial Sequence
  derived and/or modified sequence
atgcccaaggcccccaagcagcagccccccgagcccgagtggatcggggatggtgaatccacatcacctagcgataaggtggtcaaaaagggtaagaaagacaagaaaatcaagaaaacattttttgaagagctggctgttgaagacaaacaggccggggaggaggagaaggtgttgaaagaaaaggaacagcagcagcagcaacagcagcaacagcagcagaagaagaaaagagacacacgcaagggacgccgcaaaaaggatgtagacgatgacggcgaggagaaagagctgatggagcgcctgaaaaagttgtctgtaccaacctccgacgaagaggacgaggtgcctgctccaaagccacggggcgggaaaaagactaagggaggcaacgtgttcgcggcgctgatccaggaccagagtgaggaagaggaagaggaagaaaagcacccaccgaaacccgctaaaccagagaagaaccgcatcaacaaggctgtgtcagaggagcaacagccggccttaaagggcaaaaagggaaaggaagagaaaagcaaggggaaggccaagccgcagaataaattcgccgctctggataacgaggaggaggataaagaagaagaaataataaaggagaaagagccacctaagcagggaaaggaaaaggcaaagaaggccgaacaaggaagtgaggaggagggcgaaggtgaagaggaagaggaggagggcggcgaatccaaagccgatgacccctacgcacatcttagcaagaaggagaagaaaaaactgaaaaaacagatggaatacgagagacaggtggcatctttaaaggccgcaaatgccgctgaaaacgattttagtgtgtcccaggccgaaatgagctctagacaggccatgttagaaaatgccagtgatatcaaactggagaagttctccataagcgcgcacggcaaggagctgtttgtgaacgctgatctgtatatcgtggctggacgcaggtatggactagtcggacccaatgggtag

SEQ ID NO: 28440 - DNA, 1023 bp, Artificial Sequence
  derived and/or modified sequence
atgcccaaggcccccaagcagcagccccccgagcccgagtggatcggggatggggagtcaacttcaccgtcggataaagtcgttaaaaaaggaaagaaagacaagaaaattaagaagactttcttcgaagagctggccgttgaggataaacaggcaggcgaagaggagaaagtactaaaagagaaggagcagcagcaacagcagcagcagcagcagcaacagaaaaaaaagagagatactagaaaggggcgaagaaagaaggatgtcgacgatgacggggaagagaaagagcttatggaacgcctgaagaaactgtctgtcccgactagtgatgaggaggacgaagtgccggctccaaagcccagaggagggaagaagaccaagggtggtaacgtgttcgccgcgctgattcaggaccagtctgaggaggaagaggaggaggagaaacaccccccaaaacccgcaaagccggaaaagaataggatcaataaagccgtgtccgaggagcagcagccagcactaaagggaaaaaagggaaaggaagaaaagtctaagggtaaggccaagccccagaataaattcgctgctcttgataacgaggaggaggacaaagaggaggaaatcataaaagaaaaagagcctccaaaacagggaaaggagaaagccaagaaggctgagcagggtagtgaagaagagggggagggcgaggaggaggaagaagagggcggtgagtctaaggccgatgatccctacgcccacctctctaagaaagagaagaagaaattgaagaaacaaatggagtacgagcgccaagtggcttccttaaaagctgccaatgccgccgagaatgatttttccgttagccaggccgaaatgagtagcagacaagctatgctggaaaatgcatccgacatcaaattagagaaattctccatcagtgctcatggcaaggagctcttcgtgaatgccgatctgtacatagttgccggccggagatatggactggtaggacctaacggatag

SEQ ID NO: 28441 - DNA, 1602 bp, Artificial Sequence
  derived and/or modified sequence
atgcccaaggcccccaagcagcagccccccgagcccgagtggatcggcgatggcgagtcaacttcaccatccgataaagttgttaaaaagggaaagaaagacaagaagatcaagaagaccttttttgaagagctcgccgtagaggataagcaggctggtgaagaagaaaaggttctcaaggagaaagagcagcaacaacaacagcagcaacaacagcagcaaaagaaaaagagagatacacgcaagggacgacggaaaaaagatgtggacgatgacggtgaggagaaggaactgatggaacgacttaaaaagctgtccgtgccaacatccgatgaggaggatgaagtcccagcccccaagcctagagggggaaaaaagacaaaaggcgggaacgtgttcgcagccctcatacaggaccagagtgaggaggaggaggaggaagaaaaacacccgcctaaacctgctaaacccgagaagaataggatcaataaggccgtgtccgaagaacaacagccggcccttaaggggaaaaaaggtaaggaagaaaaaagtaagggaaaggccaagccccagaacaaatttgcagctctggataacgaggaggaggacaaggaggaggagattataaaagagaaggagcccccgaagcagggaaaggagaaagcaaaaaaagcagaacagggctctgaggaggagggcgagggcgaagaggaggaagaagaaggaggcgaatcgaaggctgacgacccttatgcgcatctatccaagaaagaaaagaaaaagctcaagaagcagatggagtatgaacggcaggtcgcctccctcaaggccgccaatgccgctgagaatgacttcagcgtgagtcaggccgagatgagctccaggcaggccatgttggaaaatgctagcgacatcaaactcgagaagttttctatctcagcccacgggaaagaattgttcgtgaatgctgatctctatattgtcgcgggccgacggtacggattggtcgggcctaatggaaaagggaaaacgactctccttaagcacattgccaaccgtgcgctgtcaatccctcctaatatagatgtcctactatgcgaacaagaagtcgtggccgatgagactcccgctgttcaggcagtgctccgggacgatactgccgccgaaaggctagaaaaagtgtatgaggagctcagagccactggcgctgcggccgcagaagctaaggccagaaggattctagccggactgggatttgaccctgaaatgcaaaacaggccgacacagaaatttagtgggggctggcgcatgcgggtgtctttggccagggctcttttcatggaaccaacactcctcatgctcgatgaacccaccaacaacttggacatcgaatctatcgatgcattgggtgaggcaattaacgagtacaagggagcagtcatagtcgtttctcatgacgcaagactcatcacagaaactaactgtcagctatgggtcgtggaagagcagtctgtgtctcagattgacggggattttgaggactacaagagggaagtgctggaggctctcggggaggtgatggttagtcggccacgggagtag

SEQ ID NO: 28442 - DNA, 2538 bp, Artificial Sequence
  derived and/or modified sequence
atgcccaaggcccccaagcagcagccccccgagcccgagtggatcggggacggtgaaagcacaagccccagtgataaggtcgttaaaaagggcaagaaggataagaagatcaagaaaacatttttcgaggaattggcagtcgaagacaaacaagccggagaggaggaaaaggtgctgaaagagaaagagcagcagcagcagcagcagcagcagcaacaaaaaaaaaagcgggatacacgcaaaggccggagaaagaaagatgttgatgatgacggcgaagagaaggaactcatggagaggctgaagaagctgagcgtgccaacctcagatgaggaggacgaggttcctgctccgaagccgcgcgggggcaagaaaacaaaggggggcaatgtcttcgccgccctgatccaggatcaaagtgaagaggaggaagaagaggaaaaacatcctcccaagcctgcaaagccagaaaagaatcgcattaacaaggccgtgtccgaggagcagcagcccgcattgaaagggaaaaaagggaaagaagaaaaaagtaaaggcaaggcaaaaccccagaataagtttgctgcccttgacaacgaagaagaggacaaggaggaggagattattaaggagaaggagcctcccaaacagggcaaagaaaaagccaagaaagccgagcaaggtagtgaggaagagggcgaaggagaagaggaagaggaagaaggcggcgaatccaaagcggatgacccatatgcccaccttagcaaaaaagaaaagaaaaaattgaagaagcagatggaatacgaacgccaggtagcaagcctgaaggccgcaaacgcggcagagaacgatttttcggtgagccaggcagaaatgagctcccgtcaagccatgctggaaaatgctagtgacatcaaacttgagaagttctccatttcagcccatggcaaagagctgttcgttaatgcagacctgtatatcgtggcagggaggcgatatggactggtggggcctaatgggaaaggaaagactacactgctgaaacatatcgctaaccgagctttgtccatcccacctaacatcgatgtcctgctgtgtgagcaagaagttgttgctgatgaaacaccagctgtacaggctgtgctcagggcagataccaaacgcctgaaactgcttgaagaagagagacgcctacagggtcagctagagcagggagacgatactgccgcagagagacttgagaaagtctacgaagaacttcgcgcaacgggggcggccgccgccgaggccaaggcaagaagaatcctggcaggccttgggtttgacccagaaatgcagaaccggcccacacaaaaattctcgggtggctggcgtatgcgcgtgagcctagccagggccctgttcatggaaccgactttactgatgctggacgagccaacaaaccacctggacctgaacgctgtgatttggctcaataactatctgcagggatggaggaagacgttattgattgtgagtcatgaccaaggattcctcgacgacgtgtgcacagacataattcacctcgatgctcaacggctgcattactaccgcggaaactatatgacctttaagaaaatgtatcaacagaagcagaaggagcttcttaagcagtatgaaaaacaggaaaaaaaactcaaggagctgaaggctggcggcaagtcaaccaagcaggcagagaagcagactaaagaggccctgactaggaaacaacaaaaatgtaggcgcaagaaccaagatgaagaatcacaggaggctccagagctgctcaaacgccctaaggaatacactgtgcggtttaccttcccagatccaccacccctgtctccccccgttcttggccttcatggggtgactttcggttatcaggggcagaaaccattgtttaaaaatctagactttggtatcgatatggactcccgaatctgtatcgtgggacctaatggagtgggaaaatcaactctgctgctgctgctgaccggcaaactgaccccaacccatggcgagatgcgcaaaaaccatcgattgaaaatagggttcttcaatcaacagtacgctgagcagctgcggatggaggagacccctaccgagtacctgcaaaggggttttaatctgccctaccaggatgctagaaaatgcctgggcaggttcggtttggaaagccatgcccacacaattcaaatctgcaaactgtccgggggtcaaaaagccagagtagtgttcgcagaactggcttgcagggaaccagacgtactgatactcgacgaaccaactaataatttggacattgagtccattgatgcactgggcgaagctattaatgaatacaagggtgccgttatcgtagtgtcccatgatgcccgcctcattacagagactaactgccaactgtgggttgtggaggaacagtcagtgtctcagatagatggcgacttcgaagactacaagcgcgaagttctggaagctctgggtgaggtgatggtctccagacccagggagtag

SEQ ID NO: 28443 - DNA, 2538 bp, Artificial Sequence
  derived and/or modified sequence
atgcccaaggcccccaagcagcagccccccgagcccgagtggatcggggacggcgagagcaccagcccatctgataaggtagttaaaaaaggcaaaaaagacaagaagataaaaaagaccttctttgaggaactggccgtagaggataaacaggccggcgaagaggaaaaggtcctcaaagagaaggaacagcaacagcaacaacagcagcagcagcagaaaaagaagcgtgatacacgcaagggtaggagaaagaaggacgtggacgatgacggggaggaaaaggaactgatggagcgcctgaagaagctctccgtgcctacttccgatgaggaagatgaggtgccagcccccaaaccacgcggggggaagaagacaaaaggcggcaacgtattcgccgcactcattcaggatcaatccgaagaagaggaggaagaagaaaagcatcccccaaaaccagcgaagcccgaaaaaaatcgaatcaataaagccgtttcagaggagcagcaacccgctttaaaaggcaaaaaaggcaaagaggagaaatcgaaaggcaaggctaaaccccaaaataaattcgccgcgctcgataacgaagaagaggacaaggaggaagagataatcaaagaaaaggaacctcccaagcagggaaaggaaaaggctaaaaaagccgaacagggttcagaggaggaaggcgaaggagaggaggaggaggaggaagggggtgaaagtaaggccgacgacccttatgcacatttatccaagaaagagaaaaaaaagctgaagaagcagatggaatacgagcgtcaggtggcaagcctgaaggcagcaaacgcagcggaaaatgacttcagcgtgagtcaggccgagatgtcttcaaggcaagctatgctcgaaaacgcctccgacattaagctggagaagttttctatcagcgcgcacggaaaggagttgttcgtaaatgccgacctgtatatcgttgctggccgaaggtacgggctggttgggccaaatggaaaggggaaaaccactctgcttaaacatattgccaatagggcactttccatcccacccaacatcgacgtcctgttatgtgagcaggaggtggtagctgacgagactcccgctgtgcaggccgtgttgcgtgccgataccaagcggctcaagttacttgaggaggaaagacggttgcaagggcaactcgagcaaggggacgacacagccgctgaaagactcgaaaaagtgtacgaagaactcagggccaccggagccgctgcagcagaggccaaagcaagaagaattcttgcgggacttggtttcgatcctgagatgcagaatcggcctacccagaagttttcagggggctggcggatgcgagtgtccctcgcaagagccctttttatggaacccactctcttaatgttggatgagccaactaaccacctcgatctcaatgccgttatatggctgaataattatctgcagggatggagaaagacacttctcatcgtctcccacgaccaggggtttctcgacgacgtgtgcacggatatcatccatctggacgctcagcgccttcactactaccgcggtaactacatgacattcaaaaagatgtaccagcaaaagcagaaggagttacttaaacagtacgagaagcaggaaaagaaattgaaggaactgaaggccggggggaagagcacaaaacaagcagagaagcagactaaagaagccctgactaggaagcagcagaaatgtagacgcaagaaccaggacgaggaatcccaggaagccccagagctgctcaagcgacctaaggagtacacagttaggttcacgttcccggatcccccaccactgtctccgcccgtgctcggcttgcatggcgtaacattcggctatcaaggccagaaacccctctttaagaatctcgactttggaatcgacatggatagccgtatttgcatcgtggggcccaatggagttgggaagtcgactctgctcctgcttctcacagggaaattaacccccacccacggagaaatgcggaagaaccacaggctgaaaattggcttcttcaaccaacagtatgccgagcaacttaggatggaagagaccccaactgagtacttgcaaagaggatttaatctcccctatcaagatgctcggaaatgtctagggaggttcgggctggagagccacgcccacacaatccagatctgtaaattaagcggcggacagaaagctcgagtggtgttcgcagagttagcttgcagggagccagacgtcttgatcttggatgaacctacgaataaccttgacattgagtccattgatgcacttggagaggccatcaatgagtacaaaggtgctgttattgtggtttctcacgatgctcgcctcatcacagaaaccaactgtcagctttgggtcgtagaagagcagtctgtgagtcagattgacggtgacttcgaagattataagagggaagtgctggaggccctgggagaggtcatggtatcgaggccaagggagtag

SEQ ID NO: 28444 - DNA, 1602 bp, Artificial Sequence
  derived and/or modified sequence
atgcccaaggcccccaagcagcagccccccgagcccgagtggatcggtgacggggaatccaccagtccatctgataaggtggtgaaaaaagggaaaaaagataaaaaaatcaagaagacctttttcgaagaactagccgtggaagacaagcaggcaggtgaggaagagaaagttctcaaggaaaaagaacagcagcagcagcaacagcagcaacagcagcagaagaagaaacgtgacacccggaaaggcaggcggaaaaaggacgtggacgacgacggggaggagaaggaattaatggagcgattaaagaagctcagcgtacccacctctgatgaagaagatgaggtccctgcccccaagcctagaggcggcaagaagacgaaaggggggaacgtgttcgctgccctgatccaggaccagagtgaggaagaagaagaggaggaaaaacacccgcctaagcccgcaaagccggagaaaaacaggataaataaggcggtatcagaggaacagcagccagctctgaagggcaaaaaaggtaaggaggagaagagcaaaggcaaggcaaaacctcagaataaattcgccgcgctggataacgaagaggaagataaggaagaagaaattatcaaggagaaggaaccccctaagcagggaaaggagaaggccaagaaggccgagcaaggatccgaggaggaaggggaaggagaagaagaggaggaggagggcggcgagagtaaggcagacgacccttacgcacacttatcgaagaaagagaagaagaaattgaagaaacagatggaatatgagagacaagttgcctcactcaaggcggcgaacgcagctgagaacgatttttcggtaagccaggccgagatgagctcgaggcaggccatgctggagaatgcctccgacatcaagcttgagaaattctctatctccgcacatggcaaagagctgtttgtgaatgcagatctctacattgtagccggaagacggtacgggctggtgggccctaacggaaaaggcaagaccaccttactgaaacatatcgccaaccgtgctctcagtatcccaccgaatatagatgtattattgtgcgagcaagaagtggtagcagatgagacccctgcggttcaggcagtgctccgggacgataccgcggccgagagattagagaaggtgtacgaagagctgcgtgccacaggggccgccgctgccgaggcaaaagctcgacgcattctcgccggtttgggctttgaccctgaaatgcagaatcggcctacacagaagttttccggaggctggcggatgcgcgtctcccttgctcgcgcactgtttatggaaccaaccttgttaatgctggatgaacccacgaataaccttgacatcgagtcgatagatgctctgggggaggccatcaatgaatataagggggccgtgatagtggtgagtcacgatgcgcgcctaatcactgaaactaactgccagctctgggtggttgaggaacagagcgtcagccaaattgatggcgattttgaggattacaagcgagaggtcctcgaagccttgggagaagtcatggtgtctaggccgcgagagtag

SEQ ID NO: 28445 - DNA, 1599 bp, Artificial Sequence
  derived and/or modified sequence
atgcccaaggcccccaagcagcagccccccgagcccgagtggatcggtgacggcgaaagcacttctccatccgacaaagtggttaagaaaggaaaaaaggacaaaaagataaaaaaaactttttttgaggagttagccgtcgaggataaacaggctggcgaagaagaaaaagtgctcaaagaaaaggaacagcagcagcaacagcagcagcaacagcagaagaagaagcgagacacgcgcaaaggacgacgaaagaaggatgtggacgacgatggcgaagaaaaagaactgatggaacggttgaaaaagctttccgtccctacctcagatgaagaagacgaggtgcccgcgccaaagccgcgcggaggaaagaaaacaaagggcggaaacgtgttcgccgcactgatacaggatcagtcagaggaagaggaggaagaggaaaaacacccaccaaaaccagccaagccggagaaaaaccgaattaacaaggcagtgtcagaagagcagcaacctgctctgaagggtaagaaaggcaaagaagagaagagcaagggtaaggccaaaccacagaataaatttgctgctctcgacaacgaggaagaggacaaggaagaggagattataaaagaaaaggagcccccgaaacaaggtaaagagaaagcaaaaaaagccgaacagggcagtgaggaggaaggggagggcgaagaagaagaggaagaaggcggggaaagcaaggcagatgatccttacgctcacctgtccaagaaggaaaaaaagaaacttaagaaacagatggagtatgaacggcaagtggccagtcttaaagccgccaacgccgcggaaaacgacttcagcgttagtcaggcagaaatgagttctcggcaagccatgctggaaaatgcttccgacataaagctggaaaagttctctatctcggcacatgggaaggagctttttgtcaatgccgacttatacattgtcgccggaaggaggtatggcctggtgggcccgaatggtaagggcaagacgaccctcctaaaacacattgcaaatagggccctgtctatcccccccaacatcgatgttctattgtgtgagcaggaggtggtagctgatgagaccccagctgtgcaggccgtattgcgagacgatactgcagccgaaaggctggagaaagtgtacgaagaattgagggccactggtgcagctgccgcggaagcaaaagcacggaggatactcgcaggcctggggtttgatcccgagatgcagaatcgaccgacgcagaagttcagtggtgggtggaggatgcgcgtgtcgcttgcaagggcgcttttcatggaaccgaccctgctcatgttggacgagcctacaaacaaccttgacattgaatccatcgacgccctgggtgaagctataaacgagtataagggtgcggtcatcgtggtttcacacgacgccagactcattactgaaaccaactgccagctgtgggttgttgaggagcagagcgtctctcagatagacggtgactttgaggactacaaaagagaagtgctggaggctctgggcgaggtgatggtgtctaggcccagggaatag

SEQ ID NO: 28446 - DNA, 1599 bp, Artificial Sequence
  derived and/or modified sequence
atgcccaaggcccccaagcagcagccccccgagcccgagtggatcggggatggcgaatctactagtccttccgataaggtggtcaaaaaggggaagaaggataagaaaatcaaaaagactttttttgaagaactagccgtggaggataaacaggccggagaagaagaaaaggtgttaaaagagaaggagcagcaacagcagcagcagcaacagcaacagaaaaaaaaaagggacactcgcaagggaagaaggaaaaaggatgtagatgatgacggagaggaaaaagagttgatggaaaggctgaaaaaactctccgtccccacatcggacgaggaggacgaggtgcctgcgccaaagccccggggcggcaagaaaaccaaagggggcaacgtcttcgcggccctgatccaggatcagagcgaggaggaagaagaagaggaaaaacatccgccaaaacctgctaagccagagaagaataggattaataaagccgtgtcagaagaacagcagcccgctctgaaaggcaaaaaagggaaggaagaaaagagcaaaggcaaagcaaaacctcagaataagtttgctgcgcttgataacgaagaggaagataaagaggaagaaatcattaaggagaaggagccacccaagcaaggaaaggagaaggccaagaaggccgaacagggtagtgaagaggagggcgagggcgaagaggaggaagaagagggcggagagagcaaggccgacgatccatatgcacacctcagcaagaaagagaagaagaaacttaagaaacagatggaatatgagcgccaggtcgcatctctgaaagccgcaaacgccgccgaaaacgatttttcagtctcacaggccgaaatgagcagccgtcaggctatgctcgagaatgccagcgacatcaaacttgaaaagttttccatctcagctcacggaaaggagctctttgtgaacgccgatttgtacatcgtggccggacgtcggtacggcctggtaggtcccaacgggaaggggaagactaccctgttaaagcacatagccaacagggccctgagcataccgccaaacatcgacgtactcctttgtgaacaagaagtggtggccgatgagacacccgccgtgcaggcagtactgagagatgatacagcggcggagcgactggaaaaggtgtatgaggaactgagggcaactggcgctgcagcagccgaggcaaaagccagaagaatccttgctggcttgggctttgaccctgagatgcagaatagaccaacccaaaaattcagtgggggctggcggatgcgtgtgtccctcgcaagagccctgttcatggaacccacacttctcatgctggacgagccgacgaacaatctggatatcgagtcgatagatgcactgggagaggccattaacgaatacaagggggctgtgattgttgttagtcacgatgcccggctaattacggaaactaattgccaactgtgggtggttgaagagcagagtgtctcacaaatcgatggagactttgaggattacaagcgggaagtcttggaggccctcggagaagtaatggttagtaggcctcgagaatag

SEQ ID NO: 28447 - DNA, 1599 bp, Artificial Sequence
  derived and/or modified sequence
atgcccaaggcccccaagcagcagccccccgagcccgagtggatcggggatggagagtctaccagtcccagcgataaggttgtgaaaaaaggcaagaaggacaagaagatcaaaaagaccttttttgaagagctggcggtggaggataaacaggctggcgaggaagaaaaggtgctgaaagagaaggaacaacagcagcaacagcagcaacagcagcaaaaaaaaaagagggacaccagaaagggcaggaggaagaaggacgtagacgatgatggcgaagaaaaggaactgatggagagactgaagaagctcagcgtaccaacttctgacgaggaagacgaggtccccgcccccaagcctaggggcggaaagaaaactaaaggcggcaatgtattcgcggcacttatccaggatcaaagtgaagaggaggaggaggaggagaagcaccctcctaaacccgccaagcccgagaagaataggatcaacaaagcggtctcagaagagcagcaaccagccctgaaagggaagaagggaaaggaggagaagagtaaggggaaggctaagccacagaacaagttcgccgctctggataatgaggaggaagacaaagaagaagagatcataaaggagaaagaacccccaaagcagggaaaagagaaggccaagaaggcagagcaagggagcgaagaggagggggaaggagaggaggaggaagaagaagggggcgagtccaaagcggatgacccttacgctcatcttagcaaaaaagagaaaaaaaagctgaaaaaacagatggaatacgagaggcaagtcgcctcattgaaggctgctaacgcagcggagaatgatttctccgtatcccaagccgagatgtctagcaggcaggccatgctcgaaaatgccagcgacattaaactcgaaaaatttagcatctccgcccacgggaaggagctcttcgtaaacgcagatctgtatatcgtggctggtaggaggtatggtcttgtggggcccaacggaaagggtaaaacgacccttcttaaacatatagccaatagggctctcagtatccctccaaacatcgatgtcttgctgtgtgagcaggaagtggtcgccgatgagacgcctgctgttcaggcagtgcttcgcgatgacaccgctgctgagcggctcgagaaggtgtacgaagagctgcgggctactggggccgctgcagcagaggccaaggcaagacgcatcctcgccggcctcggtttcgaccccgaaatgcaaaaccgtcccacacagaagtttagcggtgggtggcgaatgcgcgtgtctcttgctcgggcgctgtttatggaaccgacactgctgatgctcgatgagccaacgaacaacctggatatcgaatccatcgatgccctcggcgaggccataaatgagtataaaggcgcagtcatcgtcgtatcacacgatgccaggctgatcactgagacaaactgccagctatgggtcgtagaagagcagtctgtctcccagatcgatggggactttgaagactacaaaagagaagtgttggaagccctcggggaggtcatggtgtcacggcctagggaatag

SEQ ID NO: 28448 - DNA, 1599 bp, Artificial Sequence
  derived and/or modified sequence
atgcccaaggcccccaagcagcagccccccgagcccgagtggatcggcgatggggagagcaccagcccatccgacaaggtggtcaagaaagggaagaaggacaaaaagatcaaaaagacatttttcgaggagctggctgttgaggacaagcaggctggagaggaagagaaggtgctcaaagagaaagaacagcagcagcaacaacagcaacagcagcagaagaagaaaagagatactcgtaagggccggagaaagaaagatgtggatgacgatggcgaagagaaagaactcatggagaggctgaagaaattgtccgtgcctacatctgacgaggaagacgaggttccggctcctaaacccagaggcgggaagaaaacaaagggaggtaatgtgttcgcagcccttattcaggaccagtcagaagaggaggaggaggaggagaagcaccctcccaagcccgccaagcccgagaagaacaggattaataaggctgtgagtgaggagcagcagccagccctaaagggcaagaaaggcaaggaagaaaagtcaaaaggcaaggcgaagccacagaacaagttcgccgccctggataatgaagaggaggacaaggaagaagaaatcattaaagagaaggagccaccaaaacaggggaaagaaaaagcaaaaaaagcagaacaaggatcggaagaagaaggagaaggggaggaagaggaagaggaagggggggagagcaaagctgacgacccttatgctcatctgtccaaaaaagagaagaaaaaactaaagaaacaaatggagtatgaacgccaagtggcgtcattgaaagccgctaacgctgcggagaatgacttctccgtgagccaggcagagatgtcaagtcgacaagcgatgttggaaaacgcgtccgatattaagttggaaaagtttagcatctccgcccacggcaaagagcttttcgtgaatgcggacttgtacattgtagccgggcggcgttacgggctcgttggacccaatggcaagggcaagaccacactcctgaaacacatcgctaacagggccctgtccattccgccaaatattgacgtgttgctctgtgagcaggaggtggttgctgatgagacccctgccgttcaggccgtgctaagagatgacaccgctgcggagcgtcttgagaaagtgtatgaggagttgagagctacaggcgcggctgccgccgaagcaaaggcaaggaggatactggccggcttgggctttgacccagagatgcaaaaccgaccaacccaaaaattttcgggtgggtggcgaatgagggtgtcactagctcgagcactgtttatggagccgaccctcttaatgctggatgaaccgacaaataatttggatatcgagagtatcgatgccctcggagaggctattaatgaatacaagggcgctgttatcgtagtatctcatgatgcacgactcatcactgagaccaattgtcaactgtgggttgtggaggaacaatctgtcagtcagatcgacggcgacttcgaagattacaagcgggaagtgctggaggctctgggagaggtgatggtctctcgaccaagagagtag

SEQ ID NO: 28449 - DNA, 1602 bp, Artificial Sequence
  derived and/or modified sequence
atgcccaaggcccccaagcagcagccccccgagcccgagtggatcggagatggcgagtccacttcacccagtgataaagtcgtgaagaagggcaagaaagataaaaaaattaaaaagacctttttcgaggaacttgccgtggaggacaaacaggctggagaagaggagaaagtgctgaaggagaaggagcagcagcaacagcagcaacagcagcagcagcagaaaaagaagcgggacacgcggaaaggacgtagaaagaaagacgtggatgatgacggtgaggaaaaggaactgatggagcgactcaagaagttgtccgtgcctacctctgacgaagaagacgaggtcccggctcccaagcctagggggggcaaaaagaccaagggaggtaacgttttcgctgctctgattcaggatcagagtgaagaggaggaggaagaagaaaagcacccacctaagcctgcgaaacctgaaaagaataggatcaacaaggctgtctctgaagagcaacaaccagctttgaaagggaagaaaggtaaagaggagaaatccaaggggaaggccaagcctcagaacaaatttgcagccctggacaatgaggaagaggataaagaagaagaaataatcaaggagaaagaacctcctaagcagggtaaagagaaagctaagaaggcggagcaaggatctgaggaggaaggggagggcgaggaagaagaggaggaggggggcgagtctaaggctgacgacccctatgcccacttgagcaagaaggagaagaagaagcttaagaagcagatggagtatgagcgccaagtcgcgtcccttaaggcggctaacgccgcagaaaacgatttttcagtatcacaggccgagatgtcaagtcggcaggcgatgctggagaatgcaagcgacattaagcttgaaaaattctcaataagtgcccatgggaaggagctgttcgtgaacgccgacctgtatatcgtggccggcagaaggtatggactcgtcggcccaaacggcaaaggtaaaaccacactcctgaaacacattgcaaatagggcgcttagtatccctccaaatattgacgtactactgtgcgagcaggaggtcgtggcagacgagaccccggcggttcaggccgtgttgagagacgatacagcagccgaaaggcttgaaaaggtgtacgaggagttgcgcgcgacaggcgcagccgccgccgaagctaaggcacggcggatactagcagggctgggctttgatccagaaatgcagaatagacccactcaaaagttttctggcggatggcgaatgagagtgtcactggcacgagctctcttcatggaaccaacactcctcatgctggatgagcctacgaacaatcttgatatagaatctattgacgcgctgggcgaggccatcaacgagtacaagggcgccgttatcgtggtgtcccatgacgcccgcttgatcactgaaaccaattgtcaattgtgggtcgtcgaagagcagtcagtcagccagatcgatggtgacttcgaagattacaaacgggaggtcttagaggcccttggagaggtgatggtgagcagaccaagagagtag

SEQ ID NO: 28450 - DNA, 2538 bp, Artificial Sequence
  derived and/or modified sequence
atgcccaaagcgcctaagcagcagccacctgaacccgaatggattggtgatggagagtccaccagccctagtgataaagttgtaaaaaagggtaagaaagacaaaaagattaagaagactttctttgaagagctggccgttgaagataaacaggcaggcgaagaagaaaaagtgttgaaggagaaagagcagcagcagcagcagcagcagcagcagcagaagaagaaaagagacactcgcaaaggtcggagaaagaaagacgtggatgacgatggggaggagaaggaattaatggagcgcctcaaaaagttgagtgttcccactagcgatgaggaagatgaagtgccagcgccaaaacccaggggaggcaaaaaaaccaaaggaggaaacgttttcgctgctcttatccaggatcagagtgaggaagaagaagaggaggaaaagcaccctccaaaacctgctaagcctgagaaaaaccgcattaacaaggcagtctccgaagagcagcaaccagcgctcaaaggcaaaaaaggcaaggaggaaaagagcaagggcaaagccaagccacaaaacaaattcgccgcactcgataatgaggaggaagataaggaagaggaaattatcaaagaaaaagaacctcccaagcaggggaaagaaaaggccaagaaggccgagcaggggtccgaggaagagggtgaaggcgaggaagaggaagaggaagggggtgagagtaaggctgacgacccatacgcccatctctcaaaaaaggagaaaaaaaagctgaaaaaacagatggagtacgagcgacaggtcgcatctctaaaggctgcaaacgcagctgaaaatgacttctccgtcagtcaagccgagatgagcagtcgacaagctatgctggagaatgcatccgacattaaactcgagaagttcagcatcagtgcccatggcaaggagctattcgttaacgccgacctgtacatcgtcgcagggagacgttacgggctggtgggacctaacggaaaaggcaaaaccacacttctgaaacatatcgcgaacagagcgctgtccataccacctaacatagatgttctactgtgcgagcaggaggtggttgcagatgagactccagctgttcaggctgtgttaagggccgacaccaagaggctgaagttgctagaagaggaacggagactgcaaggccagttagagcaaggagacgacaccgctgctgagaggttggaaaaggtgtacgaggaactgcgcgcaaccggggcagccgctgcagaggctaaagcgaggaggatactggctggtctgggttttgatccagagatgcaaaatagacctacccagaaattttctggtggttggcggatgagggtgagtctcgccagggccctattcatggagccaaccctcctcatgctggacgagcctactaaccatctggaccttaacgcagtaatttggctgaacaattatctgcagggctggcgtaagaccctcctaatcgtcagccatgatcaaggttttctagacgacgtctgtacggatattatacacctcgatgcacagcgcctgcactattacagagggaattacatgacttttaagaagatgtatcaacagaaacaaaaggagcttctcaaacagtacgagaagcaggagaagaaactgaaagagctgaaggcagggggaaaaagcaccaagcaggccgagaaacagactaaggaggcccttaccaggaaacagcagaagtgccggcgaaagaaccaggacgaggaaagtcaggaagcccctgagctcttaaagagacccaaggagtacacggttcgcttcactttccctgatccaccacccctaagcccccctgtcctcgggctgcatggagtgacctttggctaccagggacaaaagccactattcaaaaaccttgattttggcatcgatatggactcacggatttgcattgttggcccaaatggcgttggaaaaagcactctgctcctcctgctgactggaaaactcacccctacccacggggagatgcgtaagaaccaccggcttaaaataggcttcttcaaccaacagtacgctgagcagcttagaatggaagagacgcccacagaatacctgcagaggggctttaatctgccatatcaggatgctaggaagtgcctgggacgattcggcctggagtcacacgcacataccatccaaatctgcaaactgagtggcggacagaaagctagggtggtgttcgctgagttggcctgtcgcgaacccgatgttctgattctggatgagccaactaacaacctcgacattgagagcatcgacgcgctgggcgaagccataaatgagtacaagggagcggttatcgtggtgagtcacgatgctcggctgataacagagaccaactgccagctgtgggtggtggaggagcagagcgtctcacagatagatggggactttgaagactataaaagagaggtgttggaggcgctgggcgaggttatggtgtctaggcccagagagtag

SEQ ID NO: 28451 - DNA, 2538 bp, Artificial Sequence
  derived and/or modified sequence
atgccaaaggccccaaagcagcaaccacctgagccggaatggatcggggatggcgaatccacatctccaagcgataaagtcgtgaaaaaaggcaagaaggacaaaaagattaaaaagacttttttcgaggagcttgctgtcgaagacaagcaggctggagaggaagaaaaggttcttaaggagaaagaacagcagcagcagcagcaacagcagcaacagaaaaagaagcgggataccaggaaagggaggcgcaaaaaagatgtggacgatgacggggaagaaaaagagctgatggaaaggctgaaaaagttaagcgttcctacaagcgatgaagaggacgaggtgccagctccaaagcccagaggcggtaaaaaaactaaagggggtaacgtgtttgcagcattgatacaggatcagagcgaagaggaagaagaggaagagaaacatccaccgaaaccggctaagccagagaaaaatagaatcaataaggcagtgagtgaggagcagcagccggcactcaaggggaagaaggggaaggaggagaagagtaaaggaaaagccaagcctcagaataaattcgccgctctcgacaatgaggaggaagacaaggaggaagagatcatcaaggagaaggagcctccgaagcaggggaaagaaaaggcgaaaaaggctgaacagggttccgaggaggagggggagggcgaggaagaggaggaggaaggcggagagagtaaagccgacgacccttacgctcacctatccaagaaagaaaaaaaaaagctgaaaaagcagatggaatatgagcgccaggtcgcatctctgaaggccgcaaacgctgccgagaatgattttagtgtgagtcaggccgagatgtcctcacgacaggctatgctggaaaacgcttccgacattaagctggagaagttctcgatctctgcccatggaaaagagctctttgtcaatgcagacctgtacattgtggccggaaggcggtacgggctcgtagggccaaacggaaaagggaagacgactctgttaaaacatatcgccaatagagccctgtctattcctccaaatattgatgttctgttatgcgagcaggaagtagttgcagacgagacacccgctgttcaggccgtgctgagggccgacaccaaacgcctaaagctgttggaggaagaaagacgtctgcaagggcagcttgagcagggggacgacactgcagcagaacggcttgaaaaagtgtatgaagagctaagggccacgggggctgctgcggctgaagctaaagcacggcgtatactcgctggcctgggtttcgatccagagatgcagaaccgtcccacccagaaattcagcggtggttggcggatgagggtgagcctcgccagagcgctgtttatggaacctacattgctcatgctggatgagcccacaaaccatttggacctaaatgcagtgatctggctgaacaattacctgcagggatggcgcaaaaccctgttgatcgtgagtcacgatcagggatttctcgatgacgtttgcaccgacatcatccacttggacgcacaacggctgcattactatcgtgggaactatatgactttcaagaagatgtaccagcagaaacagaaggagcttttaaaacagtacgagaagcaggagaagaagctgaaggaactgaaagcgggaggaaagtcaacaaaacaggccgagaagcaaactaaagaggccctaacgaggaagcagcaaaagtgtaggaggaagaaccaagacgaggaatctcaggaggcccctgagctgcttaagagacccaaggaatacactgttagatttaccttccctgaccctcccccactgtcgccccctgtgctcggtctgcacggcgtcaccttcggctaccagggtcagaagcctttgttcaaaaaccttgactttgggattgacatggacagcagaatttgcattgtcgggccaaacggggtcggaaaatcaacactcttgcttctgctcactggtaaactgactccaactcatggggaaatgagaaagaaccatcggctgaaaatcgggttttttaaccaacagtacgccgaacagctgcgaatggaggagaccccgactgaatatcttcagagggggtttaacctgccctatcaagacgcaagaaaatgcttgggccgattcggcctggaaagccacgcacacacaatccaaatctgtaaactctctggcggtcaaaaggctagggtcgtcttcgctgaactcgcttgtcgggagccagacgtgctgatactcgatgagcccactaacaatcttgacattgagagtatcgacgccctgggagaggcaatcaatgagtacaagggtgccgtaatcgtcgtgtcacacgacgccaggctcattactgagacgaattgccagctgtgggtggtcgaagagcaaagcgtaagccagatcgatggcgactttgaagactataagcgggaagtgctggaggctctgggcgaagtaatggtgtctcgccctcgggagtag

SEQ ID NO: 28452 - DNA, 1023 bp, Artificial Sequence
  derived and/or modified sequence
atgcccaaggcccctaagcaacagccccctgaacctgagtggattggggatggcgaatcaacgagccccagtgacaaggtggttaagaaggggaagaaggataaaaagatcaagaagaccttctttgaagaattagcggtggaggacaagcaggcaggcgaggaggagaaagtgctcaaggagaaagaacagcagcagcaacaacagcagcagcagcagcagaaaaaaaagcgagacaccaggaaaggcagacgtaaaaaggacgtggatgacgatggcgaagagaaggagctgatggaaaggctgaaaaaactctcagtaccgacctcagacgaggaggatgaggtgcccgcacccaagcccagaggcggaaagaagaccaaggggggaaatgttttcgctgctctgatccaggatcagtcggaagaggaggaggaggaggagaagcacccgccaaaaccagcaaagcccgagaaaaataggatcaacaaggctgtatctgaggagcaacagcctgccctgaaggggaaaaaaggcaaggaagaaaaatccaaggggaaggcgaaaccacaaaataaattcgccgcacttgataacgaggaggaggacaaagaagaagagattatcaaagaaaaagaacccccaaagcagggtaaggaaaaagcaaagaaagcagagcaaggctcagaggaagagggggaaggcgaggaggaggaagaggaaggcggagagtcaaaagccgacgacccatatgcccacttgagcaagaaggagaagaagaaacttaagaagcaaatggagtatgagcggcaggtggcgtcgctgaaagcagccaacgccgcagaaaacgatttttctgtttctcaggccgaaatgagctctcggcaggccatgctggagaacgcgagtgatattaagctggagaagttctccataagtgctcacggcaaggaactctttgtcaacgccgatctgtatatcgtggccggtaggcgttacggcctggttggccctaacggatag

SEQ ID NO: 28453 - DNA, 2538 bp, Artificial Sequence
  derived and/or modified sequence
atgcccaaggcgcctaaacaacagccgcctgagccagagtggattggagacggcgaaagtacctcaccctcggacaaggtggtgaaaaaaggaaagaaggacaagaagattaaaaagacttttttcgaagaactggctgttgaagataagcaggccggtgaagaagagaaggtacttaaggaaaaagaacagcagcagcagcaacagcagcagcaacaaaagaagaaacgcgatacccgtaagggtcgcagaaaaaaggatgtcgacgacgacggtgaagaaaaagagttaatggaacgacttaagaagctcagtgtaccaacctcagacgaagaggatgaagtgcctgcccctaagccaagaggcggtaaaaaaaccaagggcggtaacgtcttcgccgcattgatccaagaccagtctgaggaggaagaggaggaagagaagcacccccctaaaccagctaagcctgaaaagaacaggataaataaggccgtgtcagaagaacaacagcccgcactaaagggcaagaagggcaaggaagagaaatctaaaggaaaggccaagccccagaataaatttgcagcccttgacaacgaggaggaggacaaagaggaggaaatcatcaaagagaaggaacccccaaagcagggcaaggagaaagctaaaaaagcagaacaaggttccgaggaagaaggggagggcgaggaggaggaagaggagggcggtgagagcaaggccgacgacccatatgctcacctctcgaagaaggagaagaagaagcttaagaagcaaatggaatatgagagacaggttgctagcctcaaggctgccaacgcagccgaaaacgacttttctgtcagtcaagctgagatgagtagccgacaagctatgctcgagaatgcttcagatataaagttggaaaagttctctattagcgcccacgggaaagagctttttgtcaacgcagatctgtacatcgtggctggacggcgttacgggctagtcggtcctaacgggaagggcaaaaccactcttctaaagcacattgccaatagggccctgtcgattcctcccaatatcgacgtgctgctctgcgagcaggaggttgtcgctgacgagactccagcagtgcaggccgtcctgcgtgctgacacaaagcggttgaagctcctggaggaagagaggcgcctgcaagggcagctggaacagggcgacgatacggctgctgagagactcgagaaggtatatgaagagctgcgcgctaccggcgctgctgcggcagaggcaaaagcacggaggatcctggccggtctgggtttcgatcctgagatgcaaaaccgtcccacgcagaaattctctggaggctggagaatgagggtgtccctggccagagccttgttcatggaacctactctccttatgctggatgagccaacgaatcacctggatttaaacgctgttatttggttaaacaattacttacaagggtggaggaagaccctgttaattgtgtcacatgatcagggctttttagatgatgtgtgcaccgacatcatccaccttgatgcccagagattgcactattataggggcaactacatgacctttaaaaagatgtaccagcagaagcagaaagagctcctgaaacagtacgagaagcaggagaaaaaactgaaggagttaaaagccggaggaaagagcacaaagcaagcggaaaaacagacaaaggaggcactcactcggaaacagcagaagtgcagacggaaaaaccaggacgaggaatcccaagaagcccctgaactcctgaaacgccctaaggagtacactgtgagattcactttccctgatcctcccccactatctccccctgtgctcgggctccacggcgtgacattcggctaccagggccagaaacctttgtttaaaaatctggactttggaatcgacatggactcccgaatttgcatcgttggaccaaatggtgtcgggaagtctactctgttactgttgctcacagggaaattaacacccacgcacggcgagatgcgcaagaaccatcgactcaaaataggattctttaaccaacaatacgcagaacagcttaggatggaggaaactcccacggagtacctccagcgcggattcaacctgccctaccaggatgctcggaaatgtctcggacggttcggcctcgaatcccatgctcatacaattcagatatgtaaactcagcggcggtcagaaagctcgtgtggtctttgctgagcttgcgtgcagggaacccgacgtgttaatattggatgaaccgacaaacaatctggacattgaatccatcgacgccctgggagaagcaatcaatgaatataagggggctgtgattgtggtcagccatgatgctaggctgatcaccgaaaccaattgtcagctctgggtagtcgaagaacagagcgtgagccaaattgacggagatttcgaagactataagagggaagtgctcgaagccctcggcgaagtcatggtatctcggcctcgtgagtag

SEQ ID NO: 28454 - DNA, 1023 bp, Artificial Sequence
  derived and/or modified sequence
atgcccaaggccccaaagcagcaaccgccagagcccgagtggatcggggatggggaatccacaagcccatccgataaagtcgtgaagaagggaaaaaaagacaaaaaaattaagaagacattttttgaggagctggctgtagaggacaagcaggcgggagaagaagagaaggtgctcaaggaaaaggaacaacagcagcagcagcaacagcaacaacagcagaagaaaaaaagggatactcgcaaaggacggaggaaaaaggacgtggacgacgacggtgaggaaaaggagttaatggagaggctgaagaaattatctgtccctacctccgacgaagaagatgaggtgcccgcaccaaaacctaggggtgggaagaaaaccaaaggcggaaacgtattcgccgctctgattcaggatcagagcgaggaagaagaagaagaagaaaagcaccctcccaagccggctaaacctgagaaaaatcgaatcaacaaggccgtaagtgaagagcagcagcccgcactcaaagggaagaaggggaaggaagagaagagcaagggcaaggccaaaccccagaataagtttgctgcgctcgataacgaagaggaagataaggaggaggagatcattaaggaaaaagaacccccaaaacaggggaaggaaaaggctaagaaggctgaacagggaagcgaagaggagggtgagggcgaagaggaggaggaggaggggggagaatctaaagccgacgatccatacgcccatctctccaagaaggagaagaagaaacttaagaaacagatggagtacgaaaggcaagtcgctagcctgaaggccgctaatgccgctgaaaacgacttttcagtaagtcaggccgagatgagctcgcgtcaggccatgcttgagaatgcgagcgacatcaagttggaaaaatttagtattagtgcgcacgggaaagaactatttgtgaatgctgatctctatatcgtcgccggtcgacgatatggattggttggcccaaatgggtag

SEQ ID NO: 28455 - DNA, 2538 bp, Artificial Sequence
  derived and/or modified sequence
atgcctaaggcaccgaagcaacagcccccagagcctgagtggatcggcgatggagagtcgactagtccctcagacaaagttgtgaagaagggcaagaaggacaaaaaaatcaaaaaaaccttttttgaagagctcgcggtggaagataagcaggcaggagaggaggagaaagtgctgaaagagaaggagcagcagcaacagcagcagcaacagcagcagaagaaaaaaagagacacccgtaaggggaggcgtaaaaaggacgtcgacgacgacggcgaagagaaagagctaatggagaggttgaaaaagctgagtgtaccgacctcagacgaggaggatgaagtgccggcaccgaaacccagagggggaaagaaaactaaggggggtaacgtttttgccgctctgattcaagaccaaagcgaagaggaggaggaagaagaaaagcatcctccgaaacccgctaagcctgaaaagaacaggataaataaggccgtctccgaggagcagcagccagcgctgaagggcaaaaaagggaaagaggagaaaagcaaagggaaggcaaagcctcagaacaagttcgcagcactcgataatgaagaagaagataaggaggaggagatcatcaaggaaaaggaaccccctaagcaagggaaggagaaagccaaaaaggccgagcaggggtccgaggaggaaggggagggcgaagaggaggaggaggagggtggcgaaagcaaggctgacgatccttacgcacacctgagtaagaaggaaaagaagaagctcaagaagcagatggagtacgaaaggcaggttgcctctttgaaggcagccaatgccgctgagaatgacttctccgtgtcacaggccgagatgtcatcgaggcaggccatgcttgaaaatgccagcgatatcaagcttgagaaattctccattagcgcgcatggaaaggagttatttgtaaatgccgatctgtacattgtcgctggaagacgatatggcctggtgggacctaatggcaaggggaaaaccactttgctgaagcatattgccaatcgcgcactctcaatcccaccaaacatagatgtactgttatgcgagcaagaagtagtggctgacgagactcccgcagtgcaggccgttctgagagcggacacaaaaagactcaaactgttggaggaggagcggcgacttcaggggcaactggagcagggtgatgacacggctgctgaacgactggaaaaagtctatgaggagcttcgggctactggggcagctgccgcagaggccaaagcaagacgcatcctcgctgggctgggattcgacccggaaatgcagaataggcccacccaaaaattctctggcggttggcgaatgcgcgtctcgctcgcgagggccttatttatggaaccgaccctcttaatgcttgacgagcccactaatcaccttgacctcaacgctgtcatttggttgaataactacctgcagggctggcgcaagactctgttaatcgtcagccatgatcaggggtttctggatgacgtctgcacagacataattcacctggacgcacaaagactgcactattatcggggaaattatatgacgttcaagaaaatgtaccaacagaaacagaaggagctactaaagcagtacgaaaaacaggagaaaaagctcaaggaacttaaagctggaggcaagtctacaaagcaagctgaaaagcagacaaaggaagcactgacccgaaagcagcaaaaatgccgcaggaaaaaccaggatgaggaaagtcaggaggccccagagcttctgaagcgcccaaaggaatatacagtgcgcttcactttcccggaccccccacccctgtcaccaccagtccttgggctccacggtgtgacctttggctatcaggggcagaagcccctgttcaaaaaccttgattttgggatagacatggattcaagaatatgtatcgtgggcccaaatggggtgggtaaatcgacactactattgctcctgactggaaaactgaccccgacacatggtgaaatgcggaaaaatcacagattgaagatcggtttcttcaatcagcagtacgcagagcagctccggatggaggaaacacccacggagtatctgcaaagagggttcaatctcccttatcaggacgccaggaagtgcttaggtcgcttcggactggaaagtcatgcacacactattcagatctgtaaactttctgggggacagaaggctcgcgttgtgttcgccgaactcgcttgccgagagcccgacgtgctgatccttgacgagccaactaataacctggacattgaaagtattgacgctttgggagaagctatcaacgaatacaagggagctgtgatcgtggtgagtcacgatgctagactgatcaccgaaaccaactgccagctgtgggtggtcgaggaacaatccgtgtcccaaattgacggcgatttcgaggactataagagagaagtgctggaggcgctcggagaggttatggtgtcaaggccgagagaatag

SEQ ID NO: 28456 - DNA, 1023 bp, Artificial Sequence
  derived and/or modified sequence
atgcctaaggctcctaagcagcagccgccagaaccagaatggatcggagacggggagtccacttcaccatctgataaggtggttaagaagggtaagaaggacaagaagattaaaaaaacgttttttgaggagttggctgtggaagataaacaggctggcgaagaggaaaaggtactcaaggaaaaagaacagcagcagcagcagcagcaacagcagcaacagaaaaagaaacgggacaccaggaagggtcgacgcaaaaaagatgttgacgacgatggggaggaaaaagaattgatggagcgattgaaaaaactgagtgttccaacgtcagatgaagaagacgaggtacctgccccaaagcctcgcggaggcaaaaaaactaaaggagggaatgtctttgcagcccttatccaagatcagagcgaggaggaagaggaggaggagaaacaccctccaaaaccagcaaagcccgagaagaatagaatcaacaaagctgtctcggaggaacagcaaccggctctgaaggggaaaaagggaaaagaggagaaatctaagggcaaggcaaaaccacagaacaaattcgcggcactcgacaacgaggaggaagataaggaggaagagatcatcaaggagaaagaacccccaaaacagggcaaggagaaggcaaaaaaggcggagcagggtagcgaggaggagggcgagggcgaagaagaggaagaagaaggcggtgaaagtaaggctgacgatccttacgcacatctgtcaaaaaaggaaaagaagaagctgaagaaacaaatggaatatgagcgccaggtggctagcttgaaagctgccaacgcagctgagaacgacttctccgtttcccaagccgaaatgtcaagcaggcaggccatgctggagaacgcctccgatatcaagcttgaaaagttttccatttccgcgcacggtaaagagctattcgttaacgctgacctgtacattgtggctggtcgtagatacggcctggtgggtcccaatggatag

SEQ ID NO: 28457 - DNA, 2538 bp, Artificial Sequence
  derived and/or modified sequence
atgccgaaggcgccaaaacaacaaccccctgaaccagagtggatcggtgatggcgagtctactagcccaagcgacaaagttgtgaagaagggtaaaaaagataagaagattaaaaaaacattttttgaggaactagccgtggaggataaacaagcaggcgaggaagagaaagttttaaaagaaaaggagcagcagcagcagcaacagcagcaacaacagaagaagaagagagacacccgcaaagggagacgcaaaaaggatgtggatgacgacggtgaggagaaagagctgatggagaggctcaagaagctgtccgttccaacctctgatgaggaggacgaagtgcctgcgccaaagccccgtggcggaaaaaaaacaaaaggaggaaatgttttcgcagccctgatccaggatcagtccgaagaagaggaggaggaggaaaagcatccaccaaagccagccaaacctgagaagaacaggatcaacaaagccgtgtcagaggagcagcaaccggctcttaaaggaaaaaaaggtaaagaagagaaaagcaagggcaaagccaagccccaaaataaattcgccgctcttgataatgaagaggaggataaggaagaggaaattattaaagaaaaagaaccgccaaagcagggaaaagaaaaggccaaaaaagccgagcaaggctctgaagaagagggcgagggtgaggaggaggaagaagagggaggagagtccaaagcggatgatccctatgcccatctttctaagaaggaaaagaagaagctgaagaagcagatggagtatgagaggcaggtggcttctttaaaggctgcaaatgctgcggagaacgacttcagcgtgtcacaggctgagatgagtagtcgacaagctatgttagaaaacgcaagtgacattaagctggagaagttctctatctccgcacacggcaaagaacttttcgtgaacgctgatctttatatcgtggccggtcggaggtacggcctggtcggcccaaacggaaaagggaaaacgacgctcctcaagcacatcgcaaatagagcactgtcaattcctcctaatatcgacgtactgctgtgtgagcaagaggtagtggcagacgaaacgcctgccgtgcaggccgtgttgcgggctgataccaagcggttaaagctgctagaagaagaacgaaggctgcagggacaattggagcagggggacgacaccgccgctgaacggttagagaaggtgtatgaggaactgcgggcaaccggagctgccgcagccgaagccaaagcgaggcgaatcctggcgggactaggttttgatcccgaaatgcagaaccggcctacacaaaagttttctggagggtggaggatgagggtgtctttagctcgggctcttttcatggaacccaccctgttgatgctggacgaacctaccaatcatctcgacttgaatgctgtcatatggctaaacaactatttgcagggctggcggaagacgctgcttatagtgtcgcatgaccagggatttttagatgacgtctgtacagatattattcacctcgacgctcaacgtctgcactactatagaggcaactatatgacgtttaaaaaaatgtatcagcaaaagcagaaggaattgctgaagcagtacgagaaacaggagaaaaaactcaaagagctgaaagctggcggtaaatctacaaagcaggctgaaaagcagaccaaagaggccctgacccgaaagcagcaaaagtgtcgcaggaagaatcaggatgaagagagccaggaggcacccgagttgctgaaacgccctaaggaatacacagtgcgttttacttttcccgatccccctccattaagtccccctgtgttggggctgcacggtgtgacattcggctaccagggtcaaaagcctctattcaagaatttggattttggaattgacatggactccagaatctgcattgtcggtccgaatggcgtggggaaatcgactctcctgctcctgctgactggaaagcttactccaacccatggtgagatgaggaagaaccaccgcctgaagatcgggttttttaaccagcaatacgcggaacaactccgaatggaggaaactcctaccgaatatttacagcgagggtttaacctgccgtaccaggacgcccgaaagtgtctgggcaggttcgggctggagtcccatgctcacaccatccaaatctgcaagctctccggtggacaaaaagctcgagtcgtgtttgctgaacttgcatgccgcgagccggatgtgctgatcttggacgagccaactaataatctggacatagaaagtattgatgctttgggggaagccattaacgagtataaaggggctgttatagttgtgtcccatgacgccagactcatcaccgagacaaactgccagttgtgggtcgtggaagaacagtctgtgtctcagattgatggtgactttgaagattataagagggaggtcctggaggctctgggggaggtaatggtgtctagacctcgagaatag

SEQ ID NO: 28458 - DNA, 1023 bp, Artificial Sequence
  derived and/or modified sequence
atgcctaaggccccaaaacagcagcctcccgagcctgaatggataggtgatggagaatctacttctcccagtgacaaggttgtcaagaagggcaaaaaggataagaagatcaaaaagacatttttcgaagagctggcggtcgaggataaacaggccggagaggaagaaaaggtgctgaaggagaaagaacagcaacagcagcagcaacagcagcaacaacagaagaaaaagcgcgacacacgtaagggcaggagaaagaaagacgtcgatgatgatggagaagagaaagagctgatggagcgcctgaaaaaattgtccgtgcctacaagcgatgaggaggacgaagtaccagcccctaaaccacgcggaggtaagaaaacgaagggcggaaatgtgtttgcggctctcatccaggatcagagtgaagaggaggaagaggaagagaaacacccccctaagccggctaagccagagaagaacagaatcaataaagcggtgagcgaagagcagcagcccgctcttaagggcaagaaaggcaaagaagagaagtccaaaggaaaagctaagccccagaacaaattcgccgctctggataacgaagaagaagacaaggaagaggaaattatcaaggaaaaggagccgccaaagcagggaaaagaaaaggctaagaaagccgagcaggggtctgaggaggagggggagggtgaggaggaggaggaagaagggggagaatccaaagcagacgacccctacgctcatttatccaaaaaggaaaaaaagaagctgaaaaagcagatggaatatgaaagacaggtcgcgtctctcaaggcagccaacgctgcagaaaatgacttctccgtgagccaagccgaaatgtccagccgtcaggctatgctggaaaacgccagcgacattaagctcgagaagtttagtatctctgctcacggaaaagaactattcgtcaatgcggacctctatattgtcgctggacggagatacggactcgttggccctaacggctag

SEQ ID NO: 28459 - DNA, 1023 bp, Artificial Sequence
  derived and/or modified sequence
atgcctaaagctccaaaacaacagccacctgaacccgagtggattggggatggtgagagcacctcaccatccgacaaggtcgtgaaaaagggcaaaaaagataaaaagattaaaaagacgttttttgaggagttggccgttgaggacaaacaggctggagaggaagaaaaggtccttaaagagaaggagcagcagcagcagcagcagcaacagcaacagcagaagaagaagcgcgacacacggaagggtagacgaaagaaggacgtagatgacgatggggaggaaaaggaactcatggagaggttgaaaaagctgtcagtgcctaccagcgacgaggaggacgaggtcccagccccaaagcccagggggggaaaaaagaccaagggcggtaatgtatttgcggcattgatccaggaccagtctgaggaggaggaagaagaagagaaacaccccccaaagccagcaaagcctgagaagaaccggataaacaaagccgtaagcgaagaacagcagccagccttgaagggaaaaaagggcaaggaagagaaatcaaaaggtaaagcgaagccccaaaataagtttgcagcccttgacaacgaggaggaagataaggaagaggagataattaaggagaaggaaccacccaagcagggaaaggagaaagccaagaaggctgagcaaggttccgaggaggagggtgagggcgaggaggaggaggaggaaggaggcgagagcaaagctgatgatccgtatgcacacctgagcaaaaaggaaaagaagaaactgaagaagcaaatggagtatgagagacaggtcgcctcactgaaagccgcaaacgccgctgagaacgatttcagtgttagccaggccgaaatgtctagtagacaggctatgctggagaacgcatctgacattaaactcgaaaagttttcaatctctgcccacggtaaagagctattcgtgaatgccgatctttacatcgtggctggccgaagatacggactggtagggccaaatggatag

SEQ ID NO: 28460 - DNA, 1023 bp, Artificial Sequence
  derived and/or modified sequence
atgccaaaggcccctaaacagcagccccctgagccggaatggattggcgacggcgagtcgacttcccctagcgacaaagtcgtgaaaaaaggcaagaaagacaaaaagattaaaaagacctttttcgaagaactggcagtggaggataagcaggcaggcgaagaagagaaggtactgaaagagaaagaacagcagcagcagcagcagcaacaacagcagcagaagaagaaaagagatacgagaaaagggaggcgcaaaaaggacgtagatgatgacggggaggagaaagaattgatggagcgactgaagaaactgtcagtaccgacctccgacgaggaagacgaagtaccagcccctaagccgagaggaggaaagaaaacgaaaggcggtaacgttttcgctgccttgattcaggatcaatccgaagaggaggaggaggaggaaaagcaccccccaaaacctgctaagcccgaaaagaaccggattaacaaggccgtgtctgaggagcagcagcccgcattgaaaggtaaaaagggaaaagaggagaagagtaaaggaaaggccaagcctcagaacaagttcgccgcactggacaacgaggaggaagataaagaagaagagatcattaaggagaaggagccacctaagcagggcaaagaaaaggcgaagaaggcagagcaggggtccgaggaagagggtgaaggagaggaagaggaggaggagggcggagaatcaaaggctgatgacccctacgcacacttgtcaaagaaggaaaagaagaagctgaaaaagcagatggaatacgaacggcaggtggccagtctcaaggctgccaatgcagccgaaaacgactttagtgtgagccaagccgaaatgagtagtaggcaggcgatgctggagaatgcctcagatattaagctcgagaagttcagcataagcgcccatggaaaggagttattcgtgaatgccgacctctatattgtcgctggaagacgttacggtctggtcgggcctaatggctag

SEQ ID NO: 28461 - DNA, 1023 bp, Artificial Sequence
  derived and/or modified sequence
atgccgaaagctcctaaacagcagccgccagagcccgagtggataggggacggggaatccacatctccaagtgataaggtggtaaagaaggggaagaaagacaaaaagatcaaaaagacctttttcgaagagctggctgtcgaggacaaacaggcgggtgaggaagagaaagttctgaaggagaaggaacagcagcagcagcagcagcagcaacagcaacagaaaaagaagcgggacacaagaaaaggccgtagaaaaaaagacgtggatgacgacggcgaggaaaaagagttaatggagagacttaagaaactgtctgtgcctacaagtgacgaggaggacgaggttcccgcacccaagcctcggggtggcaagaaaactaagggagggaatgtgttcgccgcattgatccaagatcagtccgaggaagaagaagaagaggaaaagcatccacctaagcctgctaaacctgaaaagaatagaattaacaaggcagtgtctgaagagcaacaacctgccttaaaggggaagaagggaaaggaggaaaagagtaagggaaaggctaagcctcagaacaaattcgcagctctcgataatgaggaggaggataaggaggaagaaatcattaaggagaaggaacccccaaaacagggaaaggagaaagctaagaaggccgagcagggcagcgaggaggaaggggaaggcgaagaagaggaagaggagggcggagagtctaaagcagatgacccctacgcccaccttagcaagaaggaaaaaaaaaagctcaaaaagcaaatggagtacgaaagacaggtggcctcgctgaaggctgctaatgcagcggaaaatgacttctccgtctcccaggccgagatgagctcacggcaggcaatgctggagaatgcaagtgatatcaagctagagaaattcagcatctcagctcatggaaaggagctgttcgtgaatgcagatctgtacatcgtcgctggaaggcgctatgggctcgttggacccaacggttag

SEQ ID NO: 28462 - DNA, 1602 bp, Artificial Sequence
  derived and/or modified sequence
atgcccaaagcacccaaacagcagccacccgagcctgagtggattggggacggagagtccaccagtccctccgataaggtcgtgaaaaagggcaagaaggacaaaaagatcaagaaaaccttctttgaagaattggccgtggaggataaacaggccggagaagaggagaaagtgctcaaagaaaaggagcaacagcagcagcagcagcaacaacaacaacagaaaaagaaacgcgatactcgcaaggggaggcgaaagaaggatgttgacgatgatggggaggaaaaagagcttatggagcgtctgaaaaaactgtccgtgccaactagtgacgaggaggacgaggtccctgcgcctaaacccagaggaggtaaaaagacgaaagggggtaacgtgtttgccgctctgattcaggatcagagtgaagaagaagaggaggaggagaagcacccccctaagcccgctaaaccggagaagaaccgaatcaacaaggcggtcagcgaagaacagcagccagctctgaagggcaagaaggggaaagaggaaaagtcaaaaggaaaagctaaaccacagaacaagttcgccgcactcgataacgaggaggaggataaagaggaagaaatcatcaaggagaaagagcccccaaagcaggggaaagaaaaggccaaaaaagctgagcaaggcagcgaagaagaaggcgaaggcgaggaggaagaagaagagggcggagaatctaaggccgatgatccctacgcccacctgtccaagaaagagaaaaaaaagttaaagaaacaaatggagtacgagaggcaggtggccagcttaaaggccgcaaatgctgccgagaatgacttctctgtgagtcaggcagagatgtcttctagacaggccatgcttgagaatgcgagcgacataaaactggaaaaattctctattagtgctcatgggaaagaactctttgtaaatgcagacctctacatagttgccggacgaagatatgggctcgtaggccctaacggcaagggcaaaaccactttgctgaaacacatcgcaaacagagcacttagcatccccccaaatatcgacgttctcctctgcgaacaagaagttgtagctgatgagacccccgctgttcaagccgtcctgagggacgacaccgccgcagagaggcttgaaaaagtctatgaggagctgcgggcaactggcgctgctgcagctgaggcgaaggctaggagaatcttggcaggactaggtttcgacccagagatgcagaatagacctacacagaagttctcagggggttggcgtatgcgggtgagtctggctagggccctgttcatggagccaactttgctgatgctggatgagcccacgaacaatttagacatcgagtctatcgatgctctgggcgaggccatcaacgagtacaagggggctgtgatcgttgtctcacatgacgccagacttatcaccgagactaattgccagctgtgggtggtagaggaacagagtgtgtcacagatcgacggggacttcgaagattacaagagagaggtattagaggccctaggagaagtgatggtcagccggcctagggagtag

SEQ ID NO: 28463 - DNA, 2538 bp, Artificial Sequence
  derived and/or modified sequence
atgccaaaagcgccaaaacagcaaccgcctgagcccgagtggatcggagacggagagagcacctctcccagcgataaagtggtgaaaaaaggcaagaaggacaagaaaatcaagaagacatttttcgaggagctggcagtcgaagacaagcaggctggcgaggaagaaaaggtattaaaagagaaagagcagcagcagcaacagcagcagcagcagcagaagaagaaaagggatacacggaagggccgacgtaagaaggacgtggatgacgatggcgaagaaaaggaactgatggagcggctcaagaagctgtctgtgccaacctcggacgaggaagatgaggttcctgctccaaagccccgtggtggcaagaagacaaaggggggaaatgtttttgcagctctgatccaggaccagtccgaggaggaagaggaggaggaaaaacatccaccgaaaccagctaagccagaaaagaaccgcatcaataaggccgtttccgaggagcagcagccagcccttaaaggtaagaaaggtaaggaagaaaagtccaagggcaaggcgaaaccccagaacaaattcgctgcactggacaatgaagaagaggacaaggaggaggaaatcataaaggagaaggagccgccaaagcagggaaaagaaaaggctaagaaggccgagcaggggagtgaagaggaaggcgagggcgaggaggaagaagaggaagggggagaaagcaaggcagacgacccctatgcccacttgtccaaaaaggaaaaaaaaaagctcaagaaacagatggagtatgaaaggcaggtagccagcctgaaggccgcaaacgctgccgagaacgacttcagcgtaagtcaggctgagatgagcagccgtcaggccatgctcgagaatgctagcgatatcaagctcgaaaagttttccatatccgcacacgggaaggagctttttgtaaatgcagatttatacatcgtagctgggaggaggtacggtctggtaggcccaaatgggaagggaaagaccacactgctaaagcatatcgccaacagggcactcagcattcctccaaacatcgacgtactcctttgcgagcaagaggtggtcgcggatgagactccagctgtgcaggccgtgctgagagctgacacgaagcgccttaagttgctcgaagaagagcggagactgcagggtcagctcgagcagggtgatgacaccgcagccgaaaggctggagaaggtgtacgaggaattgcgggctactggcgcagcagcagctgaggctaaggccagaagaatattggccggtctcggctttgaccccgagatgcagaaccggcctactcaaaagttcagcggaggatggcgaatgagagttagcctggcccgtgcattatttatggagccgaccctactgatgctggacgaacctaccaaccacctggaccttaacgctgttatttggcttaataattatctgcagggctggagaaagacattgctgatagtgagccacgaccagggattcctggatgatgtgtgtactgatatcatccatctcgatgctcagcggttgcattactatagggggaactacatgaccttcaagaaaatgtatcagcagaaacagaaagagctgttgaagcagtatgagaaacaagaaaagaaattgaaggagctgaaggccggaggaaagtctaccaagcaagctgagaaacagaccaaagaagccttgacacggaaacagcaaaaatgccgcaggaagaatcaggatgaagaatctcaagaggccccagagctgctgaagcgtccaaaagagtacaccgtgagattcacatttcccgacccccctcccctctctcctccagtgctgggcctgcacggtgtaacattcggataccaaggacagaagccactgtttaagaacctggactttggcattgatatggatagtagaatatgcatagtgggtcctaacggcgtgggcaaaagcacattgttgctgcttcttaccggaaagttaacacctacgcacggcgaaatgaggaaaaatcacagattaaagatcggatttttcaaccagcaatacgccgagcaactgcggatggaagaaacaccgacggaatacctccagcggggattcaacctcccctatcaggacgcgcgtaaatgtttgggtagatttggcctggagagccatgcacataccatccagatttgtaagttaagcggaggtcagaaggccagggtcgtgttcgccgagctggcgtgccgtgaaccagacgtcctgatcctcgatgagcctactaacaacctggatattgaaagcattgatgctctgggggaggcgatcaacgaatataagggggcagttatcgtagtgagtcacgacgctaggcttatcacagaaactaattgccagctatgggtggtcgaagagcagtccgtgtcacaaatcgacggcgacttcgaggactataagcgcgaggtcctggaggccctaggggaggttatggtttctcgcccaagagagtag

SEQ ID NO: 28464 - DNA, 2538 bp, Artificial Sequence
  derived and/or modified sequence
atgccaaaggcccctaagcagcagcctcctgaaccagagtggataggtgatggcgagagcacctccccttctgacaaagtggttaagaagggcaaaaaagataagaaaattaagaagaccttttttgaagaactggccgtggaggacaaacaggcaggcgaagaggaaaaggtcctaaaggagaaagagcaacagcaacaacaacagcaacagcagcaaaagaagaagagagacactcggaaaggcaggagaaagaaagacgtagacgatgacggagaagaaaaggaacttatggagcggcttaaaaaacttagtgtgccaacgagtgacgaggaggatgaagttccagctccaaaacctaggggcggtaaaaaaaccaaaggcggtaatgtattcgctgccctgattcaggaccagtcagaagaagaagaagaagaagagaagcaccctcccaagcctgccaagcccgagaaaaaccggattaacaaggccgtgagcgaagaacaacaacctgcacttaagggaaagaagggcaaagaagaaaagtcgaaaggcaaggcgaagccccagaacaaattcgccgctctcgacaatgaggaggaggacaaagaggaggagatcatcaaagagaaagagcccccaaagcaggggaaggagaaagcaaagaaagctgagcaaggctccgaggaggagggtgaaggagaagaagaggaagaggagggaggcgagtccaaggctgacgatccttacgcccatctttcaaagaaagagaagaagaaactgaagaaacagatggaatacgagaggcaggtggcatctttgaaagcggctaacgccgctgaaaacgacttttctgtatcgcaggccgagatgagtagccggcaggcaatgctggagaatgcgtccgatataaaactggagaagttctctatctccgcccacggcaaggagttattcgttaacgccgatttgtatatcgtcgctggcaggcggtatgggctcgtgggtcctaatggaaaaggaaagactacgctgcttaaacacatcgctaatagggcgctgagcattccaccaaatatcgatgtgttgctgtgcgaacaggaggtcgtggccgacgagacacccgcagtccaagccgtgctccgagctgacaccaagagactgaagctcctggaggaagagaggagactacaaggacagctggaacaaggtgatgataccgccgctgaacgcttagaaaaggtatacgaagagcttagagccaccggcgctgcggcagctgaggctaaagctagacggattctggctgggctggggttcgatccggaaatgcagaaccgcccaactcagaagttcagcggcggatggcgaatgcgggtgagtttagccagagctctcttcatggagccaacactgctgatgctggatgaacctaccaaccatctggacctcaatgctgtgatttggcttaataattaccttcaaggatggcgaaagaccttgttaatcgtgtcacacgaccagggcttcctagacgacgtctgtactgatattatacatctggacgcccaacggctccactattatcgcggtaattacatgacctttaagaagatgtatcagcaaaagcagaaagagttactcaaacagtacgaaaaacaggaaaagaaactgaaggaactcaaggccggtggcaagagtactaagcaggctgaaaagcaaactaaagaggccttgactaggaaacagcaaaagtgccgccgtaaaaaccaagacgaagaatctcaggaagcgcctgaactgctgaaacgacctaaagagtacaccgttcgatttacctttcccgatcctcctcctctgagcccacccgtgctgggactgcacggggtgactttcggataccaaggacaaaagcctctctttaaaaacctggactttggaattgatatggactctagaatctgtatcgtgggcccaaacggggtcggcaagagcacattgctgttactgctcacaggaaagctgactccgacccatggtgagatgcgcaagaaccatagattgaagattggattcttcaatcaacagtacgcagagcagctgagaatggaagaaactcctaccgagtaccttcagaggggtttcaacttgccttaccaggatgcacgtaaatgtctaggacgcttcggactcgagtcacatgcccacacaatacagatctgcaaactctcagggggtcagaaagcgagggtcgtttttgcggaactggcatgtcgggagcctgatgtgctcattctggacgagcccaccaataatctcgacatcgagtcaattgacgctctgggagaggcaattaacgagtacaagggagctgtgatcgtcgtgagtcatgatgccaggctgattactgagactaattgccaactctgggtggtggaggagcagtccgtcagccagattgatggagacttcgaagactataagcgcgaggttctggaagcattaggcgaagtcatggtgtcaagaccgagggagtag

SEQ ID NO: 28465 - DNA, 1602 bp, Artificial Sequence
  derived and/or modified sequence
atgcccaaagctcctaaacaacagccccctgaacctgaatggatcggggacggcgaatccacttcgccttctgataaggttgttaagaaaggtaagaaggacaagaaaattaaaaagacttttttcgaggaactggccgtagaggataagcaagccggagaggaagaaaaagtcctcaaagagaaagagcagcagcagcagcagcagcagcagcagcagcagaaaaaaaagcgcgatactcggaagggacgccgaaagaaggatgtagatgacgatggggaggagaaggagctgatggaacggctaaaaaagttatccgtcccaacctccgacgaggaggacgaggttccggctcctaaaccgagaggcggtaagaaaactaaaggtggaaatgtgttcgccgctcttattcaggaccagtctgaagaggaggaagaggaagaaaaacatccaccgaagccagccaagccggaaaagaacagaatcaacaaggcggtatccgaagagcagcaaccagcattgaagggcaagaagggcaaggaggagaaatcaaaggggaaagccaaaccccaaaacaagtttgccgctctcgacaacgaagaagaggataaagaggaggaaattatcaaggaaaaagagccgccaaagcaaggaaaagagaaggccaaaaaagctgagcagggctctgaagaggaaggtgaaggcgaagaagaagaggaagagggcggagagagtaaggctgacgacccctacgctcatttatctaagaaggaaaagaagaaacttaagaaacagatggaatacgaacgccaagtggcttcattgaaggccgctaacgctgccgagaacgacttctcagtatcccaggcagagatgagcagtagacaggcaatgctggagaacgcttctgacattaaactggagaagttttctatctccgcccacggtaaagagctgttcgtcaatgcagatttgtacatagttgcgggacgacgatacggtcttgtgggtcctaacgggaagggcaaaactaccctgcttaagcatattgcgaatcgtgccctcagtatccctcctaatatcgacgtcttgctgtgcgaacaggaggtggtggctgatgaaacccccgcagtccaggccgtgttgcgcgatgatacagctgccgagagactggaaaaggtttatgaggagcttcgagctaccggcgcagcggctgcggaggccaaagcccgtaggatactggctggccttggcttcgatccggagatgcagaatagacctactcaaaagttttcagggggatggcggatgagagtgtccctggctagagccctatttatggaacctaccttactcatgctggacgagcccactaacaatctcgatatcgaatccatcgacgcgctcggagaggcaataaacgagtacaagggcgctgtcatagtggtgtctcatgatgccagactgatcaccgaaactaactgccagttatgggtggttgaggagcagtcggtgtcacagattgatggcgattttgaagactacaaaagggaggtactagaagccctgggggaagtgatggtctcacgtccacgggaatag

SEQ ID NO: 28466 - DNA, 1599 bp, Artificial Sequence
  derived and/or modified sequence
atgcccaaagcaccaaagcagcagcctccagagcccgaatggattggtgacggtgaaagcacttccccgtctgacaaggtggtgaagaaaggaaagaaagataagaagataaagaagaccttttttgaggaacttgccgtggaggacaaacaagccggtgaagaggagaaggtgttgaaagaaaaggagcaacaacagcagcagcagcagcagcaacagaaaaagaagagagacacacggaagggcaggcgtaaaaaggacgtggatgacgatggagaagagaaagaactcatggaacgccttaagaagctttccgtgccgacgtctgatgaagaggatgaggtgccggcaccaaagcccagaggcggaaaaaagaccaagggtgggaacgtcttcgctgctctaatacaggaccagtcagaggaggaggaggaagaagaaaagcatcctccaaaacccgctaagccagagaaaaatcgcattaacaaagcagtctcagaggaacaacagcctgcacttaaagggaaaaaagggaaggaggagaaaagcaagggcaaagctaagcctcagaacaagttcgccgcactggacaacgaggaagaggacaaggaagaggaaatcatcaaagaaaaagagccgccaaagcagggcaaagagaaggccaagaaggccgagcaagggagtgaagaggagggagaaggcgaagaagaggaggaggaaggcggagagagcaaggcagatgacccatacgcccatctctcaaagaaagaaaaaaaaaagctcaagaagcagatggagtacgagcgccaggtagctagcctgaaagcagcgaacgcagctgagaatgactttagtgtgtctcaggctgaaatgtcctctcggcaagctatgctggagaatgccagcgatattaagttggagaagttcagcatttccgcgcatggaaaggagctgtttgtaaacgcagacctatacatagtggccggacgtagatatggccttgttggtccaaacggcaagggtaagaccacactcctcaaacacattgcaaacagagccctgtcgattcctcccaatatcgatgtgctcctctgcgaacaagaagttgtcgccgatgagacaccggctgtgcaggccgtgctaagagacgataccgcagcagagcgccttgagaaagtctatgaagagcttagagccaccggggctgccgcagcagaagcaaaggccaggcgaattctcgctgggctgggcttcgatccagagatgcagaatcgacccactcagaagtttagcggcggatggaggatgcgagtgtcgctcgccagggccctttttatggagcccacactcttgatgttggatgaacccacgaacaatttggatattgaatccatcgacgcactcggagaggccatcaacgagtacaaaggcgcagtgatcgtcgtcagtcacgatgcgagactgatcactgagaccaactgtcaactgtgggtagtggaggaacagtccgtctcccagattgacggggattttgaggattataagcgagaggtccttgaggccctgggcgaggtaatggtgagtcggccaagggagtag

SEQ ID NO: 28467 - DNA, 1599 bp, Artificial Sequence
  derived and/or modified sequence
atgcccaaggcacctaagcagcaaccccctgagccagagtggataggagacggtgagtccacctctccaagcgataaggtagtgaagaaggggaagaaggataagaaaattaaaaagacctttttcgaggagctggccgtcgaagataaacaggctggcgaggaggaaaaagtgctgaaggagaaagaacagcagcaacagcaacaacagcagcagcagaaaaaaaagcgcgacaccagaaaagggagacgaaagaaagacgtcgatgacgacggagaggagaaggaattgatggagaggctgaagaaactgagcgtgcctacctctgacgaggaagatgaggtccctgcgcctaagcctcgagggggaaaaaagactaagggcggtaatgtctttgcagcactgatccaagatcagtccgaagaggaagaggaagaagagaagcatcccccaaagcccgctaagcctgagaaaaatcgaatcaacaaagcagttagcgaagagcagcaacccgctctcaagggtaaaaaagggaaggaagagaagagtaaggggaaagctaaaccccagaacaagttcgccgcacttgataacgaggaggaggacaaggaggaagagatcattaaagaaaaggaaccccctaagcagggcaaagagaaggcaaagaaagcggagcagggatccgaggaagaaggagagggagaggaggaagaggaggaaggaggggaaagcaaagcggacgacccgtacgcgcatttaagcaaaaaggagaagaagaaattgaagaaacagatggagtatgaaaggcaggtggcctcccttaaggccgcaaatgctgccgagaacgacttttctgtctctcaggcagaaatgtcatcccgacaggcgatgctggagaacgccagcgatatcaagctggaaaagttcagcatttctgcccacgggaaggaattattcgtgaacgctgacttatatatcgtcgcagggagacgctatggtctcgtaggccctaacgggaaaggtaaaacaaccttgcttaagcatattgctaacagggccctgtctatacccccaaacatagacgttctgctctgtgagcaggaggtggtcgcagatgagactcctgccgtgcaagcagtacttagggatgacacagcggctgagagactcgagaaggtgtatgaagagcttagggccacaggcgcagccgcagctgaagctaaggccaggcggattcttgccggtctggggtttgatcccgagatgcagaaccgtcctactcagaaattttccgggggatggaggatgcgggtttctcttgccagggccctgttcatggagcccacgctattaatgctcgacgaacctaccaataatctcgacattgaatccatcgacgcactgggggaagctatcaatgaatacaagggggcagtcatcgtagtgtctcacgatgctagactcataaccgagaccaattgccagctttgggttgtcgaagagcaaagcgtatctcagatcgacggagacttcgaagattacaagagagaagtactcgaggcccttggcgaagtgatggtaagcagacctagagaatag

SEQ ID NO: 28468 - DNA, 1599 bp, Artificial Sequence
  derived and/or modified sequence
atgcctaaagctccaaagcagcaaccacctgaacccgagtggattggtgacggcgaaagcacctccccatctgacaaggtggtcaagaaagggaagaaggacaaaaagatcaaaaagacctttttcgaggaactggccgttgaggataagcaagcgggtgaggaggaaaaagtcctgaaagaaaaagagcagcagcagcagcaacagcagcagcaacagaaaaagaaacgcgacactcggaaagggaggagaaagaaagatgtggacgatgacggcgaggaaaaggaactgatggagaggttaaagaagttgagcgtacccacgagcgatgaggaggacgaggtgccggcacctaaacctagaggcggaaaaaaaacaaaggggggaaatgtgttcgcagcgttgatccaggatcaaagcgaagaagaggaggaggaggagaaacatcccccaaagccagccaaacctgagaagaatcgcataaacaaagctgtgagcgaggaacagcagccagccctgaagggcaagaagggcaaggaggaaaagtccaaaggaaaggccaaaccccagaataagtttgcagccctggataatgaggaggaggacaaagaggaggagataatcaaagagaaagaaccgccaaagcaaggaaaggaaaaagccaagaaggcagagcaggggtccgaggaggagggagagggagaggaggaggaggaggaaggaggcgaatctaaagccgacgatccgtacgctcacctgagtaagaaggaaaagaagaagctgaaaaaacagatggaatatgaacggcaggtcgcttccttgaaggccgcaaacgccgctgagaatgacttctctgtctcacaggccgagatgtctagcaggcaggcaatgctggaaaatgcatccgacatcaaacttgagaagttttccattagtgcccacggaaaagagctcttcgttaatgctgacctatatatcgtggccggtaggcggtacggcctggtgggacctaacggcaaagggaaaacgacactcctcaagcatatcgcaaaccgggcattgagcatcccccctaatatcgacgttcttctctgtgaacaggaggtggtggcagacgagacccccgctgtccaggccgtactgcgggatgataccgctgcagagcgactcgagaaggtatatgaggaactcagagctacaggcgcagctgctgcagaggctaaggccagacggattttggctggcctgggctttgaccctgagatgcagaacaggcccacacaaaagtttagtggcggatggcgaatgagggtgagcctcgctagggcactgtttatggagcccacccttctcatgctggacgagcctactaataacctggatatcgaatccatcgatgctttgggagaggccattaatgagtataaaggagcagttatcgtggtctcgcacgacgcacgcctcatcactgaaactaactgtcagctttgggtcgtcgaagagcagagcgtaagccagattgatggggacttcgaggactacaagagagaagtgcttgaagcactgggagaagtgatggttagtcggccaagagagtag

SEQ ID NO: 28469 - DNA, 1599 bp, Artificial Sequence
  derived and/or modified sequence
atgcccaaagcccctaagcaacagcccccagagcctgagtggatcggagacggagagagtacaagtccatccgataaggtggttaaaaagggcaaaaaagataagaagataaaaaagacttttttcgaggaactggccgtcgaggataagcaagccggagaagaggagaaggtgcttaaagagaaggaacagcagcaacagcagcaacagcagcagcagaaaaagaaacgcgacacccggaaaggcaggagaaaaaaggacgtagacgatgacggtgaagaaaaggagctaatggaaaggctgaagaagctcagtgtgcctacctcagacgaagaggacgaggtgcccgctcccaagccacgaggcggaaaaaagaccaaagggggaaacgtgttcgcagcattaatacaagatcagtcagaggaggaggaggaagaggaaaaacatccacccaagcccgctaaacctgagaagaaccggataaataaggccgtttctgaagagcaacagccagcgctgaaggggaaaaaaggtaaggaagaaaaatcgaaaggtaaggccaaaccccagaacaagtttgccgctctggacaacgaggaggaagataaagaggaagagatcattaaggaaaaggagcctccaaaacaggggaaagagaaggccaaaaaagccgaacaaggcagtgaggaggagggtgaaggtgaagaagaagaggaggaaggaggggaaagtaaagccgacgatccttatgcccatctgagtaagaaggaaaaaaaaaaactgaaaaagcagatggaatacgaacggcaggtggcctcgctgaaggcggctaatgccgcagagaacgatttctccgtgagccaggccgagatgtcaagtaggcaggccatgttggaaaacgctagtgacatcaaactcgaaaagttctccatttccgcgcatggtaaggagttgtttgtgaatgcagacctatacatcgtcgccggtcggcgatacggactggtgggaccaaacggaaaagggaagaccactctgctgaagcacatcgctaacagggccctgagtattccacccaacattgatgtgctgctgtgcgaacaggaggtagtagctgacgaaacacccgctgttcaggccgtactgagagatgatacagctgctgaacggctagaaaaagtctatgaggagctacgagccaccggagccgctgcagccgaggcaaaggcgagaaggattctagcaggattagggttcgatccagagatgcagaatagaccaacccagaagttttccggcggatggaggatgcgagtaagccttgctagggccctgttcatggaacccaccctgctgatgctggatgagcctacaaacaatctcgacattgagagtattgacgccctgggggaagccatcaacgaatacaaaggcgctgtcatcgtcgttagccacgacgccagactcattaccgagaccaactgccagctgtgggtggtagaggaacaatccgtgtcacagatagacggggatttcgaggactataagagggaggttttggaagcactgggagaagttatggtgagcagaccgagagaatag

SEQ ID NO: 28470 - DNA, 1602 bp, Artificial Sequence
  derived and/or modified sequence
atgcccaaggccccaaagcaacaacctcctgagccagagtggatcggggatggagagtctaccagtccatctgataaggttgtgaagaaggggaaaaaggataaaaagataaagaaaaccttcttcgaagaactggccgtggaggataagcaagcgggagaagaggaaaaagtgcttaaggaaaaagagcagcagcagcagcaacaacagcagcaacagcagaagaagaagagggatactcggaaaggaaggaggaagaaagatgtggatgatgacggagaagagaaagaactaatggaaagactgaagaaattgtccgttcccacgtctgacgaagaagacgaggtgcccgctccgaagccgaggggaggcaagaagacaaagggcggaaatgtcttcgctgctcttattcaggaccagtcagaagaagaagaagaggaagagaagcacccacctaaaccagctaaaccagaaaaaaacagaatcaacaaggcggtctcagaggaacagcagcccgcattgaagggaaagaagggcaaggaggagaagagtaaaggaaaagccaagccacagaataagtttgccgcactcgataacgaagaggaggataaggaggaagagattataaaggagaaagagcctccgaaacagggcaaagagaaggcaaagaaggccgaacagggctcggaagaggaaggcgaaggtgaggaagaggaggaagagggcggagaatctaaggccgacgatccttacgcccacctgagtaagaaggaaaagaagaaacttaagaagcagatggagtacgaaaggcaagtcgcatctctgaaagccgctaacgctgccgagaatgacttttccgtgtcacaagccgaaatgtcctcgcggcaggccatgcttgagaacgcctcagatattaagctggagaaatttagcatctccgcccatggcaaggaactgtttgtgaacgcggacctttacatcgtagccggaaggaggtacgggctggtcggtcccaacgggaagggcaagactactctcctgaaacacatcgcgaatcgtgccctgagcataccacccaatattgatgtgctgctatgcgaacaagaagtggttgccgacgaaactcctgccgttcaggcagtccttcgcgatgataccgccgcagaaaggctggagaaagtgtacgaggaactacgcgctaccggtgctgctgccgcagaagcaaaagccaggcggatcctggctggcctgggatttgaccccgaaatgcagaatagacccactcagaaattcagtggaggatggcgtatgcgggtgtctctggccagagctttgttcatggagcctacgttactaatgttggatgaaccaaccaataaccttgacatagagtccatcgacgccttgggagaagccatcaatgaatacaagggcgcagtgatcgtagtatcccacgacgccaggctaatcacagaaactaattgccagctgtgggtggtcgaggagcagtctgtctcccagatagacggggactttgaggattacaagcgcgaggttcttgaagctctaggtgaagtgatggtgtcccgccctcgagagtag

SEQ ID NO: 28471 - DNA, 3481 bp, Artificial Sequence
  derived and/or modified sequence
cgggggcggggttggccgcgccagcttggagagccagccccatcggggttccccgccgccggaagcggaaatagcaccgggcgccgccacagtagctgtaactgccaccgcgatgccgaaggcgcccaagcagcagccgccggagcccgagtggatcggggacggagagagcacgagcccatcagacaaagtggtgaagaaagggaagaaggacaagaagatcaaaaaaacgttctttgaagagctggcagtagaagataaacaggctggggaagaagagaaagtgctcaaggagaaggagcagcagcagcagcaacagcaacagcagcaaaaaaaaaagcgagatacccgaaaaggcaggcggaagaaggatgtggatgatgatggagaagagaaagagctcatggagcgtcttaagaagctctcagtgccaaccagtgatgaggaggatgaagtacccgccccaaaaccccgcggagggaagaaaaccaagggtggtaatgtttttgcagccctgattcaggatcagagtgaggaagaggaggaggaagaaaaacatcctcctaagcctgccaagccggagaagaatcggatcaataaggccgtatctgaggaacagcagcctgcactcaagggcaaaaagggaaaggaagagaagtcaaaagggaaggctaagcctcaaaataaattcgctgctctggacaatgaagaggaggataaagaagaagaaattataaaggaaaaggagcctcccaaacaagggaaggagaaggccaagaaggcagagcagggttcagaggaagaaggagaaggggaagaagaggaggaggaaggaggagagtctaaggcagatgatccctatgctcatcttagcaaaaaggagaagaaaaagctgaaaaaacagatggagtatgagcgccaagtggcttcattaaaagcagccaatgcagctgaaaatgacttctccgtgtcccaggcggagatgtcctcccgccaagccatgttagaaaatgcatctgacatcaagctggagaagttcagcatctccgctcatggcaaggagctgttcgtcaatgcagacctgtacattgtagccggccgccgctacgggctggtaggacccaatggcaagggcaagaccacactcctcaagcacattgccaaccgagccctgagcatccctcccaacattgatgtgttgctgtgtgagcaggaggtggtagcagatgagacaccagcagtccaggctgttcttcgagctgacaccaagcgattgaagctgctggaagaggagcggcggcttcagggacagctggaacaaggggatgacacagctgctgagaggctagagaaggtgtatgaggaattgcgggccactggggcggcagctgcagaggccaaagcacggcggatcctggctggcctgggctttgaccctgaaatgcagaatcgacccacacagaagttctcagggggctggcgcatgcgtgtctccctggccagggcactgttcatggagcccacactgctgatgctggatgagcccaccaaccacctggacctcaacgctgtcatctggcttaataactacctccagggctggcggaagaccttgctgatcgtctcccatgaccagggcttcttggatgatgtctgcactgatatcatccacctcgatgcccagcggctccactactataggggcaattacatgaccttcaaaaagatgtaccagcagaagcagaaagaactgctgaaacagtatgagaagcaagagaaaaagctgaaggagctgaaggcaggcgggaagtccaccaagcaggcggaaaaacaaacgaaggaagccctgactcggaagcagcagaaatgccgacggaaaaaccaagatgaggaatcccaggaggcccctgagctcctgaagcgccctaaggagtacactgtgcgcttcacttttccagaccccccaccactcagccctccagtgctgggtctgcatggtgtgacattcggctaccagggacagaaaccactctttaagaacttggattttggcatcgacatggattcaaggatttgcattgtgggccctaatggtgtggggaagagtacgctactcctgctgctgactggcaagctgacaccgacccatggggaaatgagaaagaaccaccggctgaaaattggcttcttcaaccagcagtatgcagagcagctgcgcatggaggagacgcccactgagtacctgcagcggggcttcaacctgccctaccaggatgcccgcaagtgcctgggccgcttcggcctggagagtcacgcccacaccatccagatctgcaaactctctggtggtcagaaggcgcgagttgtgtttgctgagctggcctgtcgggaacctgatgtcctcatcttggacgagccaaccaataacctggacatagagtctattgatgctctaggggaggccatcaatgaatacaagggtgctgtgatcgttgtcagccatgatgcccgactcatcacagaaaccaattgccagctgtgggtggtggaggagcagagtgttagccaaatcgatggtgactttgaagactacaagcgggaggtgttggaggccctgggtgaagtcatggtcagccggccccgagagtgagctttccttcccagaagtctcccgagagacatatttgtgtggcctagaagtcctctgtggtctcccctcctctgaagactgcctctggcctgcagctgacctggcaaccattcaggcacatgaaggtggagtgtgaccttgatgtgaccgggatcccactctgattgcatccatttctctgaaagacttgtttgttctgcttctcttcatataactgagctggccttatccttggcatccccctaaacaaacaagaggtgaccaccttattgtgaggttccatccagccaagtttatgtggcctattgtctcaggactctcatcactcagaagcctgcctctgatttaccctacagcttcaggcccagctgccccccagtctttgggtggtgctgttcttttctggtggatttaatgctgactcactggtacaaacagctgttgaagctcagagctggaggtgagcttctgaggcctttgccattatccagcccaagatttggtgcctgcagcctcttgtctggttgaggacttggggcaggaaaggaatgctgctgaacttgaatttccctttacaaggggaagaaataaaggaaaggagttgctgccgacctgtcactgtttggagattgatgggagttggaactgttctcagtcttgatttgctttattcagttttctagcagcttttaatagtcccctcttccccactaaatggatcttgtttgcagtcttgctgacagtgtttgctgtttaaggatcataggattcctttcccccaacccttcacgcaaggaaaaagcaaagtgattcataccttctatcttggaa

SEQ ID NO: 28472 - DNA, 3381 bp, Artificial Sequence
  derived and/or modified sequence
cgggggcggggttggccgcgccagcttggagagccagccccatcggggttccccgccgccggaagcggaaatagcaccgggcgccgccacagtagctgtaactgccaccgcgatgccgaaggcgcccaagcagcagccgccggagcccgagtggatcggggacggagagagcacgagcccatcagacaaagtggtgaagaaagggaagaaggacaagaagatcaaaaaaacgttctttgaagagctggcagtagaagataaacaggctggggaagaagagaaagtgctcaaggagaaggagcagcagcagcagcaacagcaacagcagcaaaaaaaaaagcgagatacccgaaaaggcaggcggaagaaggatgtggatgatgatggagaagagaaagagctcatggagcgtcttaagaagctctcagtgccaaccagtgatgaggaggatgaagtacccgccccaaaaccccgcggagggaagaaaaccaagggtggtaatgtttttgcagccctgattcaggatcagagtgaggaagaggaggaggaagaaaaacatcctcctaagcctgccaagccggagaagaatcggatcaataaggccgtatctgaggaacagcagcctgcactcaagggcaaaaagggaaaggaagagaagtcaaaagggaaggctaagcctcaaaataaattcgctgctctggacaatgaagaggaggataaagaagaagaaattataaaggaaaaggagcctcccaaacaagggaaggagaaggccaagaaggcagagcagggttcagaggaagaaggagaaggggaagaagaggaggaggaaggaggagagtctaaggcagatgatccctatgctcatcttagcaaaaaggagaagaaaaagctgaaaaaacagatggagtatgagcgccaagtggcttcattaaaagcagccaatgcagctgaaaatgacttctccgtgtcccaggcggagatgtcctcccgccaagccatgttagaaaatgcatctgacatcaagctggagaagttcagcatctccgctcatggcaaggagctgttcgtcaatgcagacctgtacattgtagccggccgccgctacgggctggtaggacccaatggcaagggcaagaccacactcctcaagcacattgccaaccgagccctgagcatccctcccaacattgatgtgttgctgtgtgagcaggaggtggtagcagatgagacaccagcagtccaggctgttcttcgagctgacaccaagcgattgaagctgctggaagaggagcggcggcttcagggacagctggaacaaggggatgacacagctgctgagaggctagagaaggtgtatgaggaattgcgggccactggggcggcagctgcagaggccaaagcacggcggatcctggctggcctgggctttgaccctgaaatgcagaatcgacccacacagaagttctcagggggctggcgcatgcgtgtctccctggccagggcactgttcatggagcccacactgctgatgctggatgagcccaccaaccacctggacctcaacgctgtcatctggcttaataactacctccagggctggcggaagaccttgctgatcgtctcccatgaccagggcttcttggatgatgtctgcactgatatcatccacctcgatgcccagcggctccactactataggggcaattacatgaccttcaaaaagatgtaccagcagaagcagaaagaactgctgaaacagtatgagaagcaagagaaaaagctgaaggagctgaaggcaggcgggaagtccaccaagcaggcggaaaaacaaacgaaggaagccctgactcggaagcagcagaaatgccgacggaaaaaccaagatgaggaatcccaggaggcccctgagctcctgaagcgccctaaggagtacactgtgcgcttcacttttccagaccccccaccactcagccctccagtgctgggtctgcatggtgtgacattcggctaccagggacagaaaccactctttaagaacttggattttggcatcgacatggattcaaggatttgcattgtgggccctaatggtgtggggaagagtacgctactcctgctgctgactggcaagctgacaccgacccatggggaaatgagaaagaaccaccggctgaaaattggcttcttcaaccagcagtatgcagagcagctgcgcatggaggagacgcccactgagtacctgcagcggggcttcaacctgccctaccaggatgcccgcaagtgcctgggccgcttcggcctggagagtcacgcccacaccatccagatctgcaaactctctggtggtcagaaggcgcgagttgtgtttgctgagctggcctgtcgggaacctgatgtcctcatcttggacgagccaaccaataacctggacatagagtctattgatgctctaggggaggccatcaatgaatacaagggtgctgtgatcgttgtcagccatgatgcccgactcatcacagaaaccaattgccagctgtgggtggtggaggagcagagtgttagccaaatcgatggtgactttgaagactacaagcgggaggtgttggaggccctgggtgaagtcatggtcagccggccccgagagtgaagctttccttcccagaagtctcccgagagacatatttgtgtggcctagaagtcctctgtggtctcccctcctctgaagactgcctctggcctgcagctgacctggcaaccattcaggcacatgaaggtggagtgtgaccttgatgtgaccgggatcccactctgattgcatccatttctctgaaagacttgtttgttctgcttctcttcatataactgagctggccttatccttggcatccccctaaacaaacaagaggtgaccaccttattgtgaggttccatccagccaagtttatgtggcctattgtctcaggactctcatcactcagaagcctgcctctgatttaccctacagcttcaggcccagctgccccccagtctttgggtggtgctgttcttttctggtggatttaatgctgactcactggtacaaacagctgttgaagctcagagctggaggtgagcttctgaggcctttgccattatccagcccaagatttggtgcctgcagcctcttgtctggttgaggacttggggcaggaaaggaatgctgctgaacttgaatttccctttacaaggggaagaaataaaggaaaggagttgctgccgacctgtcactgtttggagattgatgggagttggaactgttctcagtcttgatttgctttattcagttttctagcagcttttaatagtcccctcttccccactaaatggatcttgtttgca

SEQ ID NO: 28473 - DNA, 1074 bp, Artificial Sequence
  derived and/or modified sequence
gccggaagcggaaatagcaccgggcgccgccacagtagctgtaactgccaccgcgatgccgaaggcgcccaagcagcagccgccggagcccgagtggatcggggacggagagagcacgagcccatcagacaaagtggtgaagaaagggaagaaggacaagaagatcaaaaaaacgttctttgaagagctggcagtagaagataaacaggctggggaagaagagaaagtgctcaaggagaaggagcagcagcagcagcaacagcaacagcagcagcaaaaaaaaaagcgagatacccgaaaaggcaggcggaagaaggatgtggatgatgatggagaagagaaagagctcatggagcgtcttaagaagctctcagtgccaaccagtgatgaggaggatgaagtacccgccccaaaaccccgcggagggaagaaaaccaagggtggtaatgtttttgcagccctgattcaggatcagagtgaggaagaggaggaggaagaaaaacatcctcctaagcctgccaagccggagaagaatcggatcaataaggccgtatctgaggaacagcagcctgcactcaagggcaaaaagggaaaggaagagaagtcaaaagggaaggctaagcctcaaaataaattcgctgctctggacaatgaagaggaggataaagaagaagaaattataaaggaaaaggagcctcccaaacaagggaaggagaaggccaagaaggcagagcagggttcagaggaagaaggagaaggggaagaagaggaggaggaaggaggagagtctaaggcagatgatccctatgctcatcttagcaaaaaggagaagaaaaagctgaaaaaacagatggagtatgagcgccaagtggcttcattaaaagcagccaatgcagctgaaaatgacttctccgtgtcccaggcggagatgtcctcccgccaagccatgttagaaaatgcatctgacatcaagctggagaagttcagcatctccgctcatggcaaggagctgttcgtcaatgcagacctgtacattgtagccggccgccgctacgggctggtaggacccaatgg

SEQ ID NO: 28474 - DNA, 3380 bp, Artificial Sequence
  derived and/or modified sequence
cgggggcggggttggccgcgccagcttggagagccagccccatcggggttccccgccgccggaagcggaaatagcaccgggcgccgccacagtagctgtaactgccaccgcgatgccgaaggcgcccaagcagcagccgccggagcccgagtggatcggggacggagagagcacgagcccatcagacaaagtggtgaagaaagggaagaaggacaagaagatcaaaaaaacgttctttgaagagctggcagtagaagataaacaggctggggaagaagagaaagtgctcaaggagaaggagcagcagcagcagcaacagcaacagcagcaaaaaaaaaagcgagatacccgaaaaggcaggcggaagaaggatgtggatgatgatggagaagagaaagagctcatggagcgtcttaagaagctctcagtgccaaccagtgatgaggaggatgaagtacccgccccaaaaccccgcggagggaagaaaaccaagggtggtaatgtttttgcagccctgattcaggatcagagtgaggaagaggaggaggaagaaaaacatcctcctaagcctgccaagccggagaagaatcggatcaataaggccgtatctgaggaacagcagcctgcactcaagggcaaaaagggaaaggaagagaagtcaaaagggaaggctaagcctcaaaataaattcgctgctctggacaatgaagaggaggataaagaagaagaaattataaaggaaaaggagcctcccaaacaagggaaggagaaggccaagaaggcagagcagggttcagaggaagaaggagaaggggaagaagaggaggaggaaggaggagagtctaaggcagatgatccctatgctcatcttagcaaaaaggagaagaaaaagctgaaaaaacagatggagtatgagcgccaagtggcttcattaaaagcagccaatgcagctgaaaatgacttctccgtgtcccaggcggagatgtcctcccgccaagccatgttagaaaatgcatctgacatcaagctggagaagttcagcatctccgctcatggcaaggagctgttcgtcaatgcagacctgtacattgtagccggccgccgctacgggctggtaggacccaatggcaagggcaagaccacactcctcaagcacattgccaaccgagccctgagcatccctcccaacattgatgtgttgctgtgtgagcaggaggtggtagcagatgagacaccagcagtccaggctgttcttcgagctgacaccaagcgattgaagctgctggaagaggagcggcggcttcagggacagctggaacaaggggatgacacagctgctgagaggctagagaaggtgtatgaggaattgcgggccactggggcggcagctgcagaggccaaagcacggcggatcctggctggcctgggctttgaccctgaaatgcagaatcgacccacacagaagttctcagggggctggcgcatgcgtgtctccctggccagggcactgttcatggagcccacactgctgatgctggatgagcccaccaaccacctggacctcaacgctgtcatctggcttaataactacctccagggctggcggaagaccttgctgatcgtctcccatgaccagggcttcttggatgatgtctgcactgatatcatccacctcgatgcccagcggctccactactataggggcaattacatgaccttcaaaaagatgtaccagcagaagcagaaagaactgctgaaacagtatgagaagcaagagaaaaagctgaaggagctgaaggcaggcgggaagtccaccaagcaggcggaaaaacaaacgaaggaagccctgactcggaagcagcagaaatgccgacggaaaaaccaagatgaggaatcccaggaggcccctgagctcctgaagcgccctaaggagtacactgtgcgcttcacttttccagaccccccaccactcagccctccagtgctgggtctgcatggtgtgacattcggctaccagggacagaaaccactctttaagaacttggattttggcatcgacatggattcaaggatttgcattgtgggccctaatggtgtggggaagagtacgctactcctgctgctgactggcaagctgacaccgacccatggggaaatgagaaagaaccaccggctgaaaattggcttcttcaaccagcagtatgcagagcagctgcgcatggaggagacgcccactgagtacctgcagcggggcttcaacctgccctaccaggatgcccgcaagtgcctgggccgcttcggcctggagagtcacgcccacaccatccagatctgcaaactctctggtggtcagaaggcgcgagttgtgtttgctgagctggcctgtcgggaacctgatgtcctcatcttggacgagccaaccaataacctggacatagagtctattgatgctctaggggaggccatcaatgaatacaagggtgctgtgatcgttgtcagccatgatgcccgactcatcacagaaaccaattgccagctgtgggtggtggaggagcagagtgttagccaaatcgatggtgactttgaagactacaagcgggaggtgttggaggccctgggtgaagtcatggtcagccggccccgagagtgagctttccttcccagaagtctcccgagagacatatttgtgtggcctagaagtcctctgtggtctcccctcctctgaagactgcctctggcctgcagctgacctggcaaccattcaggcacatgaaggtggagtgtgaccttgatgtgaccgggatcccactctgattgcatccatttctctgaaagacttgtttgttctgcttctcttcatataactgagctggccttatccttggcatccccctaaacaaacaagaggtgaccaccttattgtgaggttccatccagccaagtttatgtggcctattgtctcaggactctcatcactcagaagcctgcctctgatttaccctacagcttcaggcccagctgccccccagtctttgggtggtgctgttcttttctggtggatttaatgctgactcactggtacaaacagctgttgaagctcagagctggaggtgagcttctgaggcctttgccattatccagcccaagatttggtgcctgcagcctcttgtctggttgaggacttggggcaggaaaggaatgctgctgaacttgaatttccctttacaaggggaagaaataaaggaaaggagttgctgccgacctgtcactgtttggagattgatgggagttggaactgttctcagtcttgatttgctttattcagttttctagcagcttttaatagtcccctcttccccactaaatggatcttgtttgca

SEQ ID NO: 28475 - DNA, 2526 bp, Artificial Sequence
  derived and/or modified sequence
gcgccagcttggagagccagccccatcggggttccccgccgccggaagcggaaatagcaccgggcgccgccacagtagctgtaactgccaccgcgatgccgaaggcgcccaagcagcagccgccggagcccgagtggatcggggacggagagagcacgagcccatcagacaaagtggtgaagaaagggaagaaggacaagaagatcaaaaaaacgttctttgaagagctggcagtagaagataaacaggctggggaagaagagaaagtgctcaaggagaaggagcagcagcagcagcaacagcaacagcagcagcaaaaaaaaaagcgagatacccgaaaaggcaggcggaagaaggatgtggatgatgatggagaagagaaagagctcatggagcgtcttaagaagctctcagtgccaaccagtgatgaggaggatgaagtacccgccccaaaaccccgcggagggaagaaaaccaagggtggtaatgtttttgcagccctgattcaggatcagagtgaggaagaggaggaggaagaaaaacatcctcctaagcctgccaagccggagaagaatcggatcaataaggccgtatctgaggaacagcagcctgcactcaagggcaaaaagggaaaggaagagaagtcaaaagggaaggctaagcctcaaaataaattcgctgctctggacaatgaagaggaggataaagaagaagaaattataaaggaaaaggagcctcccaaacaagggaaggagaaggccaagaaggcagagcagggttcagaggaagaaggagaaggggaagaagaggaggaggaaggaggagagtctaaggcagatgatccctatgctcatcttagcaaaaaggagaagaaaaagctgaaaaaacagatggagtatgagcgccaagtggcttcattaaaagcagccaatgcagctgaaaatgacttctccgtgtcccaggcggagatgtcctcccgccaagccatgttagaaaatgcatctgacatcaagctggagaagttcagcatctccgctcatggcaaggagctgttcgtcaatgcagacctgtacattgtagccggccgccgctacgggctggtaggacccaatggcaagggcaagaccacactcctcaagcacattgccaaccgagccctgagcatccctcccaacattgatgtgttgctgtgtgagcaggaggtggtagcagatgagacaccagcagtccaggctgttcttcgagatgacacagctgctgagaggctagagaaggtgtatgaggaattgcgggccactggggcggcagctgcagaggccaaagcacggcggatcctggctggcctgggctttgaccctgaaatgcagaatcgacccacacagaagttctcagggggctggcgcatgcgtgtctccctggccagggcactgttcatggagcccacactgctgatgctggacgagccaaccaataacctggacatagagtctattgatgctctaggggaggccatcaatgaatacaagggtgctgtgatcgttgtcagccatgatgcccgactcatcacagaaaccaattgccagctgtgggtggtggaggagcagagtgttagccaaatcgatggtgactttgaagactacaagcgggaggtgttggaggccctgggtgaagtcatggtcagccggccccgagagtgagctttccttcccagaagtctcccgagagacatatttgtgtggcctagaagtcctctgtggtctcccctcctctgaagactgcctctggcctgcagctgacctggcaaccattcaggcacatgaaggtggagtgtgaccttgatgtgaccgggatcccactctgattgcatccatttctctgaaagacttgtttgttctgcttctcttcatataactgagctggccttatccttggcatccccctaaacaaacaagaggtgaccaccttattgtgaggttccatccagccaagtttatgtggcctattgtctcaggactctcatcactcagaagcctgcctctgatttaccctacagcttcaggcccagctgccccccagtctttgggtggtgctgttcttttctggtggatttaatgctgactcactggtacaaacagctgttgaagctcagagctggaggtgagcttctgaggcctttgccattatccagcccaagatttggtgcctgcagcctcttgtctggttgaggacttggggcaggaaaggaatgctgctgaacttgaatttccctttacaaggggaagaaataaaggaaaggagttgctgccgacctgtcactgtttggagattgatgggagttggaactgttctcagtcttgatttgctttattcagttttctagcagcttttaatagtcccctcttccccactaaatggatcttgtttgcagtcttgctgacagtgtttgctgtttaaggatcataggattcctttcccccaacccttcacgcaaggaaaaagcaaagtgattcataccttctatcttgg

SEQ ID NO: 28476 - DNA, 1950 bp, Artificial Sequence
  derived and/or modified sequence
accgggcgccgccacagtagctgtaactgccaccgcgatgccgaaggcgcccaagcagcagccgccggagcccgagtggatcggggacggagagagcacgagcccatcagacaaagtggtgaagaaagggaagaaggacaagaagatcaaaaaaacgttctttgaagagctggcagtagaagataaacaggctggggaagaagagaaagtgctcaaggagaaggagcagcagcagcagcaacagcaacagcagcaaaaaaaaaagcgagatacccgaaaaggcaggcggaagaaggatgtggatgatgatggagaagagaaagagctcatggagcgtcttaagaagctctcagtgccaaccagtgatgaggaggatgaagtacccgccccaaaaccccgcggagggaagaaaaccaagggtggtaatgtttttgcagccctgattcaggatcagagtgaggaagaggaggaggaagaaaaacatcctcctaagcctgccaagccggagaagaatcggatcaataaggccgtatctgaggaacagcagcctgcactcaagggcaaaaagggaaaggaagagaagtcaaaagggaaggctaagcctcaaaataaattcgctgctctggacaatgaagaggaggataaagaagaagaaattataaaggaaaaggagcctcccaaacaagggaaggagaaggccaagaaggcagagcagggttcagaggaagaaggagaaggggaagaagaggaggaggaaggaggagagtctaaggcagatgatccctatgctcatcttagcaaaaaggagaagaaaaagctgaaaaaacagatggagtatgagcgccaagtggcttcattaaaagcagccaatgcagctgaaaatgacttctccgtgtcccaggcggagatgtcctcccgccaagccatgttagaaaatgcatctgacatcaagctggagaagttcagcatctccgctcatggcaaggagctgttcgtcaatgcagacctgtacattgtagccggccgccgctacgggctggtaggacccaatggcaagggcaagaccacactcctcaagcacattgccaaccgagccctgagcatccctcccaacattgatgtgttgctgtgtgagcaggaggtggtagcagatgagacaccagcagtccaggctgttcttcgagatgacacagctgctgagaggctagagaaggtgtatgaggaattgcgggccactggggcggcagctgcagaggccaaagcacggcggatcctggctggcctgggctttgaccctgaaatgcagaatcgacccacacagaagttctcagggggctggcgcatgcgtgtctccctggccagggcactgttcatggagcccacactgctgatgctggatgagccaaccaataacctggacatagagtctattgatgctctaggggaggccatcaatgaatacaagggtgctgtgatcgttgtcagccatgatgcccgactcatcacagaaaccaattgccagctgtgggtggtggaggagcagagtgttagccaaatcgatggtgactttgaagactacaagcgggaggtgttggaggccctgggtgaagtcatggtcagccggccccgagagtgaagctttccttcccagaagtctcccgagagacatatttgtgtggcctagaagtcctctgtggtctcccctcctctgaagactgcctctggcctgcagctgacctggcaaccattcaggcacatgaaggtggagtgtgaccttgatgtgaccgggatcccactctgattgcatccatttctctgaaagacttgtttgttctgcttctcttcatataactgagctggccttatccttggcatccccctaaacaaacaagaggtgaccaccttattgtgaggttccatccagccaagtttatgtggcctattgtctca

SEQ ID NO: 28477 - DNA, 2538 bp, Artificial Sequence
  derived and/or modified sequence
atgcccaaggcccccaagcagcagccccccgagcccgagtggatcggcgacggcgagagcaccagccccagcgacaaggtggtgaagaagggcaagaaggacaagaagatcaagaagaccttcttcgaggagctggccgtggaggacaagcaggccggcgaggaggagaaggtgctgaaggagaaggagcagcagcagcagcagcagcagcagcagcagaagaagaagagagacaccagaaagggcagaagaaagaaggacgtggacgacgacggcgaggagaaggagctgatggagagactgaagaagctgagcgtgcccaccagcgacgaggaggacgaggtgcccgcccccaagcccagaggcggcaagaagaccaagggcggcaacgtgttcgccgccctgatccaggaccagagcgaggaggaggaggaggaggagaagcacccccccaagcccgccaagcccgagaagaacagaatcaacaaggccgtgagcgaggagcagcagcccgccctgaagggcaagaagggcaaggaggagaagagcaagggcaaggccaagccccagaacaagttcgccgccctggacaacgaggaggaggacaaggaggaggagatcatcaaggagaaggagccccccaagcagggcaaggagaaggccaagaaggccgagcagggcagcgaggaggagggcgagggcgaggaggaggaggaggagggcggcgagagcaaggccgacgacccctacgcccacctgagcaagaaggagaagaagaagctgaagaagcagatggagtacgagagacaggtggccagcctgaaggccgccaacgccgccgagaacgacttcagcgtgagccaggccgagatgagcagcagacaggccatgctggagaacgccagcgacatcaagctggagaagttcagcatcagcgcccacggcaaggagctgttcgtgaacgccgacctgtacatcgtggccggcagaagatacggcctggtgggccccaacggcaagggcaagaccaccctgctgaagcacatcgccaacagagccctgagcatcccccccaacatcgacgtgctgctgtgcgagcaggaggtggtggccgacgagacccccgccgtgcaggccgtgctgagagccgacaccaagagactgaagctgctggaggaggagagaagactgcagggccagctggagcagggcgacgacaccgccgccgagagactggagaaggtgtacgaggagctgagagccaccggcgccgccgccgccgaggccaaggccagaagaatcctggccggcctgggcttcgaccccgagatgcagaacagacccacccagaagttcagcggcggctggagaatgagagtgagcctggccagagccctgttcatggagcccaccctgctgatgctggacgagcccaccaaccacctggacctgaacgccgtgatctggctgaacaactacctgcagggctggagaaagaccctgctgatcgtgagccacgaccagggcttcctggacgacgtgtgcaccgacatcatccacctggacgcccagagactgcactactacagaggcaactacatgaccttcaagaagatgtaccagcagaagcagaaggagctgctgaagcagtacgagaagcaggagaagaagctgaaggagctgaaggccggcggcaagagcaccaagcaggccgagaagcagaccaaggaggccctgaccagaaagcagcagaagtgcagaagaaagaaccaggacgaggagagccaggaggcccccgagctgctgaagagacccaaggagtacaccgtgagattcaccttccccgaccccccccccctgagcccccccgtgctgggcctgcacggcgtgaccttcggctaccagggccagaagcccctgttcaagaacctggacttcggcatcgacatggacagcagaatctgcatcgtgggccccaacggcgtgggcaagagcaccctgctgctgctgctgaccggcaagctgacccccacccacggcgagatgagaaagaaccacagactgaagatcggcttcttcaaccagcagtacgccgagcagctgagaatggaggagacccccaccgagtacctgcagagaggcttcaacctgccctaccaggacgccagaaagtgcctgggcagattcggcctggagagccacgcccacaccatccagatctgcaagctgagcggcggccagaaggccagagtggtgttcgccgagctggcctgcagagagcccgacgtgctgatcctggacgagcccaccaacaacctggacatcgagagcatcgacgccctgggcgaggccatcaacgagtacaagggcgccgtgatcgtggtgagccacgacgccagactgatcaccgagaccaactgccagctgtgggtggtggaggagcagagcgtgagccagatcgacggcgacttcgaggactacaagagagaggtgctggaggccctgggcgaggtgatggtgagcagacccagagagtag

SEQ ID NO: 28478 - DNA, 1023 bp, Artificial Sequence
  derived and/or modified sequence
atgcccaaggcccccaagcagcagccccccgagcccgagtggatcggcgacggcgagagcaccagccccagcgacaaggtggtgaagaagggcaagaaggacaagaagatcaagaagaccttcttcgaggagctggccgtggaggacaagcaggccggcgaggaggagaaggtgctgaaggagaaggagcagcagcagcagcagcagcagcagcagcagcagaagaagaagagagacaccagaaagggcagaagaaagaaggacgtggacgacgacggcgaggagaaggagctgatggagagactgaagaagctgagcgtgcccaccagcgacgaggaggacgaggtgcccgcccccaagcccagaggcggcaagaagaccaagggcggcaacgtgttcgccgccctgatccaggaccagagcgaggaggaggaggaggaggagaagcacccccccaagcccgccaagcccgagaagaacagaatcaacaaggccgtgagcgaggagcagcagcccgccctgaagggcaagaagggcaaggaggagaagagcaagggcaaggccaagccccagaacaagttcgccgccctggacaacgaggaggaggacaaggaggaggagatcatcaaggagaaggagccccccaagcagggcaaggagaaggccaagaaggccgagcagggcagcgaggaggagggcgagggcgaggaggaggaggaggagggcggcgagagcaaggccgacgacccctacgcccacctgagcaagaaggagaagaagaagctgaagaagcagatggagtacgagagacaggtggccagcctgaaggccgccaacgccgccgagaacgacttcagcgtgagccaggccgagatgagcagcagacaggccatgctggagaacgccagcgacatcaagctggagaagttcagcatcagcgcccacggcaaggagctgttcgtgaacgccgacctgtacatcgtggccggcagaagatacggcctggtgggccccaacggctag

SEQ ID NO: 28479 - DNA, 1602 bp, Artificial Sequence
  derived and/or modified sequence
atgcccaaggcccccaagcagcagccccccgagcccgagtggatcggcgacggcgagagcaccagccccagcgacaaggtggtgaagaagggcaagaaggacaagaagatcaagaagaccttcttcgaggagctggccgtggaggacaagcaggccggcgaggaggagaaggtgctgaaggagaaggagcagcagcagcagcagcagcagcagcagcagcagaagaagaagagagacaccagaaagggcagaagaaagaaggacgtggacgacgacggcgaggagaaggagctgatggagagactgaagaagctgagcgtgcccaccagcgacgaggaggacgaggtgcccgcccccaagcccagaggcggcaagaagaccaagggcggcaacgtgttcgccgccctgatccaggaccagagcgaggaggaggaggaggaggagaagcacccccccaagcccgccaagcccgagaagaacagaatcaacaaggccgtgagcgaggagcagcagcccgccctgaagggcaagaagggcaaggaggagaagagcaagggcaaggccaagccccagaacaagttcgccgccctggacaacgaggaggaggacaaggaggaggagatcatcaaggagaaggagccccccaagcagggcaaggagaaggccaagaaggccgagcagggcagcgaggaggagggcgagggcgaggaggaggaggaggagggcggcgagagcaaggccgacgacccctacgcccacctgagcaagaaggagaagaagaagctgaagaagcagatggagtacgagagacaggtggccagcctgaaggccgccaacgccgccgagaacgacttcagcgtgagccaggccgagatgagcagcagacaggccatgctggagaacgccagcgacatcaagctggagaagttcagcatcagcgcccacggcaaggagctgttcgtgaacgccgacctgtacatcgtggccggcagaagatacggcctggtgggccccaacggcaagggcaagaccaccctgctgaagcacatcgccaacagagccctgagcatcccccccaacatcgacgtgctgctgtgcgagcaggaggtggtggccgacgagacccccgccgtgcaggccgtgctgagagacgacaccgccgccgagagactggagaaggtgtacgaggagctgagagccaccggcgccgccgccgccgaggccaaggccagaagaatcctggccggcctgggcttcgaccccgagatgcagaacagacccacccagaagttcagcggcggctggagaatgagagtgagcctggccagagccctgttcatggagcccaccctgctgatgctggacgagcccaccaacaacctggacatcgagagcatcgacgccctgggcgaggccatcaacgagtacaagggcgccgtgatcgtggtgagccacgacgccagactgatcaccgagaccaactgccagctgtgggtggtggaggagcagagcgtgagccagatcgacggcgacttcgaggactacaagagagaggtgctggaggccctgggcgaggtgatggtgagcagacccagagagtag

SEQ ID NO: 28480 - DNA, 1599 bp, Artificial Sequence
  derived and/or modified sequence
atgcccaaggcccccaagcagcagccccccgagcccgagtggatcggcgacggcgagagcaccagccccagcgacaaggtggtgaagaagggcaagaaggacaagaagatcaagaagaccttcttcgaggagctggccgtggaggacaagcaggccggcgaggaggagaaggtgctgaaggagaaggagcagcagcagcagcagcagcagcagcagcagaagaagaagagagacaccagaaagggcagaagaaagaaggacgtggacgacgacggcgaggagaaggagctgatggagagactgaagaagctgagcgtgcccaccagcgacgaggaggacgaggtgcccgcccccaagcccagaggcggcaagaagaccaagggcggcaacgtgttcgccgccctgatccaggaccagagcgaggaggaggaggaggaggagaagcacccccccaagcccgccaagcccgagaagaacagaatcaacaaggccgtgagcgaggagcagcagcccgccctgaagggcaagaagggcaaggaggagaagagcaagggcaaggccaagccccagaacaagttcgccgccctggacaacgaggaggaggacaaggaggaggagatcatcaaggagaaggagccccccaagcagggcaaggagaaggccaagaaggccgagcagggcagcgaggaggagggcgagggcgaggaggaggaggaggagggcggcgagagcaaggccgacgacccctacgcccacctgagcaagaaggagaagaagaagctgaagaagcagatggagtacgagagacaggtggccagcctgaaggccgccaacgccgccgagaacgacttcagcgtgagccaggccgagatgagcagcagacaggccatgctggagaacgccagcgacatcaagctggagaagttcagcatcagcgcccacggcaaggagctgttcgtgaacgccgacctgtacatcgtggccggcagaagatacggcctggtgggccccaacggcaagggcaagaccaccctgctgaagcacatcgccaacagagccctgagcatcccccccaacatcgacgtgctgctgtgcgagcaggaggtggtggccgacgagacccccgccgtgcaggccgtgctgagagacgacaccgccgccgagagactggagaaggtgtacgaggagctgagagccaccggcgccgccgccgccgaggccaaggccagaagaatcctggccggcctgggcttcgaccccgagatgcagaacagacccacccagaagttcagcggcggctggagaatgagagtgagcctggccagagccctgttcatggagcccaccctgctgatgctggacgagcccaccaacaacctggacatcgagagcatcgacgccctgggcgaggccatcaacgagtacaagggcgccgtgatcgtggtgagccacgacgccagactgatcaccgagaccaactgccagctgtgggtggtggaggagcagagcgtgagccagatcgacggcgacttcgaggactacaagagagaggtgctggaggccctgggcgaggtgatggtgagcagacccagagagtag

SEQ ID NO: 28481 - DNA, 483 bp, Artificial Sequence
  derived and/or modified sequence
atggcctcacagaagcgcccttctcagcgacacggatctaaatacctggccacagcctcaacaatggatcacgcaaggcatggcttcttgccccggcaccgggatactggcatcttagacagtataggtagatttttcggcggtgaccggggcgccccaaaaaggggcagcggcaaggattcacatcatcccgcgcgtacagctcattacgggagtctgccgcaaaaatctcatggtcgcacacaggacgagaatcccgtcgtgcacttttttaaaaatatcgtgactcctcggacgccacccccctcccagggcaaaggtgcggaggggcagagacctggttttgggtacggggggcgggcttccgactacaagtctgctcacaaggggttcaaaggggtagatgcccagggcactctgtctaagatcttcaagctgggggggcgggacagtagatccggtagccctatggctcgccgctag

SEQ ID NO: 28482 - DNA, 261 bp, Artificial Sequence
  derived and/or modified sequence
atggcctcccaaaagaggcccagccagcgacatggctctaagtacttggccactgcatctactatggaccacgcccgacacgggttcctgcccagacaccgagatactggaattcttgattccatcggccggttttttgggggagatcgtggcgccccaaagagagggagcgggaaggactcccatcatcccgcccgcaccgcgcactacgggtcactcccccagaaatctcacggtagaacccaggatgaaaatccatag

SEQ ID NO: 28483 - DNA, 483 bp, Artificial Sequence
  derived and/or modified sequence
atggccagccagaagaggcccagccagagacatggcagcaagtacctggccacagccagcaccatggaccacgcccggcacggcttcctgcccaggcaccgggacaccggcatcctggacagcatcggccgcttcttcggcggggacagaggagcccccaagaggggcagcggcaaggacagccaccacccagccaggacagcccactacggcagcctgccccagaagagccacggccgcacccaggatgagaaccctgtggtgcacttcttcaagaacatcgtgacccccaggaccccaccacccagccagggcaaaggagctgagggccagaggcctggcttcggctatggaggccgggccagtgactacaagagcgcccacaagggcttcaagggcgtggatgcccagggcaccctgagcaagatcttcaagctgggcggccgggacagccgcagcggcagccccatggcccggaggtag

SEQ ID NO: 28484 - DNA, 261 bp, Artificial Sequence
  derived and/or modified sequence
atggccagccagaagaggcccagccagagacatggcagcaagtacctggccacagccagcaccatggaccacgcccggcacggcttcctgcccaggcaccgggacaccggcatcctggacagcatcggccgcttcttcggcggggacagaggagcccccaagaggggcagcggcaaggacagccaccacccagccaggacagcccactacggcagcctgccccagaagagccacggccgcacccaggatgagaacccctag

SEQ ID NO: 28485 - DNA, 483 bp, Artificial Sequence
  derived and/or modified sequence
atggccagccagaagcggcccagccagcggcacggcagcaagtacctggccacagccagcacaatggaccacgctaggcacggcttcttgcccagacatagagacacagggattctagacagcatcggtagattttttggaggggaccgcggtgcccccaaacgcggatccggaaaagattcccatcacccggcacgcacagcccactatggttctttgcctcaaaaaagccatggccgcacgcaggacgagaatcctgttgtgcacttctttaagaatatagttacaccacgaaccccgcctcccagccagggaaaaggtgcagagggccagcgaccgggattcggttatggaggtagggcatccgactataaatctgcccataaaggctttaagggggttgacgcgcaaggcaccctcagcaagatattcaagctcggtggccgggactcccgttcggggtcaccgatggcccgcaggtag

SEQ ID NO: 28486 - DNA, 261 bp, Artificial Sequence
  derived and/or modified sequence
atggccagccagaagcggcccagccagcggcacggcagcaagtacctggccactgcctccactatggatcatgctcgacatgggtttctgcctagacaccgggatacagggattcttgattccattggcagatttttcggcggggatcgcggcgctccaaagcgtggctccggaaaggacagtcatcatccagcacgcaccgcccattatggctccctcccacaaaagtcccatggacgcactcaggacgagaatccctag

SEQ ID NO: 28487 - DNA, 483 bp, Artificial Sequence
  derived and/or modified sequence
atggcctcgcagaagcggccttctcagcgacatggctcgaaatacctggctactgcttcaacaatggatcatgcacgtcacgggtttcttcctcggcaccgcgatactggaattctcgattcaattggaagattcttcggaggggaccggggagccccaaaaagaggatctggaaaagatagtcaccatccagccaggacagcccactacggctctctcccccagaaatcgcacggacgcacccaggacgaaaaccctgtagttcacttctttaaaaacatcgttacccctaggactcctcccccttcccaaggaaaaggcgcagagggacagcggccaggctttggctacgggggacgagcttcggactacaagagcgcccataagggttttaaaggtgtagacgcgcaagggactctgtctaagatattcaagctgggcggaagagattctagaagcggatctcccatggcaaggcgttag

SEQ ID NO: 28488 - DNA, 261 bp, Artificial Sequence
  derived and/or modified sequence
atggccagccagaaaagaccttcacagcgacacggatcgaaatatctggctaccgccagcacaatggatcacgcaaggcatgggtttctgcctcgtcacagagatactggcatcctagattccatcggcaggttttttggcggtgatcggggtgccccaaaacgcggttccggaaaagattcccatcatcccgcaaggactgcacattacggcagcctgccgcagaaatcccacggaagaacacaggacgagaatccgtag

SEQ ID NO: 28489 - DNA, 483 bp, Artificial Sequence
  derived and/or modified sequence
atggccagccagaagagacccagccagagacacggcagcaagtacctggccaccgccagcaccatggaccacgccagacacggcttcctgcccagacacagagacaccggcatcctggacagcatcggcagattcttcggcggcgacagaggcgcccccaagagaggcagcggcaaggacagccaccaccccgccagaaccgcccactacggcagcctgccccagaagagccacggcagaacccaggacgagaaccccgtggtgcacttcttcaagaacatcgtgacccccagaacccccccccccagccagggcaagggcgccgagggccagagacccggcttcggctacggcggcagagccagcgactacaagagcgcccacaagggcttcaagggcgtggacgcccagggcaccctgagcaagatcttcaagctgggcggcagagacagcagaagcggcagccccatggccagaagatag

SEQ ID NO: 28490 - DNA, 261 bp, Artificial Sequence
  derived and/or modified sequence
atggccagccagaagagacccagccagagacacggcagcaagtacctggccaccgccagcaccatggaccacgccagacacggcttcctgcccagacacagagacaccggcatcctggacagcatcggcagattcttcggcggcgacagaggcgcccccaagagaggcagcggcaaggacagccaccaccccgccagaaccgcccactacggcagcctgccccagaagagccacggcagaacccaggacgagaacccctag

SEQ ID NO: 28491 - protein, 197 aa, Artificial Sequence
  derived and/or modified sequence
MGNHAGKRELNAEKASTNSETNRGESEKKRNLGELSRTTSEDNEVFGEADANQNNGTSSQDTAVTDSKRTADPKNAWQDAHPADPGSRPHLIRLFSRDAPGREDNTFKDRPSESDELQTIQEDSAATSESLDVMASQKRPSQRHGSKYLATASTMDHARHGFLPRHRDTGILDSIGRFFGGDRGAPKRGSGKVSSEE

SEQ ID NO: 28492 - DNA, 594 bp, Artificial Sequence
  derived and/or modified sequence
atggggaatcacgccggtaaacgcgaattgaatgcggagaaagcgtccacgaattccgagaccaatcgaggagagtctgaaaagaagcgaaatctgggcgaattatctaggactacctccgaagataacgaggtatttggagaagcagatgctaaccagaacaatggaacgagctcccaggacacagccgttacagactcaaaaagaaccgctgatcccaagaatgcctggcaagatgctcacccggccgaccccggtagccgacctcacctcatacggttgttctcacgtgacgcccctggcagggaagacaatactttcaaggaccgacccagtgagtccgatgagcttcagacaatccaagaggactccgccgccaccagtgaaagcctagacgtcatggcctctcagaaacgcccatctcagagacatggcagtaaatacctcgccacagcgtctaccatggatcatgccaggcacggcttcctgccaaggcaccgcgacacgggtatcctcgactcgatcggtcggttctttggaggtgaccggggagcccctaagcggggctcaggtaaagtgagctccgaggagtag

SEQ ID NO: 28493 - DNA, 594 bp, Artificial Sequence
  derived and/or modified sequence
atgggcaatcatgcaggcaagagggagctgaacgccgaaaaagcatcaaccaacagcgagaccaacaggggggagtcagaaaaaaaacgcaatctgggggaattgagccgcaccaccagcgaagacaacgaggtatttggcgaagccgacgctaatcaaaacaacgggactagttcgcaagacacagccgtcactgactccaaacgcacggctgatccaaagaatgcttggcaggatgcacacccagctgatccggggtcaagaccccacttgattcggctgttctcccgagatgcaccgggacgggaggacaacacgtttaaagaccgcccatcggagtcagacgagctgcagacgatccaggaagacagcgcagcaacctccgagagcctggatgtcatggcaagccagaagcggccctctcagaggcatggatcaaaatatcttgcaacagcgtccaccatggatcacgccaggcacgggtttttacctaggcaccgcgacactggaattctcgattctatcggtaggttcttcggcggggatcgcggcgctccaaaacgcgggagtggcaaagttagcagtgaggagtag

SEQ ID NO: 28494 - DNA, 594 bp, Artificial Sequence
  derived and/or modified sequence
atgggcaaccacgccggcaagcgggagctgaatgctgagaaggccagcaccaacagcgagaccaacagaggagagagcgagaagaagaggaacctgggggagctgagcaggaccaccagtgaagataatgaggtgtttggagaggctgatgccaaccagaacaacggcaccagcagccaggacacagctgtgacagacagcaagaggacagctgaccccaagaatgcctggcaggatgcccaccctgctgaccccggcagccggccccacctgatccgcctcttcagcagagatgcccctggaagagaggacaacaccttcaaggaccggcccagcgagagtgatgagctgcagaccatccaggaggacagcgctgccaccagcgagagcctggatgtgatggccagccagaagaggcccagccagagacatggcagcaagtacctggccacagccagcaccatggaccacgcccggcacggcttcctgcccaggcaccgggacaccggcatcctggacagcatcggccgcttctttggaggagacagaggagcccccaagaggggcagcggcaaggtgtcctctgaggagtag

SEQ ID NO: 28495 - DNA, 4844 bp, Artificial Sequence
  derived and/or modified sequence
cgcgccagagagaagcagcctccggccccggcggcccctgtctcccgaccccggaaggcgaagcaggctgcccggggaccccgcgcgtgggcgcttgaagccgagaccagcctgcccgggcctgggcaggcggagcagggccttggaccccgcggcgcccctcggcctcggagcaacgagcgcagcgccgcctctgaagagccaatccattcaggatgggaaaccacgcaggcaaacgagaattaaatgccgagaaggccagtacgaatagtgaaactaacagaggagaatctgaaaaaaagagaaacctgggtgaactttcacggacaacctcagaggacaacgaagtgttcggagaggcagatgcgaaccagaacaatgggacctcctctcaggacacagcggtgactgactccaagcgcacagcggacccgaagaatgcctggcaggatgcccacccagctgacccagggagccgcccccacttgatccgcctcttttcccgagatgccccggggagggaggacaacaccttcaaagacaggccctctgagtccgacgagctccagaccatccaagaagacagtgcagccacctccgagagcctggatgtgatggcgtcacagaagagaccctcccagaggcacggatccaagtacctggccacagcaagtaccatggaccatgccaggcatggcttcctcccaaggcacagagacacgggcatccttgactccatcgggcgcttctttggcggtgacaggggtgcgcccaagcggggctctggcaaggtgagctctgaggagtagaggagttttagtttaaatggaaaaagcaaaggagaaatcagtaggtgaactcagccattagaggaagaactggcacgtagcctcttgctgtctaaggtctcgttccgtgctggagaatgcatatgagcccaagagtgtgggcctgagtggctgcttaggacgttttcgtttaactcaccccctcttttcctcacaagggatggtggccggggtgtggctcaggaatgtaaggacatgctgaattctggatctctaagggtgcctggacatgggcgttgcagaaagagagccacattctcagggtctctggtggtgtgtgcttgcggacttgatgactgatgttgcctctgcagcccacacgctggggttcaacactgggttatgctcgttttttcctggagtcagtgctgctagcttcatgttgctctgcgacaatcataggattgaggtcgaggaagacttttgaacaaactcctcaatttaaatccgccttgagcaaacgttctctgtggtctgagaagtggaaggggggagggataaatgagtgtctatgaatcaaagctttattatcttgtgattccattaatttgcatacagagtcttagaagtttctttattcaaaagcaaatgtggataaaaatgtattacaaaaaaaaaaaactctgctatggggtccagagtctaggagtggtttctgcagttgattgtcagtggagaacctgtggctgctggttcatcaaagcgctggtccctgagtgccattcagattgcagatgcagtattttacgtgatgtttagagtgtttggtggttgtgtaattttggagagaaagaagtttttcccaaaaaagtccctagtttattgggtgttctcacacaacctgtaagatgaagctgtttttctgcctgtgtgcagggctgattctggaattccagaaggccttgtgggagcgtaaaaggcttttgaataaagtgtggaacagagcgcctcattctgataacatgcaatcataaaaaccatagggcaacttggagttaaggagtttctagaatttgctttagtctccaactgcaattctttattgatcatgaaattgttgaagagaaacacaaatgtcagttttacctttcctgtgggcgtgaaagcacatcgaagtttcaggcaactgttaacatctctaccatctgtctgagttgagatttcaggttgtgacacttgccgtgacttatttgtaaatgacattttgtgtgtcttagatactaatggaattcatattctggctagttctttcagtgcatttgtagacatgttcttttcctttgtagcagtcctccctcaccctgaaatgttggtgttctaaccgatttctaatgctaatttcaactggaagcactttttcaagcccagctatcaaaccacaccagacatgtatggattcgggttgcccaataaagcgttgctattatgtaagcatccctcacgcatacagcatcaccagttttgaaagcttgaactattctgcttacttcaaggtacagaaaaaaaaaatgtacttaaactgtgcagaaaagatgaaatcactggataatatgtattataaaataagcttcatgtgagtgacactggtttaagttgaaataaaatggtgaaagcattgatatcaatcattgtgactttatctcaaaacaatattgacacacatagatgtttttcttcctttatggtaagattacagcctttattgtcttaaatctcttatactcttcaatattttcaaagaaaacattctagtctcagaaatagtccatctctttgcaaaacagggctggccaattatcaaggacccataaaaatcaaaacactttcaaaaattttaaaaataaaaataattttcacatgattgctttaggaattttgaagtatccattcttttcactatggagtgttgaatatagaagattttttaatgaacaggcttgccctttgatgccaaaggcaaaaaataataataataacatttgcacgtgtgatcacagagcagctgtgaggcatcccgggggagcgcacgcagtggggatgtgattgctccactcaactattttatcacaaagtgttgtaaacatgggagatgaaagcttaactctctctacacccagctacagacccgcaatggccctaaaaatctggggtattcattgggtgggctgccatggaggaatttttggttttgtttttatttttatttgttgttctgtttacaaatcaggagagcccctgtttttatatgctaggaaggtccttgggataggccgaagaggtgtgcaaacgagcagtggaaggcccgggccctgtctctcaggaccacggcggcctgccccacacacagttctgcttctccctatctagaacgaggttttcctggcagattcctgccagactctgagtggagcccccccatgaccctataaaaggggctgtttgtcctcctcccaccctcctgtgctcttcctccctccccttgagggcacatggccgctggtaccacatgttggagcggccgcccccgagcccgggaatgccctaacaacacccatgcttgtgttgctgggagctgacattcaagaaaagtgcattaaaaattccttgagaaggcatattcttttgagagccgtaaatgaaaagtgcattcacggagaacatgctcctttgttgtgagaggaaagaaaggactgttgttgcctttaaggaacaggtttcccagttccccggaatgtcagggtcacatgaggaatgggtgagcacttagggccaagattgtcgtgtgcttggcccggcagcttctctctaagtgacctctccagcatcactctgtgccagtgctcatatctgaggccacttgagtgtcacgaggcagagcctggaaacattagctttggaaaccgttccttcctttttatgtggaggaagtaaggtttcacaagacacctaagctggacatggtgatgtgccacttggatagttcccaaagcagaaagcagccaggacatcccagtaccccacttctccgtgccgtgtacttttagggaggttttcgaaagctagcttcttaccgatgattttgtctatttttctgttttatgtgaaaaccttcatttataacctgctcttctcagtgttcttctattcagcattcagtatgacttctatgcctctaattgcgactgtatggagaagaactgtttgtcattcagtgccgtgggatataatcagtcctgtaaattcatcagaatgttctgttgcctgattttttttccattgcattttaatttcattaaacatattttagttctacagtaacctaattcctcattgttaccatgagatcctaattctgtagctgtgttctgtaatcccatggggcgtgtaccatttggagacacatgaaggatacagtagacagcacggaaggcagcagcaacacacaggggtgtcctccctccccagagcccagtgtgcacacagaaccaaattcaatctcattcatcgtgagcttgcatggtaactgatccagccactcagtacctccattggataagagatttggccacagattcttctagagaaaatccaaatgtggagggtgcatttgtttctgcacccaaacaaataccttttgagatttcttataggcattcctctcaaagtctcattactctgatcagttattgatcggaggctaccctggctcagtcaccagctgctcactgtgtccttctgtggtctcaggagctgcagttgttgctgttgtatgaatagacgatagttaattagactggatgtgtctgtactggcagtgattttgcaacttcctctgtataagcgatacatttgtaaatcatgggaatgtatttgatggtaattgcctgtggtggttgtatcatgatttaattttattatgagcttttggctttatatatttttctgcctttttatgcattcattaaacagtttaacagaccaaggacagtgtactaa

SEQ ID NO: 28496 - DNA, 4800 bp, Artificial Sequence
  derived and/or modified sequence
tcctttcgcgtccacctgagcccccccgttttggaaggtggagtggggcttgggaaaaggttcaagcgtctttggggacccccgtgcgactctggctggaaacaggcgagctctggttccttgttccgttttccaattgcaacaaccctctgaagagccaatccattcaggatgggaaaccacgcaggcaaacgagaattaaatgccgagaaggccagtacgaatagtgaaactaacagaggagaatctgaaaaaaagagaaacctgggtgaactttcacggacaacctcagaggacaacgaagtgttcggagaggcagatgcgaaccagaacaatgggacctcctctcaggacacagcggtgactgactccaagcgcacagcggacccgaagaatgcctggcaggatgcccacccagctgacccagggagccgcccccacttgatccgcctcttttcccgagatgccccggggagggaggacaacaccttcaaagacaggccctctgagtccgacgagctccagaccatccaagaagacagtgcagccacctccgagagcctggatgtgatggcgtcacagaagagaccctcccagaggcacggatccaagtacctggccacagcaagtaccatggaccatgccaggcatggcttcctcccaaggcacagagacacgggcatccttgactccatcgggcgcttctttggcggtgacaggggtgcgcccaagcggggctctggcaaggtgagctctgaggagtagaggagttttagtttaaatggaaaaagcaaaggagaaatcagtaggtgaactcagccattagaggaagaactggcacgtagcctcttgctgtctaaggtctcgttccgtgctggagaatgcatatgagcccaagagtgtgggcctgagtggctgcttaggacgttttcgtttaactcaccccctcttttcctcacaagggatggtggccggggtgtggctcaggaatgtaaggacatgctgaattctggatctctaagggtgcctggacatgggcgttgcagaaagagagccacattctcagggtctctggtggtgtgtgcttgcggacttgatgactgatgttgcctctgcagcccacacgctggggttcaacactgggttatgctcgttttttcctggagtcagtgctgctagcttcatgttgctctgcgacaatcataggattgaggtcgaggaagacttttgaacaaactcctcaatttaaatccgccttgagcaaacgttctctgtggtctgagaagtggaaggggggagggataaatgagtgtctatgaatcaaagctttattatcttgtgattccattaatttgcatacagagtcttagaagtttctttattcaaaagcaaatgtggataaaaatgtattacaaaaaaaaaaaactctgctatggggtccagagtctaggagtggtttctgcagttgattgtcagtggagaacctgtggctgctggttcatcaaagcgctggtccctgagtgccattcagattgcagatgcagtattttacgtgatgtttagagtgtttggtggttgtgtaattttggagagaaagaagtttttcccaaaaaagtccctagtttattgggtgttctcacacaacctgtaagatgaagctgtttttctgcctgtgtgcagggctgattctggaattccagaaggccttgtgggagcgtaaaaggcttttgaataaagtgtggaacagagcgcctcattctgataacatgcaatcataaaaaccatagggcaacttggagttaaggagtttctagaatttgctttagtctccaactgcaattctttattgatcatgaaattgttgaagagaaacacaaatgtcagttttacctttcctgtgggcgtgaaagcacatcgaagtttcaggcaactgttaacatctctaccatctgtctgagttgagatttcaggttgtgacacttgccgtgacttatttgtaaatgacattttgtgtgtcttagatactaatggaattcatattctggctagttctttcagtgcatttgtagacatgttcttttcctttgtagcagtcctccctcaccctgaaatgttggtgttctaaccgatttctaatgctaatttcaactggaagcactttttcaagcccagctatcaaaccacaccagacatgtatggattcgggttgcccaataaagcgttgctattatgtaagcatccctcacgcatacagcatcaccagttttgaaagcttgaactattctgcttacttcaaggtacagaaaaaaaaaatgtacttaaactgtgcagaaaagatgaaatcactggataatatgtattataaaataagcttcatgtgagtgacactggtttaagttgaaataaaatggtgaaagcattgatatcaatcattgtgactttatctcaaaacaatattgacacacatagatgtttttcttcctttatggtaagattacagcctttattgtcttaaatctcttatactcttcaatattttcaaagaaaacattctagtctcagaaatagtccatctctttgcaaaacagggctggccaattatcaaggacccataaaaatcaaaacactttcaaaaattttaaaaataaaaataattttcacatgattgctttaggaattttgaagtatccattcttttcactatggagtgttgaatatagaagattttttaatgaacaggcttgccctttgatgccaaaggcaaaaaataataataataacatttgcacgtgtgatcacagagcagctgtgaggcatcccgggggagcgcacgcagtggggatgtgattgctccactcaactattttatcacaaagtgttgtaaacatgggagatgaaagcttaactctctctacacccagctacagacccgcaatggccctaaaaatctggggtattcattgggtgggctgccatggaggaatttttggttttgtttttatttttatttgttgttctgtttacaaatcaggagagcccctgtttttatatgctaggaaggtccttgggataggccgaagaggtgtgcaaacgagcagtggaaggcccgggccctgtctctcaggaccacggcggcctgccccacacacagttctgcttctccctatctagaacgaggttttcctggcagattcctgccagactctgagtggagcccccccatgaccctataaaaggggctgtttgtcctcctcccaccctcctgtgctcttcctccctccccttgagggcacatggccgctggtaccacatgttggagcggccgcccccgagcccgggaatgccctaacaacacccatgcttgtgttgctgggagctgacattcaagaaaagtgcattaaaaattccttgagaaggcatattcttttgagagccgtaaatgaaaagtgcattcacggagaacatgctcctttgttgtgagaggaaagaaaggactgttgttgcctttaaggaacaggtttcccagttccccggaatgtcagggtcacatgaggaatgggtgagcacttagggccaagattgtcgtgtgcttggcccggcagcttctctctaagtgacctctccagcatcactctgtgccagtgctcatatctgaggccacttgagtgtcacgaggcagagcctggaaacattagctttggaaaccgttccttcctttttatgtggaggaagtaaggtttcacaagacacctaagctggacatggtgatgtgccacttggatagttcccaaagcagaaagcagccaggacatcccagtaccccacttctccgtgccgtgtacttttagggaggttttcgaaagctagcttcttaccgatgattttgtctatttttctgttttatgtgaaaaccttcatttataacctgctcttctcagtgttcttctattcagcattcagtatgacttctatgcctctaattgcgactgtatggagaagaactgtttgtcattcagtgccgtgggatataatcagtcctgtaaattcatcagaatgttctgttgcctgattttttttccattgcattttaatttcattaaacatattttagttctacagtaacctaattcctcattgttaccatgagatcctaattctgtagctgtgttctgtaatcccatggggcgtgtaccatttggagacacatgaaggatacagtagacagcacggaaggcagcagcaacacacaggggtgtcctccctccccagagcccagtgtgcacacagaaccaaattcaatctcattcatcgtgagcttgcatggtaactgatccagccactcagtacctccattggataagagatttggccacagattcttctagagaaaatccaaatgtggagggtgcatttgtttctgcacccaaacaaataccttttgagatttcttataggcattcctctcaaagtctcattactctgatcagttattgatcggaggctaccctggctcagtcaccagctgctcactgtgtccttctgtggtctcaggagctgcagttgttgctgttgtatgaatagacgatagttaattagactggatgtgtctgtactggcagtgattttgcaacttcctctgtataagcgatacatttgtaaatcatgggaatgtatttgatggtaattgcctgtggtggttgtatcatgatttaattttattatgagcttttggctttatatatttttctgcctttttatgcattcattaaacagtttaacagaccaaggacagtgtactaa

SEQ ID NO: 28497 - DNA, 594 bp, Artificial Sequence
  derived and/or modified sequence
atgggcaaccacgccggcaagcgggagctgaacgccgagaaggccagcaccaattcggaaacaaaccggggtgagagcgagaagaagaggaaccttggggaactctctcggactacaagcgaggacaacgaagtgttcggcgaggctgatgctaatcagaacaacggtacttcttcccaagataccgccgtcacagatagtaagaggaccgccgatcctaagaatgcctggcaagatgcccacccagccgatccaggttctcggccgcacctgattcggctgttctctcgagatgcgcccgggcgcgaggataataccttcaaagataggccttccgagtcagacgagcttcagaccatacaggaggatagcgctgccacgtctgagagcctggacgtcatggcgagccagaaacggccttctcaaagacatggatcaaagtacctcgcaaccgcctccactatggaccacgccaggcacggtttcctaccccgtcatcgtgacactgggatactggatagcataggacgcttcttcggaggcgatcgcggagctccaaaaagagggtcagggaaggtctctagcgaggagtag

SEQ ID NO: 28498 - DNA, 594 bp, Artificial Sequence
  derived and/or modified sequence
atgggcaaccacgccggcaagcgggagctgaacgccgagaaggcctctacaaattctgagaccaatcgaggggaaagcgagaagaagagaaacctgggcgagctgtcccggaccacctctgaagacaatgaagtgtttggcgaagcagacgctaaccagaataacggaacttcttcacaggatacagccgtgacagactccaagcgcacagccgacccaaaaaatgcttggcaagacgcgcaccctgccgatccagggtctcgcccgcatctgattaggctgttcagtcgagacgcccccggcagagaagataacacctttaaggaccgacctagtgaaagtgacgaactgcagacaatacaggaggactcagcggccactagtgagtccctggatgttatggcctctcagaagcgaccatctcagaggcatggtagtaaatacctggcaacagcgtctactatggaccatgcccggcatgggttcctccctcggcaccgggatacgggtatcttagatagcattggtagatttttcggaggggaccggggtgcacccaagcgcggatctggtaaagtgtctagcgaagaatag

SEQ ID NO: 28499 - DNA, 594 bp, Artificial Sequence
  derived and/or modified sequence
atggggaatcatgctggcaagcgtgaacttaatgcggaaaaggcctctacaaactccgaaaccaatagaggtgaaagcgagaagaaacggaacctaggcgaattgtcccgcacaactagcgaggacaatgaagtgttcggcgaggccgatgccaatcagaataacgggactagctcccaggacaccgctgtgacagactctaagcgaacagcggaccccaaaaacgcgtggcaggatgcccaccccgcagaccccggtagccgaccccaccttatccgtctttttagccgagacgcacctggtcgggaggataacacctttaaggacagaccatctgaaagtgatgagctgcaaaccattcaggaggatagtgctgcgacttctgagtcgctagatgttatggctagtcaaaaacgcccttctcaacggcacggatccaaatacctggccaccgcatccaccatggatcacgctagacatgggttcctgccaagacatagggatacggggatactcgattcaattgggcgatttttcgggggagatcgcggagccccaaagcgtgggagtgggaaggttagctcagaagaatag

SEQ ID NO: 28500 - DNA, 594 bp, Artificial Sequence
  derived and/or modified sequence
atgggcaaccacgccggtaaaagagaactcaatgctgaaaaagcgagtaccaactctgaaaccaacaggggggagtccgagaagaaacgcaacttgggcgagctgagtaggaccactagtgaggacaatgaagtctttggggaagctgatgctaaccagaacaacggcaccagttctcaggacacagccgtcacagacagcaagcgtacggccgaccccaagaacgcctggcaggatgcacatccagcggatccaggctcacgccctcacctgatcagacttttttctcgggacgcccctgggagggaggacaacaccttcaaagacagaccttccgagagcgatgaactccagacaatccaggaagattccgcagcaaccagcgagtcgctcgatgtcatggcatctcagaaaaggccgagtcaaagacatggatcaaaatacttggccacagcctctactatggatcacgcaagacacgggttcctgccccgtcaccgagataccggtatattggacagtattggaaggttcttcgggggagatagaggagcccctaaaaggggttcaggtaaggtgtcgtcagaagagtag

SEQ ID NO: 28501 - DNA, 594 bp, Artificial Sequence
  derived and/or modified sequence
atgggcaaccacgccggcaagagagagctgaacgccgagaaggccagcaccaacagcgagaccaacagaggcgagagcgagaagaagagaaacctgggcgagctgagcagaaccaccagcgaggacaacgaggtgttcggcgaggccgacgccaaccagaacaacggcaccagcagccaggacaccgccgtgaccgacagcaagagaaccgccgaccccaagaacgcctggcaggacgcccaccccgccgaccccggcagcagaccccacctgatcagactgttcagcagagacgcccccggcagagaggacaacaccttcaaggacagacccagcgagagcgacgagctgcagaccatccaggaggacagcgccgccaccagcgagagcctggacgtgatggccagccagaagagacccagccagagacacggcagcaagtacctggccaccgccagcaccatggaccacgccagacacggcttcctgcccagacacagagacaccggcatcctggacagcatcggcagattcttcggcggcgacagaggcgcccccaagagaggcagcggcaaggtgagcagcgaggagtag

SEQ ID NO: 28502 - protein, 304 aa, Artificial Sequence
  derived and/or modified sequence
MGNHAGKRELNAEKASTNSETNRGESEKKRNLGELSRTTSEDNEVFGEADANQNNGTSSQDTAVTDSKRTADPKNAWQDAHPADPGSRPHLIRLFSRDAPGREDNTFKDRPSESDELQTIQEDSAATSESLDVMASQKRPSQRHGSKYLATASTMDHARHGFLPRHRDTGILDSIGRFFGGDRGAPKRGSGKDSHHPARTAHYGSLPQKSHGRTQDENPVVHFFKNIVTPRTPPPSQGKGRGLSLSRFSWGAEGQRPGFGYGGRASDYKSAHKGFKGVDAQGTLSKIFKLGGRDSRSGSPMARR

SEQ ID NO: 28503 - protein, 171 aa, Artificial Sequence
  derived and/or modified sequence
MASQKRPSQRHGSKYLATASTMDHARHGFLPRHRDTGILDSIGRFFGGDRGAPKRGSGKDSHHPARTAHYGSLPQKSHGRTQDENPVVHFFKNIVTPRTPPPSQGKGRGLSLSRFSWGAEGQRPGFGYGGRASDYKSAHKGFKGVDAQGTLSKIFKLGGRDSRSGSPMARR

SEQ ID NO: 28504 - DNA, 915 bp, Artificial Sequence
  derived and/or modified sequence
atgggtaaccatgccgggaaaagggaactaaacgcagagaaagccagcacaaacagtgagaccaatagaggtgaatctgaaaagaagagaaacctgggagaactatcccgcactacaagcgaggacaatgaggtattcggggaagctgatgctaatcaaaataacgggacatcctcccaagatacagctgtcacggactccaaacggacggctgaccccaagaatgcttggcaagacgcccaccccgccgaccccggatcacggccacacctgatccggctgtttagcagggatgcacctgggcgtgaggacaacacatttaaagacagaccatctgaatctgacgaactacagacaatccaagaggatagtgcagccactagtgagagtttagatgttatggcctcacaaaagcgcccctcccaaagacatgggagcaaatacctagccacagctagcactatggatcatgctcggcacggatttcttccaagacatagggacacaggcatcctggacagcatcggccgcttcttcgggggagacaggggagccccaaagcgtggatccgggaaagattcccatcaccctgcaaggactgctcattacggctctctgcctcagaagtctcacggaagaacccaggatgagaaccctgtggtgcatttcttcaaaaatatcgtcaccccgcgaaccccacccccgagtcaggggaaggggcgtggcctgtccctgtccaggttttcctggggcgccgaggggcagcgcccaggattcggatacggtgggcgcgcctccgactacaagtccgcccacaaaggattcaaaggcgtcgatgcgcagggcacactcagtaaaatttttaagctgggcggacgggattcacgttccgggtcacctatggcccgcagatag

SEQ ID NO: 28505 - DNA, 915 bp, Artificial Sequence
  derived and/or modified sequence
atgggcaaccacgccggcaagcgggagctgaatgctgagaaggccagcaccaacagcgagaccaacagaggagagagcgagaagaagaggaacctgggggagctgagcaggaccaccagtgaagataatgaggtgtttggagaggctgatgccaaccagaacaacggcaccagcagccaggacacagctgtgacagacagcaagaggacagctgaccccaagaatgcctggcaggatgcccaccctgctgaccccggcagccggccccacctgatccgcctcttcagcagagatgcccctggaagagaggacaacaccttcaaggaccggcccagcgagagtgatgagctgcagaccatccaggaggacagcgctgccaccagcgagagcctggatgtgatggccagccagaagaggcccagccagagacatggcagcaagtacctggccacagccagcaccatggaccacgcccggcacggcttcctgcccaggcaccgggacaccggcatcctggacagcatcggccgcttctttggaggagacagaggagcccccaagaggggcagcggcaaggacagccaccacccagccaggacagcccactacggcagcctgccccagaagagccacggccgcacccaggatgaaaatcctgtggtgcacttcttcaagaacatcgtgacccccaggaccccaccacccagccagggcaagggccggggcctgagcctgagccgcttctcctggggcgctgagggccagaggcctggcttcggctatggaggccgggccagtgactacaagagcgcccacaagggcttcaagggcgtggatgcccagggcaccctgagcaagatcttcaagctgggcggccgggacagccgcagcggcagccccatggcccggaggtag

SEQ ID NO: 28506 - DNA, 2772 bp, Artificial Sequence
  derived and/or modified sequence
tgggtgcgcgcccgtccctcggagccgccgccgtcagtcaccgccgccgcgcgccagagagaagcagcctccggccccggcggcccctgtctcccgaccccggaaggcgaagcaggctgcccggggaccccgcgcgtgggcgcttgaagccgagaccagcctgcccgggcctgggcaggcggagcagggccttggaccccgcggcgcccctcggcctcggagcaacgagcgcagcgccgcctctgaagagccaatccattcaggatgggaaaccacgcaggcaaacgagaattaaatgccgagaaggccagtacgaatagtgaaactaacagaggagaatctgaaaaaaagagaaacctgggtgaactttcacggacaacctcagaggacaacgaagtgttcggagaggcagatgcgaaccagaacaatgggacctcctctcaggacacagcggtgactgactccaagcgcacagcggacccgaagaatgcctggcaggatgcccacccagctgacccagggagccgcccccacttgatccgcctcttttcccgagatgccccggggagggaggacaacaccttcaaagacaggccctctgagtccgacgagctccagaccatccaagaagacagtgcagccacctccgagagcctggatgtgatggcgtcacagaagagaccctcccagaggcacggatccaagtacctggccacagcaagtaccatggaccatgccaggcatggcttcctcccaaggcacagagacacgggcatccttgactccatcgggcgcttctttggcggtgacaggggtgcgcccaagcggggctctggcaaggactcacaccacccggcaagaactgctcactacggctccctgccccagaagtcacacggccggacccaagatgaaaaccccgtagtccacttcttcaagaacattgtgacgcctcgcacaccacccccgtcgcagggaaaggggagaggactgtccctgagcagatttagctggggggccgaaggccagagaccaggatttggctacggaggcagagcgtccgactataaatcggctcacaagggattcaagggagtcgatgcccagggcacgctttccaaaatttttaagctgggaggaagagatagtcgctctggatcacccatggctagacgctgaaaacccacctggttccggaatcctgtcctcagcttcttaatataactgccttaaaactttaatcccacttgcccctgttacctaattagagcagatgacccctcccctaatgcctgcggagttgtgcacgtagtagggtcaggccacggcagcctaccggcaatttccggccaacagttaaatgagaacatgaaaacagaaaacggttaaaactgtccctttctgtgtgaagatcacgttccttcccccgcaatgtgcccccagacgcacgtgggtcttcagggggccaggtgcacagacgtccctccacgttcacccctccacccttggactttcttttcgccgtggctgcggcacccttgcgcttttgctggtcactgccatggaggcacacagctgcagagacagagaggacgtgggcggcagagaggactgttgacatccaagcttcctttgtttttttttcctgtccttctctcacctcctaaagtagacttcatttttcctaacaggattagacagtcaaggagtggcttactacatgtgggagcttttggtatgtgacatgcgggctgggcagctgttagagtccaacgtggggcagcacagagagggggccacctccccaggccgtggctgcccacacaccccaattagctgaattcgcgtgtggcagagggaggaaaaggaggcaaacgtgggctgggcaatggcctcacataggaaacagggtcttcctggagatttggtgatggagatgtcaagcaggtggcctctggacgtcaccgttgccctgcatggtggccccagagcagcctctatgaacaacctcgtttccaaaccacagcccacagccggagagtccaggaagacttgcgcactcagagcagaagggtaggagtcctctagacagcctcgcagccgcgccagtcgcccatagacactggctgtgaccgggcgtgctggcagcggcagtgcacagtggccagcactaaccctccctgagaagataaccggctcattcacttcctcccagaagacgcgtggtagcgagtaggcacaggcgtgcacctgctcccgaattactcaccgagacacacgggctgagcagacggccccgtggatggagacaaagagctcttctgaccatatccttcttaacacccgctggcatctcctttcgcgcctccctccctaacctactgacccaccttttgattttagcgcacctgtgattgataggccttccaaagagtcccacgctggcatcaccctccccgaggacggagatgaggagtagtcagcgtgatgccaaaacgcgtcttcttaatccaattctaattctgaatgtttcgtgtgggcttaataccatgtctattaatatatagcctcgatgatgagagagttacaaagaacaaaactccagacacaaacctccaaatttttcagcagaagcactctgcgtcgctgagctgaggtcggctctgcgatccatacgtggccgcacccacacagcacgtgctgtgacgatggctgaacggaaagtgtacactgttcctgaatattgaaataaaacaataaacttttaatggt

SEQ ID NO: 28507 - DNA, 2145 bp, Artificial Sequence
  derived and/or modified sequence
gagctccagaccatccaagaagacagtgcagccacctccgagagcctggatgtgatggcgtcacagaagagaccctcccagaggcacggatccaagtacctggccacagcaagtaccatggaccatgccaggcatggcttcctcccaaggcacagagacacgggcatccttgactccatcgggcgcttctttggcggtgacaggggtgcgcccaagcggggctctggcaaggactcacaccacccggcaagaactgctcactacggctccctgccccagaagtcacacggccggacccaagatgaaaaccccgtagtccacttcttcaagaacattgtgacgcctcgcacaccacccccgtcgcagggaaaggggagaggactgtccctgagcagatttagctggggggccgaaggccagagaccaggatttggctacggaggcagagcgtccgactataaatcggctcacaagggattcaagggagtcgatgcccagggcacgctttccaaaatttttaagctgggaggaagagatagtcgctctggatcacccatggctagacgctgaaaacccacctggttccggaatcctgtcctcagcttcttaatataactgccttaaaactttaatcccacttgcccctgttacctaattagagcagatgacccctcccctaatgcctgcggagttgtgcacgtagtagggtcaggccacggcagcctaccggcaatttccggccaacagttaaatgagaacatgaaaacagaaaacggttaaaactgtccctttctgtgtgaagatcacgttccttcccccgcaatgtgcccccagacgcacgtgggtcttcagggggccaggtgcacagacgtccctccacgttcacccctccacccttggactttcttttcgccgtggctgcggcacccttgcgcttttgctggtcactgccatggaggcacacagctgcagagacagagaggacgtgggcggcagagaggactgttgacatccaagcttcctttgtttttttttcctgtccttctctcacctcctaaagtagacttcatttttcctaacaggattagacagtcaaggagtggcttactacatgtgggagcttttggtatgtgacatgcgggctgggcagctgttagagtccaacgtggggcagcacagagagggggccacctccccaggccgtggctgcccacacaccccaattagctgaattcgcgtgtggcagagggaggaaaaggaggcaaacgtgggctgggcaatggcctcacataggaaacagggtcttcctggagatttggtgatggagatgtcaagcaggtggcctctggacgtcaccgttgccctgcatggtggccccagagcagcctctatgaacaacctcgtttccaaaccacagcccacagccggagagtccaggaagacttgcgcactcagagcagaagggtaggagtcctctagacagcctcgcagccgcgccagtcgcccatagacactggctgtgaccgggcgtgctggcagcggcagtgcacagtggccagcactaaccctccctgagaagataaccggctcattcacttcctcccagaagacgcgtggtagcgagtaggcacaggcgtgcacctgctcccgaattactcaccgagacacacgggctgagcagacggccccgtggatggagacaaagagctcttctgaccatatccttcttaacacccgctggcatctcctttcgcgcctccctccctaacctactgacccaccttttgattttagcgcacctgtgattgataggccttccaaagagtcccacgctggcatcaccctccccgaggacggagatgaggagtagtcagcgtgatgccaaaacgcgtcttcttaatccaattctaattctgaatgtttcgtgtgggcttaataccatgtctattaatatatagcctcgatgatgagagagttacaaagaacaaaactccagacacaaacctccaaatttttcagcagaagcactctgcgtcgctgagctgaggtcggctctgcgatccatacgtggccgcacccacacagcacgtgctgtgacgatggctgaacggaaagtgtacactgttcctgaatattgaaataaaa

SEQ ID NO: 28508 - DNA, 915 bp, Artificial Sequence
  derived and/or modified sequence
atgggcaaccacgccggcaagcgggagctgaacgccgagaaggccagcactaactcagagacaaatcgcggcgagagcgagaaaaaaagaaacctgggggaactgtccagaacaacttcagaggacaatgaagtcttcggcgaggccgatgcaaaccagaacaacggcacaagtagtcaggatacagcagtgactgattcaaaacggacagccgaccccaaaaacgcatggcaggacgcccaccctgcagatcccggaagccgaccgcacttgatcaggcttttttcacgggacgctcctggaagggaggataatacatttaaggatcgccccagcgaaagcgacgagttgcagactatacaggaggattccgctgctacatctgagtcactagatgtgatggcctcgcagaagagaccttcacagcggcacggctccaaatatctagccaccgccagcacgatggatcatgctcggcatggctttctccctagacatagagacacagggattttagacagcatcggacgtttttttggaggggaccgtggggcccctaagagggggagtggcaaggactcccatcatcccgcaaggaccgcacattatggctccttgcctcagaagagtcacggacgtacccaagacgagaaccctgtggtccactttttcaagaacatcgtcacccccaggaccccaccgcctagtcaggggaagggacgggggctcagtctttcacgcttcagttggggggccgagggacagcgacccggctttggctatgggggacgggctagcgactacaaatccgcacacaagggttttaagggcgtggatgctcagggaaccctttctaaaatcttcaagcttggcggacgcgactctcggagcgggtcacctatggccagacgttag

SEQ ID NO: 28509 - DNA, 915 bp, Artificial Sequence
  derived and/or modified sequence
atgggaaatcatgcaggaaagagagagctcaacgctgagaaagcttccactaactctgagactaatcgcggagaatctgagaagaagagaaacctcggagaactcagcagaaccaccagtgaggataacgaagtgtttggtgaagcagatgccaaccaaaacaacggaactagttctcaagacacagcagtgacagattctaagcgcactgccgatccgaagaatgcttggcaagatgcgcacccagctgacccaggctcccggcctcacctgatcaggctgtttagtagagacgccccaggacgggaggacaataccttcaaagacagaccatcggagagcgatgaactccaaactattcaggaagatagtgcagcaacctctgaatccctggatgtgatggccagccagaagaggcctagccagaggcacgggagcaagtacctggccacagccagcactatggaccacgcccgacacggatttctgccaaggcatcgcgacacaggcatcctggactccataggcaggtttttcggcggagaccgtggtgcgccaaaaagaggttcaggaaaagactcccatcatccagctaggaccgcccattatggatcactgcctcagaagagtcacggacggacgcaggacgaaaatccggtcgttcacttctttaaaaatatcgtgacccccaggacacccccaccatctcagggtaaagggcgtggccttagtttatcccggttctcatggggggctgaaggacagaggcctgggttcggttacggaggacgggcaagcgactacaagtccgctcacaaaggattcaaaggcgtggacgcccaaggaaccctatctaagatcttcaaactgggcggacgcgatagccggtctggctcgccaatggcccgacggtag

SEQ ID NO: 28510 - DNA, 915 bp, Artificial Sequence
  derived and/or modified sequence
atgggcaaccacgccggcaagagagagctgaacgccgagaaggccagcaccaacagcgagaccaacagaggcgagagcgagaagaagagaaacctgggcgagctgagcagaaccaccagcgaggacaacgaggtgttcggcgaggccgacgccaaccagaacaacggcaccagcagccaggacaccgccgtgaccgacagcaagagaaccgccgaccccaagaacgcctggcaggacgcccaccccgccgaccccggcagcagaccccacctgatcagactgttcagcagagacgcccccggcagagaggacaacaccttcaaggacagacccagcgagagcgacgagctgcagaccatccaggaggacagcgccgccaccagcgagagcctggacgtgatggccagccagaagagacccagccagagacacggcagcaagtacctggccaccgccagcaccatggaccacgccagacacggcttcctgcccagacacagagacaccggcatcctggacagcatcggcagattcttcggcggcgacagaggcgcccccaagagaggcagcggcaaggacagccaccaccccgccagaaccgcccactacggcagcctgccccagaagagccacggcagaacccaggacgagaaccccgtggtgcacttcttcaagaacatcgtgacccccagaacccccccccccagccagggcaagggcagaggcctgagcctgagcagattcagctggggcgccgagggccagagacccggcttcggctacggcggcagagccagcgactacaagagcgcccacaagggcttcaagggcgtggacgcccagggcaccctgagcaagatcttcaagctgggcggcagagacagcagaagcggcagccccatggccagaagatag

SEQ ID NO: 28511 - protein, 176 aa, Artificial Sequence
  derived and/or modified sequence
MRLLILTCLVAVALARPKLPLRYPERLQNPSESSEPIPLESREEYMNGMNRRNILREKQTDEIKDTRNESTQNCVVAEPEKMESSISSSSEEQFCRLNEYNQLQLQAAHAQEQIRRMNENSHVQVPFQQLNQLAAYPYAVWYYPQIMQYVPFPPFSDISNPTAHENYEKNNVMLQW

SEQ ID NO: 28512 - DNA, 531 bp, Artificial Sequence
  derived and/or modified sequence
atgagactactgattctaacctgtctcgtggccgtagcactcgcaaggccgaagttaccactgcggtacccagaaaggttgcagaatccctctgagtcctcggagcccattccacttgagagccgcgaagagtatatgaatggcatgaacagacggaacatccttcgggagaagcagactgatgaaatcaaggatacaagaaatgagtccacgcaaaactgtgtcgtggctgaacccgaaaagatggagtcttcaatttcctcgagctcagaggagcagttctgtcgccttaatgagtacaaccagctgcagctgcaagccgcacatgcgcaggaacaaataaggagaatgaatgagaattcccatgtgcaggtgccatttcaacagctgaaccaattagccgcttacccttatgctgtgtggtactacccccagataatgcagtacgttccttttccccctttttccgacataagtaatcccaccgcacacgagaattatgaaaagaataatgtgatgctgcagtggtag

SEQ ID NO: 28513 - DNA, 531 bp, Artificial Sequence
  derived and/or modified sequence
atgcgcctgctgatcctcacatgtcttgtggctgtggccctcgcaaggccgaagctgcctttaaggtaccctgaaaggttacagaacccgtctgaatccagtgaacccatccccctggagtcccgcgaggaatatatgaacggaatgaacaggagaaacatactgagagagaaacaaaccgacgagatcaaagatacacggaatgagtccacacagaactgtgtcgtcgcagagcccgagaaaatggagtcttctatcagttcatcttccgaggaacagttctgccgactgaatgaatacaatcagctccagctccaggcagcacacgctcaagaacagatccggagaatgaatgaaaactcccatgtgcaggtcccgtttcagcagcttaaccagttggccgcttacccttatgcagtctggtactacccacagatcatgcaatatgttccgtttcctcccttcagtgatatctccaaccctactgcccacgagaattacgaaaaaaataacgtcatgctccagtggtag

SEQ ID NO: 28514 - DNA, 954 bp, Artificial Sequence
  derived and/or modified sequence
tcaacacaacttgcttctctccagacttgggcttaaggctctgataaccatgaggcttctcattctcacctgtcttgtggctgttgctcttgccaggcctaaacttcctcttagatacccagaacgccttcagaatccatcagagagcagtgagcctataccattagaatcaagagaggaatacatgaatggtatgaacaggagaaacattctgagagaaaaacagactgatgaaatcaaggatactaggaatgagtctactcagaactgtgttgtggcagagcctgagaagatggaatccagcatcagttcatcgagtgaggaacagttttgtagactgaacgaatacaaccaacttcagctgcaagctgcccatgcccaggagcaaattcgcagaatgaatgaaaacagccatgtccaagtgcctttccagcagctcaaccaacttgctgcctacccctatgctgtttggtactatccacaaatcatgcagtatgttcctttcccaccgttttccgacatctccaatcccactgctcatgaaaattatgaaaaaaataacgtcatgctacagtggtgatatgattgaaaatttcattctctgaatttctcctctcaaggaaaaccatcttatctgaagactggactgttgttttagaatagtaaaatcccatattgaaggaaattgttctttttgagttatctacttaatagcatatcattctttttcttaagctaaattttcctagagagtttattgtctaaatttcagttgtgtcttgccatatggagggcacctaatcagagggtattaaagtgtttactaagttttctagtggacattttgtttaaaaagtctttgaattgccagttctgtaagtgccatcaattaaaatagttttgtgcagtgacagagattttcttttttcttttcaataaattacactttaaggc

SEQ ID NO: 28515 - DNA, 531 bp, Artificial Sequence
  derived and/or modified sequence
atgcgtcttctgatattgacttgtcttgtggctgtagcactggctcgacctaaactgccactccgctaccctgaaagactgcagaacccttctgaatctagcgaaccaatacctctagaatcacgggaagaatacatgaatgggatgaatcggagaaacatcttacgggagaaacagacagacgaaattaaagatacccggaatgagagtacacagaattgcgttgtcgcagaacctgagaagatggagagttctatctctagctcttccgaagagcagttttgtcgactgaatgaatacaatcagctccaactgcaggccgcccacgcccaggaacaaattcgacgcatgaatgaaaattcacatgtgcaggttccatttcagcagctcaaccagttggccgcctacccctatgcagtgtggtactatcctcaaatcatgcagtacgtaccttttcctccattctccgatatttctaatccaactgctcacgaaaattatgagaagaataacgtcatgctccaatggtag

SEQ ID NO: 28516 - DNA, 531 bp, Artificial Sequence
  derived and/or modified sequence
atgagactgctgatcctgacctgcctggtggccgtggccctggccagacccaagctgcccctgagataccccgagagactgcagaaccccagcgagagcagcgagcccatccccctggagagcagagaggagtacatgaacggcatgaacagaagaaacatcctgagagagaagcagaccgacgagatcaaggacaccagaaacgagagcacccagaactgcgtggtggccgagcccgagaagatggagagcagcatcagcagcagcagcgaggagcagttctgcagactgaacgagtacaaccagctgcagctgcaggccgcccacgcccaggagcagatcagaagaatgaacgagaacagccacgtgcaggtgcccttccagcagctgaaccagctggccgcctacccctacgccgtgtggtactacccccagatcatgcagtacgtgcccttcccccccttcagcgacatcagcaaccccaccgcccacgagaactacgagaagaacaacgtgatgctgcagtggtag

SEQ ID NO: 28517 - DNA, 531 bp, Artificial Sequence
  derived and/or modified sequence
atgcggctgcttatcctgacctgtttagtggccgtcgcactcgcaagaccgaaactgccactgcgctacccagaacggctgcagaatcccagcgagagttctgaaccgattcctctggagtcacgggaagagtacatgaatggaatgaaccgaagaaatatcttgagggaaaagcagaccgacgagattaaggatacaaggaacgagtctactcagaactgcgtggtggcagaacccgaaaagatggagtcgtcgatatcgagctcttcagaagaacaattttgtagactgaacgaatataatcagctccagttgcaagcggcccacgcccaggagcagattagaaggatgaatgaaaacagtcatgttcaggtgccatttcagcagctgaatcagctggcggcatatccttacgccgtctggtactacccacagattatgcaatatgtgccatttccccctttctcagacatctccaacccaacagcccacgagaattacgaaaaaaataacgtgatgcttcaatggtag

SEQ ID NO: 28518 - DNA, 531 bp, Artificial Sequence
  derived and/or modified sequence
atgaggctgctgatcctgacctgcctggtggccgtggccctggcccggcccaagctgcccctgcgctacccagagcggctgcagaaccccagcgagagcagcgagcccatccccctggagagccgggaggagtacatgaatggcatgaacagaagaaacatcctgcgggagaagcagacagatgagatcaaggacaccagaaatgaaagcacccagaactgtgtggtggccgagcctgagaagatggagagcagcatcagcagcagcagcgaggagcagttctgccgcctgaatgagtacaaccagctgcagctgcaggccgcccacgcccaggagcagatccggaggatgaatgaaaacagccacgtgcaggtgcccttccagcagctgaaccagctggccgcctacccctatgctgtgtggtactacccccagatcatgcagtatgtgcccttcccccccttcagtgacatcagcaaccccacagcccatgaaaattatgagaagaacaacgtgatgctgcagtggtag

SEQ ID NO: 28519 - DNA, 531 bp, Artificial Sequence
  derived and/or modified sequence
atgcggctgctgatcctgacctgcctggtggccgtggccctggccaggcccaaactgccattgcgctaccctgaacgcctgcagaatcctagcgagagctctgaacctatcccattggagtccagagaagagtatatgaacggcatgaacaggaggaacattcttcgagaaaagcagaccgatgagattaaagacacacgaaacgagagtacgcagaattgcgtggtggcagagcccgagaagatggagtcgtctatttcctcgtcttctgaagagcagttctgtcgtctcaacgagtacaatcagctgcagctccaagcagcccacgcccaggaacagatcagacgaatgaatgagaatagccacgtccaggttccgtttcagcagctcaaccagctggctgcatacccctacgccgtttggtattacccccagatcatgcagtatgtcccattcccacccttctccgatatttcgaaccctactgctcacgagaattacgaaaagaataacgtgatgctgcaatggtag

SEQ ID NO: 28520 - RNA, 531 nt, Artificial Sequence
  derived and/or modified sequence
augcgccugcugauccucacaugucuuguggcuguggcccucgcaaggccgaagcugccuuuaagguacccugaaagguuacagaacccgucugaauccagugaacccaucccccuggagucccgcgaggaauauaugaacggaaugaacaggagaaacauacugagagagaaacaaaccgacgagaucaaagauacacggaaugaguccacacagaacugugucgucgcagagcccgagaaaauggagucuucuaucaguucaucuuccgaggaacaguucugccgacugaaugaauacaaucagcuccagcuccaggcagcacacgcucaagaacagauccggagaaugaaugaaaacucccaugugcaggucccguuucagcagcuuaaccaguuggccgcuuacccuuaugcagucugguacuacccacagaucaugcaauauguuccguuuccucccuucagugauaucuccaacccuacugcccacgagaauuacgaaaaaaauaacgucaugcuccagugguag

SEQ ID NO: 28521 - RNA, 531 nt, Artificial Sequence
  derived and/or modified sequence
augcgucuucugauauugacuugucuuguggcuguagcacuggcucgaccuaaacugccacuccgcuacccugaaagacugcagaacccuucugaaucuagcgaaccaauaccucuagaaucacgggaagaauacaugaaugggaugaaucggagaaacaucuuacgggagaaacagacagacgaaauuaaagauacccggaaugagaguacacagaauugcguugucgcagaaccugagaagauggagaguucuaucucuagcucuuccgaagagcaguuuugucgacugaaugaauacaaucagcuccaacugcaggccgcccacgcccaggaacaaauucgacgcaugaaugaaaauucacaugugcagguuccauuucagcagcucaaccaguuggccgccuaccccuaugcagugugguacuauccucaaaucaugcaguacguaccuuuuccuccauucuccgauauuucuaauccaacugcucacgaaaauuaugagaagaauaacgucaugcuccaaugguag

SEQ ID NO: 28522 - protein, 365 aa, Artificial Sequence
  derived and/or modified sequence
MASSSGSKAEFIVGGKYKLVRKIGSGSFGDIYLAINITNGEEVAVKLESQKARHPQLLYESKLYKILQGGVGIPHIRWYGQEKDYNVLVMDLLGPSLEDLFNFCSRRFTMKTVLMLADQMISRIEYVHTKNFIHRDIKPDNFLMGIGRHCNKCLESPVGKRKRSMTVSTSQDPSFSGLNQLFLIDFGLAKKYRDNRTRQHIPYREDKNLTGTARYASINAHLGIEQSRRDDMESLGYVLMYFNRTSLPWQGLKAATKKQKYEKISEKKMSTPVEVLCKGFPAEFAMYLNYCRGLRFEEAPDYMYLRQLFRILFRTLNHQYDYTFDWTMLKQKAAQQAASSSGQGQQAQTPTGKQTDKTKSNMKGF

SEQ ID NO: 28523 - DNA, 1098 bp, Artificial Sequence
  derived and/or modified sequence
atggcaagtagcagtggttcaaaggcagagtttatagtcggtggcaaatataagctggtgagaaagatcggcagtggatcgttcggcgacatatatctggccatcaatatcactaatggggaggaagtcgcagttaagctggaatctcaaaaggcgcggcacccccaattgttgtatgaatccaagctgtataaaattctccagggcggcgtgggtatcccacacatccgctggtacggacaagaaaaagactataatgtactggttatggacctcttgggaccaagcctggaggacctgttcaatttctgttcccgccgcttcaccatgaagaccgttctcatgctggcagatcaaatgattagccgaattgagtatgtccacacgaaaaactttattcatagggatattaaacctgataacttcttgatgggaatcggccggcattgcaacaaatgtctggagtcacctgttggcaagcgaaagaggtcaatgacggtgagcacaagtcaggacccttcattcagtgggctcaaccagctcttcctaattgacttcggtcttgcaaaaaaatatcgggacaatagaacacgccaacacattccttaccgagaggacaaaaacttaacaggcaccgccagatacgcttccatcaacgcacacctgggcatcgaacagtcacggcgcgacgatatggaatctttaggctacgtgctcatgtactttaaccggacatcactgccctggcaaggactgaaggccgctactaagaagcagaagtacgagaagatctcagaaaaaaaaatgagtacgcctgtggaagtgttatgcaaaggatttccggcagagtttgctatgtatttaaactactgcagaggcctgaggtttgaggaagcccctgattatatgtatctgaggcaactttttcgtatcctgttcagaactttgaaccaccagtacgactataccttcgactggaccatgcttaagcagaaggcggctcagcaggcagcctcatcctcgggacaaggccaacaagctcagacacctaccggaaagcaaactgataagactaaatcgaatatgaagggattctag

SEQ ID NO: 28524 - DNA, 1098 bp, Artificial Sequence
  derived and/or modified sequence
atggccagcagcagcggcagcaaggccgagttcatcgtgggcggcaagtacaagctggtgaggaagattggcagcggcagctttggagacatctacctggccatcaacatcaccaatggagaggaggtggccgtgaagctggagagccagaaggcccggcacccccagctgctgtatgagagcaagctgtacaagatcctgcagggcggcgtgggcatcccccacatccgctggtacggccaggagaaggactacaacgtgctggtgatggacctgctgggccccagcctggaggacctcttcaacttctgcagccgccgcttcaccatgaagacagtgctgatgctggccgaccagatgatcagccgcatcgagtatgtgcacaccaagaacttcatccaccgggacatcaagccagacaacttcctgatgggcatcggccgccactgcaacaagtgcctggagagccctgtgggcaagaggaagaggtccatgacagtgtccaccagccaggaccccagcttcagcggcctgaaccagctgttcctgattgactttggcctggccaagaagtacagagacaacagaacccggcagcacatcccctaccgggaggacaagaacctgaccggcacagcccgctatgccagcatcaatgcccacctgggcatcgagcagagcagaagagatgacatggagagcctgggctacgtgctgatgtacttcaacagaaccagcctgccctggcagggcctgaaggccgccaccaagaagcagaagtatgagaagatcagcgagaagaagatgagcacccctgtggaggtgctgtgcaagggcttccctgctgagtttgccatgtacctgaactactgccggggcctgcgctttgaggaggccccagactacatgtacctgcggcagctgttccgcatcctcttccgcaccctgaaccaccagtatgactacacctttgactggaccatgctgaagcagaaggccgcccagcaggccgccagcagcagcggccagggccagcaggcccagacccccaccgggaagcagacagacaagaccaagagcaacatgaagggcttctag

SEQ ID NO: 28525 - DNA, 1098 bp, Artificial Sequence
  derived and/or modified sequence
atggccagcagcagcggcagcaaggccgagttcatcgtgggcggcaaatacaagttggtgagaaaaattggctcagggagctttggcgacatatatctggcgatcaatatcaccaacggagaggaggttgccgtgaagttagaatctcagaaggctaggcatcctcagctgttatacgaatctaagctgtacaagatcctccaaggaggggtagggataccacacatccggtggtatggtcaggaaaaggactacaacgtcctagtgatggaccttctgggcccatctctggaagatctcttcaacttctgctctaggcgcttcactatgaagacagttcttatgctggccgatcagatgatctcccgaattgagtacgtgcacaccaagaactttatacatcgcgacatcaaaccggataactttctaatggggatcggcagacactgtaacaagtgtctcgaaagtcccgtggggaaaaggaaaagaagcatgacagtgtccacatctcaggatccaagcttcagtggactgaaccaactgttcctcatcgacttcggcctagcaaaaaagtacagagataaccggactcggcagcatataccttacagggaggacaaaaacctgaccggaaccgccaggtacgcaagcattaatgcccacttgggcatcgagcagagtagaagagacgatatggagtcactgggctacgtcctcatgtactttaacagaacctccttgccctggcaagggctgaaggcagccaccaaaaagcaaaagtatgagaaaatcagcgagaagaagatgagtacgccggtggaggttctctgcaaaggtttcccggccgaatttgctatgtatctgaattattgcaggggactgcgattcgaggaagctcccgactatatgtacctgagacagctgttccgaatcctttttcggacactgaatcaccagtacgactacacatttgactggactatgttgaagcagaaggctgcgcaacaggcggcaagctcttcgggtcagggacagcaagcccagacacctaccggaaagcagacagacaagactaagagtaacatgaaaggattctag

SEQ ID NO: 28526 - DNA, 1098 bp, Artificial Sequence
  derived and/or modified sequence
atggccagcagctcaggctctaaagctgaattcatcgtgggcggtaagtacaagctagttcgcaaaataggcagcggaagctttggcgacatttacctggccattaacattacaaatggcgaagaggtggctgtcaaactcgagtcacagaaagccaggcaccctcagcttctgtacgagagcaaactatataagattctgcaaggaggggtgggaattccgcacattaggtggtatggccaagagaaggactacaacgtcctagtcatggacctgctcggaccctcactcgaggatcttttcaatttttgtagccggaggttcactatgaagaccgtgctaatgctggctgaccagatgattagtcgaatcgagtatgtccacaccaaaaattttatccatcgcgatattaagcccgataattttctgatgggcatcggcaggcattgcaacaagtgcctggagagccccgtcggtaaacgcaagcggtcaatgacagtttctacctcacaggatccctccttctcaggacttaatcagctctttctcatcgacttcggactcgcaaagaagtatagagacaataggacacgacagcacatcccttatcgggaagacaaaaatctcactgggactgccaggtatgcatcaatcaacgcccacctgggcatcgagcagagcagacgggatgatatggaaagccttggctacgtgctaatgtactttaaccgcaccagcctcccatggcaggggctgaaggccgctactaaaaagcagaaatacgagaaaatcagcgagaagaagatgagcacacccgttgaagtactgtgcaagggatttcctgcagagtttgccatgtacttaaattattgcaggggactgaggttcgaagaggcccctgactacatgtatctgcgtcaattatttcgcatccttttccgtacgctgaatcaccagtatgattatacattcgactggacaatgctgaagcaaaaagccgctcagcaggccgctagcagctcaggccagggtcagcaggcccagacacccacaggaaaacaaaccgataagaccaagagcaatatgaaaggattttag

SEQ ID NO: 28527 - DNA, 1098 bp, Artificial Sequence
  derived and/or modified sequence
atggcgagtagcagcggctccaaggctgaattcattgtcggagggaaatataaactggtacggaagatcgggtctggctccttcggggacatctatttggcgatcaacatcaccaacggcgaggaagtggcagtgaagctagaatctcagaaggccaggcatccccagttgctgtacgagagcaagctctataagattcttcaaggtggggttggcatcccccacatacggtggtatggtcaggaaaaagactacaatgtactagtcatggatcttctgggacctagcctcgaagacctcttcaatttctgttcaagaaggttcacaatgaaaactgtacttatgttagctgaccagatgatcagtagaattgaatatgtgcatacaaagaattttatacacagagacattaaaccagataacttcctaatgggtattgggcgtcactgtaataagtgtttagaatctccagtggggaagaggaaaagaagcatgactgttagtacttctcaggacccatctttctcaggattaaaccagttattccttattgattttggtttggccaaaaagtacagagacaacaggacaaggcaacacataccatacagagaagataaaaacctcactggcactgcccgatatgctagcatcaatgcacatcttggtattgagcagagtcgccgagatgacatggaatcattaggatatgttttgatgtattttaatagaaccagcctgccatggcaagggctaaaggctgcaacaaagaaacaaaaatatgaaaagattagtgaaaagaagatgtccacgcctgttgaagttttatgtaaggggtttcctgcagaatttgcgatgtacttaaactattgtcgtgggctacgctttgaggaagccccagattacatgtatctgaggcagctattccgcattcttttcaggaccctgaaccatcaatatgactacacatttgattggacaatgttaaagcagaaagcagcacagcaggcagcctcttccagtgggcagggtcagcaggcccaaacccccacaggcaagcaaactgacaaaaccaagagtaacatgaaaggtttctaa

SEQ ID NO: 28528 - DNA, 1098 bp, Artificial Sequence
  derived and/or modified sequence
atggccagcagcagcggcagcaaggccgagttcatcgtgggcggcaagtacaagctggtgagaaagatcggcagcggcagcttcggcgacatctacctggccatcaacatcaccaacggcgaggaggtggccgtgaagctggagagccagaaggccagacacccccagctgctgtacgagagcaagctgtacaagatcctgcagggcggcgtgggcatcccccacatcagatggtacggccaggagaaggactacaacgtgctggtgatggacctgctgggccccagcctggaggacctgttcaacttctgcagcagaagattcaccatgaagaccgtgctgatgctggccgaccagatgatcagcagaatcgagtacgtgcacaccaagaacttcatccacagagacatcaagcccgacaacttcctgatgggcatcggcagacactgcaacaagtgcctggagagccccgtgggcaagagaaagagaagcatgaccgtgagcaccagccaggaccccagcttcagcggcctgaaccagctgttcctgatcgacttcggcctggccaagaagtacagagacaacagaaccagacagcacatcccctacagagaggacaagaacctgaccggcaccgccagatacgccagcatcaacgcccacctgggcatcgagcagagcagaagagacgacatggagagcctgggctacgtgctgatgtacttcaacagaaccagcctgccctggcagggcctgaaggccgccaccaagaagcagaagtacgagaagatcagcgagaagaagatgagcacccccgtggaggtgctgtgcaagggcttccccgccgagttcgccatgtacctgaactactgcagaggcctgagattcgaggaggcccccgactacatgtacctgagacagctgttcagaatcctgttcagaaccctgaaccaccagtacgactacaccttcgactggaccatgctgaagcagaaggccgcccagcaggccgccagcagcagcggccagggccagcaggcccagacccccaccggcaagcagaccgacaagaccaagagcaacatgaagggcttctag

SEQ ID NO: 28529 - protein, 931 aa, Artificial Sequence
  derived and/or modified sequence
MAEIKEKICDYLFNVSDSSALNLAKNIGLTKARDINAVLIDMERQGDVYRQGTTPPIWHLTDKKRERMQIKRNTNSVPETAPAAIPETKRNAEFLTCNIPTSNASNNMVTTEKVENGQEPVIKLENRQEARPEPARLKPPVHYNGPSKAGYVDFENGQWATDDIPDDLNSIRAAPGEFRAIMEMPSFYSHGLPRCSPYKKLTECQLKNPISGLLEYAQFASQTCEFNMIEQSGPPHEPRFKFQVVINGREFPPAEAGSKKVAKQDAAMKAMTILLEEAKAKDSGKSEESSHYSTEKESEKTAESQTPTPSATSFFSGKSPVTTLLECMHKLGNSCEFRLLSKEGPAHEPKFQYCVAVGAQTFPSVSAPSKKVAKQMAAEEAMKALHGEATNSMASDNQPEGMISESLDNLESMMPNKVRKIGELVRYLNTNPVGGLLEYARSHGFAAEFKLVDQSGPPHEPKFVYQAKVGGRWFPAVCAHSKKQGKQEAADAALRVLIGENEKAERMGFTEVTPVTGASLRRTMLLLSRSPEAQPKTLPLTGSTFHDQIAMLSHRCFNTLTNSFQPSLLGRKILAAIIMKKDSEDMGVVVSLGTGNRCVKGDSLSLKGETVNDCHAEIISRRGFIRFLYSELMKYNSQTAKDSIFEPAKGGEKLQIKKTVSFHLYISTAPCGDGALFDKSCSDRAMESTESRHYPVFENPKQGKLRTKVENGEGTIPVESSDIVPTWDGIRLGERLRTMSCSDKILRWNVLGLQGALLTHFLQPIYLKSVTLGYLFSQGHLTRAICCRVTRDGSAFEDGLRHPFIVNHPKVGRVSIYDSKRQSGKTKETSVNWCLADGYDLEILDGTRGTVDGPRNELSRVSKKNIFLLFKKLCSFRYRRDLLRLSYGEAKKAARDYETAKNYFKKGLKDMGYGNWISKPQEEKNFYLCPV

SEQ ID NO: 28530 - DNA, 2796 bp, Artificial Sequence
  derived and/or modified sequence
atggctgaaatcaaggaaaagatctgcgactatttgtttaacgtcagcgacagcagtgcgcttaatctggctaagaacattgggttgactaaagccagagacataaacgccgtgctgatagacatggagcgtcagggtgacgtgtacaggcagggcaccacaccaccaatttggcacctgactgataaaaagagggagcgcatgcagatcaaacgtaacactaatagtgtacccgagactgcacctgcagccattcctgagacaaaaagaaatgctgaatttctgacctgcaatatacctactagtaatgcatcaaataatatggttactaccgagaaggtggaaaatggccaggagccagtgatcaagttagagaaccggcaggaagctaggccagagcctgcccgcctcaagccgcctgtgcactataacggacccagtaaagcaggctacgtggactttgagaacgggcaatgggccactgatgacatccctgacgacctgaactccataagggccgcacccggcgaattccgcgccatcatggagatgccttcgttttactctcacggactgccacggtgctctccgtacaaaaagctgactgagtgccagctgaagaaccccatctccgggttactggaatatgcacaattcgctagccagacttgcgagttcaatatgattgagcagtccgggccacctcatgagcctaggttcaaatttcaagttgtgatcaacggacgtgagttccctcccgccgaagctggcagtaagaaagtggctaagcaagacgccgcaatgaaagctatgacaattttactggaggaggcgaaagctaaagactctgggaaaagcgaagaaagctctcattatagcactgaaaaagagtcagaaaaaaccgccgaatcccagactcctacaccgagtgccacaagttttttttcgggaaagtctcccgtcaccactttgctggagtgcatgcacaagctcggcaactcttgcgaatttcgactattatccaaggaagggccggctcacgaacccaaatttcaatactgtgttgctgtgggggcccagacctttccatccgtaagcgccccatctaaaaaagtcgcgaagcaaatggccgcagaggaagccatgaaggcactacacggagaagctaccaattccatggcttcagacaaccaacccgaaggcatgatcagtgagtctttggataatcttgaaagtatgatgccaaataaagtcagaaagattggggagctggttcgttacctgaatacgaatcccgttggtggtttgttggagtatgcaaggtcacacggctttgccgccgaatttaagttggtggaccagagcggtcccccgcatgaacctaagttcgtctaccaggcaaaagtcggaggtcgatggttccccgcggtatgtgctcactctaagaaacaaggtaagcaggaagcagccgacgccgcgctgagggtgctgatcggtgaaaatgaaaaggccgaacgcatgggcttcacagaagtgacccccgtaaccggcgcctccctacggagaactatgcttctgctctcccgttctcccgaagcacagcccaaaactcttccactgacagggtcaaccttccatgatcagatcgcgatgctgagtcatcggtgctttaataccctgactaactcttttcaaccgtccttgttggggagaaagatcttggcggctattattatgaagaaggacagcgaggacatgggcgtggtggtctccctgggcaccggaaaccggtgtgtgaagggcgattccctatcactgaagggagagaccgtgaacgactgccacgctgagattatttcacggagaggattcattcgctttctctacagcgaattaatgaagtataatagccaaaccgcaaaagattccattttcgaaccagccaaaggaggcgagaaactccagatcaagaagacagtgtcgtttcacctctatatcagtaccgctccttgcggggatggcgcactatttgacaagtcctgtagtgaccgggccatggaatctactgagtctcgacactacccggtgttcgagaatcctaaacaaggaaaactacgaacgaaggtcgagaatggggaaggtacaatccccgtggagtcctccgacattgttcccacatgggatggtattcgcctgggcgagcggctccgcaccatgagttgtagcgataagatactgcgatggaatgttctgggcctgcagggggctctattaactcactttctccagccaatttacctcaaatccgtgaccctcggctatctttttagtcagggccacttgacccgcgcaatatgctgcagggttacacgcgacggctccgcattcgaggacggccttaggcatcctttcatcgtgaatcaccctaaagtgggcagagtgtccatatacgattccaagcgccagagcgggaagactaaagaaactagcgtgaactggtgtctagccgatggttatgatttagaaatcctcgatggcacaaggggaactgtcgatgggccacggaacgagctctctagagttagcaagaagaatatctttcttctctttaaaaagctctgtagttttagatatagacgcgatttgctgcgcttaagctatggcgaggccaagaaagccgcgagggactacgagactgcaaagaattacttcaaaaagggactgaaggatatgggatatggcaactggatctccaagccccaagaagaaaaaaatttttatttatgccccgtgtag

SEQ ID NO: 28531 - DNA, 2796 bp, Artificial Sequence
  derived and/or modified sequence
atggccgagatcaaggagaagatctgtgactacctgttcaacgtgtctgacagcagcgccctgaacctggccaagaacatcggcctgaccaaggcccgggacatcaatgctgtgctgattgacatggagcggcagggagatgtgtaccggcagggcaccaccccacccatctggcacctgacagacaagaagcgggagaggatgcagatcaagaggaacaccaacagcgtgcctgagacagccccagctgccatccctgagaccaagagaaatgctgagttcctgacctgcaacatccccaccagcaatgccagcaacaacatggtgaccacagagaaggtggagaatggccaggagcccgtcatcaagctggagaaccggcaggaggcccggcctgagcccgcccggctgaagccccctgtgcactacaacggccccagcaaggccggctacgtggactttgaaaatggccagtgggccacagatgacatcccagatgacctgaacagcatccgggccgcccctggagagttccgggccatcatggagatgcccagcttctacagccacggcctgccccgctgcagcccctacaagaagctgacagagtgccagctgaagaaccccatcagcggcctgctggagtatgcccagtttgccagccagacctgtgagttcaacatgattgagcagagcggcccccctcatgagccccgcttcaagttccaggtggtgatcaatggccgggagttccccccagctgaggccggcagcaagaaggtggccaagcaggatgctgccatgaaggccatgaccatcctgctggaggaggccaaggccaaggacagcggcaagtctgaggagagcagccactacagcacagagaaggagagcgagaagacagctgagagccagacccccacccccagcgccaccagcttcttcagcggcaagagccctgtgaccaccctgctggagtgcatgcacaagctgggcaacagctgtgagttccggctgctgagcaaggagggccctgcccacgagcccaagttccagtactgtgtggccgtgggcgcccagaccttccccagcgtgtctgcccccagcaagaaggtggccaagcagatggctgctgaggaggccatgaaggccctgcacggggaggccaccaacagcatggccagtgacaaccagcctgagggcatgatcagcgagagcctggacaacctggagagcatgatgcccaacaaggtgaggaagattggagagctggtgcgctacctgaacaccaaccctgtgggcggcctgctggagtatgcccggagccacggctttgctgctgagttcaagctggtggaccagagcggcccccctcatgagcccaagtttgtgtaccaggccaaggtgggcggccgctggttccctgctgtgtgtgcccacagcaagaagcagggcaagcaggaggccgcagatgctgccctgcgggtgctgattggagaaaatgagaaggccgagaggatgggcttcacagaggtgacccctgtgactggagccagcctgcggaggaccatgctgctgctgagccgcagccctgaggcccagcccaagaccctgcccctgaccggcagcaccttccatgaccagatcgccatgctgagccaccgctgcttcaacaccctgaccaacagcttccagcccagcctgctgggcaggaagatcctggccgccatcatcatgaagaaggacagcgaggacatgggcgtggtggtgtccctgggcaccggcaacagatgtgtgaagggggacagcctgagcctgaagggggagaccgtgaatgactgccacgccgagatcatcagcagaagaggcttcatccgcttcctgtacagcgagctgatgaagtacaacagccagacagccaaggacagcatctttgagcccgccaagggcggggagaagctgcagatcaagaagacagtgtccttccacctgtacatcagcacagccccctgtggagatggagccctgtttgacaagagctgcagcgaccgggccatggagagcacagagagccgccactaccctgtgtttgagaaccccaagcagggcaagctgcggaccaaggtggagaatggagagggcaccatccctgtggagagcagtgacatcgtgcccacctgggatggcatccggctgggggagcggctgcggaccatgagctgcagcgacaagatcctgcgctggaatgtgctgggcctgcagggcgccctgctgacccacttcctgcagcccatctacctgaagtctgtgaccctgggctacctgttcagccagggccacctgacccgggccatctgctgccgggtgaccagagatggcagcgcctttgaagatggcctgcggcaccccttcatcgtgaaccaccccaaggtgggccgggtgtccatctatgacagcaagaggcagagcggcaagaccaaggagacctctgtgaactggtgcctggctgatggctatgacctggagatcctggatggcacccggggcaccgtggatggccccagaaatgagctgagccgggtgtccaagaagaacatcttcctgctcttcaagaagctgtgcagcttccgctacagaagagacctgctgcggctgtcctatggagaggccaagaaggccgcccgggactatgaaacagccaagaactacttcaagaagggcctgaaggacatgggctacggcaactggatcagcaagccccaggaggagaagaacttctacctgtgccctgtgtag

SEQ ID NO: 28532 - DNA, 2796 bp, Artificial Sequence
  derived and/or modified sequence
atggccgagatcaaggagaagatctgcgactacctgttcaacgtgtccgacagctctgccctgaatctggccaagaatatcgggctgaccaaggcgcgggatatcaacgcagttctgatcgacatggagaggcagggcgatgtctatagacagggcacaacaccacccatttggcacttaaccgacaagaagagggaacggatgcagatcaaaaggaacacaaacagtgtacccgaaactgcccccgccgcaatccccgagacaaagcgcaacgcagagtttctgacatgcaacatcccaacctccaatgcctcaaataatatggtgaccacagaaaaggttgaaaatggccaggaacccgtgatcaagctggagaacaggcaagaagcccgccctgagcctgcccgtttaaagccccccgtgcattataacggcccttctaaagcaggctacgtcgatttcgagaacggccaatgggcaacagacgacattcctgacgacctcaacagcattagagcagcacctggagaatttcgcgctattatggagatgccttcattctactctcacgggctccctaggtgctccccttataagaaactcaccgaatgccaacttaagaatccaatctcaggcctgcttgagtacgcacagtttgcctctcagacgtgcgagttcaacatgattgaacaatcaggccccccacacgaacctcgattcaaattccaggtagtgatcaatggtcgcgagtttccaccagccgaggcgggttccaaaaaagttgccaagcaggacgccgccatgaaagcgatgacgatactgctggaggaggctaaggccaaggattcgggaaagtcagaggaatcttcccactattccaccgaaaaagagagcgaaaagaccgccgagtctcagacacccactcctagcgcgacttccttctttagtggcaaatctcccgtgactacccttttagagtgtatgcataaactgggtaacagttgcgaattccggttactgtctaaagaagggcccgcacatgaacccaaatttcaatactgtgtagctgtcggtgctcagacatttcccagcgtctctgctcctagtaaaaaggtggcgaaacaaatggccgccgaagaggcaatgaaggccctacacggtgaggcgactaattccatggccagtgacaatcagcccgaggggatgatttccgagagtctagataaccttgaatcaatgatgccaaacaaggtgcggaagatcggcgaactcgtgcgatacttaaacactaacccggtaggcgggctacttgaatacgctaggtcccacggcttcgctgcagagtttaaattagttgatcagtcaggaccaccgcatgaacccaagtttgtgtaccaggccaaagtgggcggtagatggtttccagccgtttgcgcccactccaagaaacaggggaaacaagaagccgccgacgcagccctcagagtgctgatcggcgagaatgagaaagccgaaagaatgggatttacggaagtaacacctgtgacaggcgccagcctcagacggactatgctgctcctcagtagatcacctgaagctcagccaaagaccttgccccttacaggtagcacgtttcacgatcagatcgcaatgctctcacacagatgcttcaatacacttacgaactccttccagccttccctgctgggaaggaagattcttgcagcaatcatcatgaagaaagatagcgaggacatgggggtggttgtctcactgggcaccggcaacaggtgtgtgaagggtgattcgctgtccctgaaaggagaaaccgtgaacgattgtcatgctgagataatcagcagacgaggctttatccgcttcctctacagtgagcttatgaaatacaactcccagactgcgaaggacagtattttcgagcctgccaagggaggcgaaaagctgcaaatcaaaaaaacggtgtcctttcatctctatatatccacggctccttgcggggatggcgcattatttgacaaatcttgttccgatcgggcgatggaatctactgagtcacgccactatccagtgtttgagaaccccaagcaaggaaaattgcgaacaaaggttgagaacggcgaggggactatcccagtggaatcatccgacatcgttcccacgtgggacggtattcgcctcggcgagaggctcagaaccatgtcatgctcagacaaaatactacgatggaatgtgctggggttgcagggcgcgctacttacacactttctacagcccatctacttgaaaagcgtaacccttgggtacctgttcagccaaggccatctaacgagggccatctgctgcagagtcactcgggatgggtctgcctttgaggacggtctgcgccacccctttattgtgaatcatcctaaggtgggaagagtctcaatatatgacagtaaaagacagtcgggtaagaccaaagagacctccgtcaactggtgtctagctgacggctacgacctggagatacttgatggaacaaggggtaccgtagacggacctcgcaacgagttgagtcgggttagtaagaagaatatctttctgcttttcaagaagctttgttccttcaggtaccgccgtgaccttctgaggctctcctatggcgaagcgaagaaggcagcgcgcgattatgagactgccaaaaactatttcaagaagggcctcaaggatatgggctatggaaactggataagtaagccccaagaagagaagaatttttatctctgtcccgtctag

SEQ ID NO: 28533 - DNA, 2796 bp, Artificial Sequence
  derived and/or modified sequence
atggccgagatcaaggagaagatctgtgactacctgttcaatgtgtctgactcctctgctttgaatctcgcaaagaatatcggccttacaaaggcccgtgatatcaacgccgtgctgatcgatatggagcggcaaggtgatgtgtatcgacagggaacaacacctcctatttggcacctgactgacaagaaacgggaacggatgcagatcaagaggaacactaatagtgtgcccgaaacggcccctgcggctatcccggaaactaaacgaaacgctgagttcctgacctgcaacatccctacctccaacgcctccaataacatggtcactaccgaaaaggtagaaaatggtcaagaacctgtgatcaagctggagaatcgccaggaggcccgtccggaacccgcaagactcaagccccctgtgcactataacggaccctctaaagccggatacgtcgattttgagaacggacagtgggctacagatgatatcccggacgacctgaactccattagggctgcccctggggaattcagggccataatggagatgccatccttttattcacatggacttccacgctgtagcccgtacaagaagcttacggagtgtcagttgaagaaccccattagtggcctgctcgaatatgctcagttcgcaagccagacgtgtgaatttaacatgatcgaacaaagtggccctccccacgaacctagattcaagtttcaagtcgtgattaacggtcgagaattccctccagccgaggccggttctaagaaagtggcaaagcaggacgcagcaatgaaggccatgacaattctcctggaggaagctaaggcaaaggattctggcaagagcgaagagtcttctcactactccactgagaaggagtctgagaagaccgccgaatcacagacaccgactccgagtgctacctcattcttttcgggcaagtctcctgtgaccacacttcttgaatgcatgcataagctaggcaattcctgcgagttcaggttgctgagtaaagaaggccctgctcacgagccgaagttccagtactgcgttgctgtaggagcacagacttttcccagcgtgagtgccccaagtaaaaaggtggcaaagcagatggctgctgaggaagccatgaaagcgttacatggcgaagcgactaatagcatggcaagcgacaaccaaccggaaggcatgatcagcgagagcctcgataacctcgaaagtatgatgcctaacaaagtgagaaaaatcggcgagctcgttcgctacctcaataccaatccagtcgggggacttctcgagtacgcccgatcacacgggtttgccgctgagttcaagctggtcgatcagtcaggcccaccacacgaacccaagtttgtgtaccaagccaaggtcggagggagatggtttcccgctgtgtgcgcccactctaaaaagcaaggaaagcaggaggcagcggatgctgcattacgtgtacttatcggggagaacgaaaaagcagagcgcatgggcttcaccgaggtcacccctgtgacaggcgcttcgctgagaaggaccatgctcctgcttagcagaagtccggaagcccagcccaagacactccctctcacggggtccaccttccatgaccagatcgccatgctgtctcatcgttgctttaataccctaactaattcctttcaaccatccttactggggagaaagatcttagccgcaatcataatgaaaaaggactctgaagacatgggcgttgtggttagcttgggcacgggcaatagatgcgttaagggagattccctgagccttaagggcgagactgtcaacgattgccacgctgagataatcagccgtcggggatttattaggtttctttacagcgaactgatgaaatacaactcgcaaaccgctaaagatagtattttcgagccagccaaagggggtgaaaagctccagatcaagaaaaccgtgagcttccatctctatatttccacagcgccatgtggagatggcgctcttttcgacaaaagctgctcagacagagctatggagagcacagaaagcagacactaccctgtgtttgagaacccaaaacaagggaagctgcgcaccaaggtggagaacggtgaggggaccatacccgtggagagttccgacatagttcccacttgggacggcattagactgggggagcggttaaggaccatgagttgctcagacaaaatccttagatggaacgtgctgggcctacagggagcactactgacacatttcttgcagccaatttatctgaaatcagtgaccctgggttatctcttctcccaggggcatctgactcgagctatttgctgccgtgtgacacgagatggctcagcttttgaggacggcctgaggcatccgttcattgtgaaccatccaaaggtggggagggtctcaatatatgatagcaaacggcaaagtggcaaaacgaaggaaacatctgtcaactggtgcctagcagatggctatgacctcgagattttagatggtacacggggaacagtagacgggccaaggaatgaactgagcagagtgagcaagaagaatatctttctgctgttcaagaagttgtgttcattccggtataggcgcgatctgcttaggctctcctacggcgaggcgaagaaggccgcaagagactatgaaactgctaagaactatttcaagaaggggctaaaagatatgggttacggaaactggataagcaagccacaggaggaaaagaatttttacctctgccctgtatag

SEQ ID NO: 28534 - DNA, 2796 bp, Artificial Sequence
  derived and/or modified sequence
atggccgagatcaaggagaagatctgcgactacctgttcaacgtgagcgacagcagcgccctgaacctggccaagaacatcggcctgaccaaggccagagacatcaacgccgtgctgatcgacatggagagacagggcgacgtgtacagacagggcaccaccccccccatctggcacctgaccgacaagaagagagagagaatgcagatcaagagaaacaccaacagcgtgcccgagaccgcccccgccgccatccccgagaccaagagaaacgccgagttcctgacctgcaacatccccaccagcaacgccagcaacaacatggtgaccaccgagaaggtggagaacggccaggagcccgtgatcaagctggagaacagacaggaggccagacccgagcccgccagactgaagccccccgtgcactacaacggccccagcaaggccggctacgtggacttcgagaacggccagtgggccaccgacgacatccccgacgacctgaacagcatcagagccgcccccggcgagttcagagccatcatggagatgcccagcttctacagccacggcctgcccagatgcagcccctacaagaagctgaccgagtgccagctgaagaaccccatcagcggcctgctggagtacgcccagttcgccagccagacctgcgagttcaacatgatcgagcagagcggccccccccacgagcccagattcaagttccaggtggtgatcaacggcagagagttcccccccgccgaggccggcagcaagaaggtggccaagcaggacgccgccatgaaggccatgaccatcctgctggaggaggccaaggccaaggacagcggcaagagcgaggagagcagccactacagcaccgagaaggagagcgagaagaccgccgagagccagacccccacccccagcgccaccagcttcttcagcggcaagagccccgtgaccaccctgctggagtgcatgcacaagctgggcaacagctgcgagttcagactgctgagcaaggagggccccgcccacgagcccaagttccagtactgcgtggccgtgggcgcccagaccttccccagcgtgagcgcccccagcaagaaggtggccaagcagatggccgccgaggaggccatgaaggccctgcacggcgaggccaccaacagcatggccagcgacaaccagcccgagggcatgatcagcgagagcctggacaacctggagagcatgatgcccaacaaggtgagaaagatcggcgagctggtgagatacctgaacaccaaccccgtgggcggcctgctggagtacgccagaagccacggcttcgccgccgagttcaagctggtggaccagagcggccccccccacgagcccaagttcgtgtaccaggccaaggtgggcggcagatggttccccgccgtgtgcgcccacagcaagaagcagggcaagcaggaggccgccgacgccgccctgagagtgctgatcggcgagaacgagaaggccgagagaatgggcttcaccgaggtgacccccgtgaccggcgccagcctgagaagaaccatgctgctgctgagcagaagccccgaggcccagcccaagaccctgcccctgaccggcagcaccttccacgaccagatcgccatgctgagccacagatgcttcaacaccctgaccaacagcttccagcccagcctgctgggcagaaagatcctggccgccatcatcatgaagaaggacagcgaggacatgggcgtggtggtgagcctgggcaccggcaacagatgcgtgaagggcgacagcctgagcctgaagggcgagaccgtgaacgactgccacgccgagatcatcagcagaagaggcttcatcagattcctgtacagcgagctgatgaagtacaacagccagaccgccaaggacagcatcttcgagcccgccaagggcggcgagaagctgcagatcaagaagaccgtgagcttccacctgtacatcagcaccgccccctgcggcgacggcgccctgttcgacaagagctgcagcgacagagccatggagagcaccgagagcagacactaccccgtgttcgagaaccccaagcagggcaagctgagaaccaaggtggagaacggcgagggcaccatccccgtggagagcagcgacatcgtgcccacctgggacggcatcagactgggcgagagactgagaaccatgagctgcagcgacaagatcctgagatggaacgtgctgggcctgcagggcgccctgctgacccacttcctgcagcccatctacctgaagagcgtgaccctgggctacctgttcagccagggccacctgaccagagccatctgctgcagagtgaccagagacggcagcgccttcgaggacggcctgagacaccccttcatcgtgaaccaccccaaggtgggcagagtgagcatctacgacagcaagagacagagcggcaagaccaaggagaccagcgtgaactggtgcctggccgacggctacgacctggagatcctggacggcaccagaggcaccgtggacggccccagaaacgagctgagcagagtgagcaagaagaacatcttcctgctgttcaagaagctgtgcagcttcagatacagaagagacctgctgagactgagctacggcgaggccaagaaggccgccagagactacgagaccgccaagaactacttcaagaagggcctgaaggacatgggctacggcaactggatcagcaagccccaggaggagaagaacttctacctgtgccccgtgtag

SEQ ID NO: 28535 - protein, 781 aa, Artificial Sequence
  derived and/or modified sequence
MDSFDLALLQEWDLESLWGEDILNQRNDSLVVEFQSSASRCRSVYEPDRNALRRKERERRNQETQQDDGTFNSSYSLFSEPYKTNKGDELSNRIQNTLGNYDEMKDFLTDRSNQSHLVGVPKPGVPQTPVNKIDEHFVADSRAQNQPSSICSTTTSTPAAVPVQQSKRGTMGWQKAGHPPSDGQQRATQQGSLRTLLGDGVGRQQPRAKQVCNVEVGLQTQERPPAMAAKHSSSGHCVQNFPPSLASKPSLVQQKPTAYVRPMDGQDQAPDESPKLKSSSETSVHCTSYRGVPASKPEPARAKAKLSKFSIPKQGEESRSGETNSCVEEIIREMTWLPPLSAIQAPGKVEPTKFPFPNKDSQLVSSGHNNPKKGDAEPESPDSGTSNTSMLEDDLKLSSDEEENEQQAAQRTALRALSDSAVVQQPNCRTSVPSSKGSSSSSSSGSSSSSSDSESSSGSDSETESSSSESEGSKPPHFSSPEAEPASSNKWQLDKWLNKVNPHKPPILIQNESHGSESNQYYNPVKEDVQDCGKVPDVCQPSLREKEIKSTCKEEQRPRTANKAPGSKGVKQKSPPAAVAVAVSAAAPPPAVPCAPAENAPAPARRSAGKKPTRRTERTSAGDGANCHRPEEPAAADALGTSVVVPPEPTKTRPCGNNRASHRKELRSSVTCEKRRTRGLSRIVPKSKEFIETESSSSSSSSDSDLESEQEEYPLSKAQTVAASASSGNDQRLKEAAANGGSGPRAPVGSINARTTSDIAKELEEQFYTLVPLAGTNFSPL

SEQ ID NO: 28536 - DNA, 3756 bp, Artificial Sequence
  derived and/or modified sequence
atggatagttttgatttagccctcctgcaagaatgggatctagagtcactatggggtgaggatattctgaaccagaggaacgacagtttggtggtcgagtttcagagcagtgcctctagatgcaggtcggtgtacgagccagaccgcaatgcactgcgacggaaagagagagagcgccggaaccaagaaactcagcaggatgacggcaccttcaattcctcctattccctgttctcagagccgtacaaaaccaacaagggtgacgagttaagcaatcggattcagaacacacttgggaattacgacgaaatgaaggattttctcacggaccgatcaaaccagtcacatctcgtgggagtacctaaacctggtgtcccacagaccccagtgaacaagattgatgaacacttcgtggcagatagtagagcccagaatcagcccagttcaatctgctcaactacaaccagtacacccgccgcagtcccagttcagcagtccaagcgaggaacaatgggttggcagaaggccggtcaccctccatcagatgggcaacaacgggcaactcagcagggtagcttgaggacattgttaggcgatggcgtgggccggcagcagccccgggccaagcaagtttgcaacgttgaagtgggactccagacgcaagaaaggcccccggcaatggctgccaagcactcgagttcaggccattgtgttcaaaactttcccccttctctggcctcaaagccgtcactggtacagcaaaaaccaaccgcatatgtccgtcccatggacgggcaggatcaggccccggatgaatcgcccaagctcaagtcctcttcagagacgtctgtccattgcaccagctatagaggtgtgcccgcatcaaaacccgagcctgcccgagccaaggccaagctgagtaagttctctataccaaagcaaggtgaggaatcgcggagtggggaaaccaactcctgcgtggaagaaatcatccgggagatgacttggctgccacctttgagcgctatccaagcccctggcaaggttgaaccaactaagtttccgttccctaataaagactcgcagctggtgagctctgggcataataatcccaaaaagggagacgcagagcctgagtcacctgacagcggcacgagtaacacgtcaatgctggaagatgacttgaaacttagttccgacgaagaagagaatgaacagcaggcagcccaacgtaccgctcttcgggccctgtcggactctgccgtggtgcagcagcctaattgcagaaccagcgttccaagctccaaaggctctagttcaagtagcagttcgggatcttcaagctcttcttcggactctgagtcatccagcgggtccgatagcgagactgagagttcctcgtcagaatctgaaggctctaaaccccctcatttctcttctcccgaggccgagccagcctcctctaacaagtggcaactagacaagtggcttaataaggtgaatccccacaagccccccatccttattcaaaacgagtctcatggaagtgagtctaaccagtactacaatcccgtaaaggaggacgttcaggactgcggcaaagtgcccgatgtgtgccagccctctttacgggaaaaggagattaaatctacatgtaaggaggagcagaggccacgcacagcgaataaggccccaggttcaaagggcgtaaagcagaagtcaccacctgcagccgtcgccgtggccgttagcgctgccgccccgccacccgcagtgccatgtgcgcccgccgagaatgctccggccccagcccggcgctcggccggaaagaaaccaaccaggcgcacagagcgaaccagcgcaggcgacggggccaattgccaccggcccgaagagcccgccgccgccgacgcacttgggacctccgtggtcgtccctccagagccaacgaagactcggccttgcgggaataacagagcctctcaccgcaaggaattgcgatcatccgtgacttgcgagaagaggagaacccggggactcagccggatcgttccgaaaagcaaagagttcatagagaccgagtcaagcagctcctcaagttccagcgactcggacctggaaagcgagcaagaagaataccctttatctaaagctcagaccgtcgccgccagtgcgtcatccgggaatgaccaacgactcaaagaggcagctgccaatggtggtagtgggccaagagcccccgtcggaagtatcaatgcccgtactacgagtgacattgctaaagaactggaggaacagttctacactctggtacccttcggcaggaacgagttgctcagccctctcaaagattctgatgaaatacgctccctttgggtcaagattgatctgaccctgttgagccgaattccagaacatctgcctcaggagccaggggttttgtctgcccctgcaactaaggactctgagagcgcccccccttcacatacgagcgacaccccagctgagaaggccctgcccaagagtaaacggaaacgtaaatgcgataatgaggacgattatcgcgagattaagaaatctcagggagagaaagacagcagttctcgcctggctaccagcacttcgaatacactgtccgctaaccattgcaatatgaacattaattcagtggccattcccatcaataaaaatgagaagatgttacgtagtcccatctcacccctcagcgacgcgtctaaacacaagtatacttctgaagatttaacttctagcagcaggcctaatggtaattctcttttcacatctgcatcctccagcaaaaaaccaaaggcggactcccaactgcagcctcatggaggggacctaaccaaggcggcacataacaactccgaaaatatccctctgcacaaatcccgcccccagacaaaaccttggtcgcccggtagtaacggccatcgcgattgcaagagacaaaagctcgtgttcgacgatatgccgcggagcgctgactatttcatgcaagaggccaagcgcatgaagcataaagccgatgcgatggtcgagaaatttgggaaagccttaaactatgctgaagccgcacttagctttatcgagtgcggtaatgccatggagcagggtcctatggagtccaaaagcccttatacgatgtatagcgagacggtggagttaatccgttacgccatgcggctaaagacgcatagcggccccaacgccacacccgaggacaagcaactggccgccctctgctaccgatgcctcgcgctgttgtactggaggatgttcaggctcaaacgggatcacgcagtgaaatatagcaaggctctaatcgactattttaaaaatagtagtaaggccgctcaggccccaagtccatggggtgcttctgggaagtccacaggcactccttctcccatgagtcctaaccctagcccggcgtcaagcgtgggttcccaggggtctcttagtaacgctagcgccttgtcacccagtaccatagtttccattccccagaggatacaccaaatggccgccaaccatgtgtctatcacaaacagcattttgcactcatatgattactgggagatggccgacaatttggccaaagaaaatcgagagttcttcaacgatcttgacctcctgatgggtcctgttacccttcattcttccatggaacacctggtgcagtatagccagcaagggttgcactggcttcggaatagcgctcacctctcctag

SEQ ID NO: 28537 - DNA, 2346 bp, Artificial Sequence
  derived and/or modified sequence
atggacagtttcgatctcgcgttactccaggaatgggacctggagagtctatggggagaggacattctgaaccagcggaatgacagcctggtggtggagttccagtctagcgcttctcggtgccggagcgtgtatgagccagaccggaatgcactgcgacggaaggaaagagagagaaggaatcaggaaacgcagcaggacgatggcacctttaattcttcctactccctgttttctgaaccttacaagacgaataagggggacgagctcagtaacagaatccaaaataccttaggcaactatgacgaaatgaaagacttcttgacggaccgatctaaccagagccacctggtaggcgtgcccaagccaggtgtgccccaaactccagtcaacaaaatcgatgagcatttcgtcgcggattctagggctcagaaccagccctcgtcaatctgcagtacaaccactagtactcctgctgccgtgcccgttcagcaatcgaaacgtgggacgatggggtggcagaaagccggacatccaccatcagatggccagcagagagctacacagcagggctcccttaggacgctgctgggtgacggagtggggcgccagcaaccccgcgcaaaacaagtatgtaatgttgaggtcggcctccagacgcaagagcgtcccccagccatggccgcaaagcattcgtcatccggccattgcgttcagaactttccacccagcctggcatccaaaccctctctggtgcagcagaagcccactgcatacgtccgccctatggacggacaggaccaggcccctgacgagtctccaaagcttaagagcagctctgagacaagtgtgcactgcacaagctatcggggcgtccctgctagtaaacccgaacctgcgagggcaaaagctaagcttagcaagttctccatcccgaagcagggcgaggaatcccggtcaggagaaaccaattcgtgcgtggaggaaatcattcgtgaaatgacatggctcccacctctgtcagcaatccaggcacctggaaaggtagagccaacaaaattcccattccctaacaaggacagtcagctggtcagcagcgggcataacaacccaaagaaaggcgacgcagagccagagtctcccgacagcgggacttccaatacctccatgctggaggatgacctgaagctgtcttcggatgaagaagaaaacgagcaacaagccgcccagagaaccgccctgagggcactgtctgatagcgccgttgtgcagcagcccaactgccgaacgagcgtccccagctccaagggcagttccagctcctctagcagcggttccagtagctcctcttcagatagcgagtcgtcttcgggatccgactccgagaccgaatctagttcttccgagagtgagggaagcaagcctccccatttcagctcccctgaagccgagccggcctcaagtaataaatggcaactggacaagtggttgaacaaggtgaatccacacaaacctccaatcctaatccagaatgaatcacatggcagtgaaagtaaccagtactacaaccccgtgaaagaggatgtccaagactgcgggaaggtgccagatgtatgtcaaccctctctgcgggagaaggagataaagtcaacctgtaaagaggaacagagacctcgaaccgccaataaggcacccgggagcaaaggtgtgaaacagaaaagtccccctgccgccgtagccgtggctgtgagtgccgccgctccaccccctgcagtcccctgcgcacccgccgaaaacgccccagctcctgccaggcggagtgctggtaagaagccgactcgcagaacagaaagaacttccgcgggggacggcgcaaattgtcatagacccgaggaaccagctgcagcagacgccctgggcacatccgtcgtggtgccgcccgaaccaacgaagactagaccatgtgggaacaatcgtgcatctcatcggaaggagttacgcagtagtgtgacctgcgaaaaacgacgcacccgcgggttgagtagaatcgttcccaaaagtaaagagttcattgaaacagagagctctagctccagctcatcttctgatagtgatcttgagagcgaacaggaagagtaccccctctctaaggctcaaacagtggctgccagtgcctcctcaggaaacgatcaacgactgaaagaggctgcagcgaatggcggctccggcccaagggcacctgttggatcaatcaatgcgcgcactaccagcgacatcgcaaaggagctagaggaacagttttacacgctcgtgcctctggccggcactaacttctcccctctgtag

SEQ ID NO: 28538 - DNA, 3756 bp, Artificial Sequence
  derived and/or modified sequence
atggacagctttgacctggccctgctgcaggagtgggacctggagagcctgtggggcgaggacatcctgaaccagagaaatgacagcctggtggtggagttccagagcagcgccagccgctgccgctctgtgtatgagccagacagaaatgccctgcggaggaaggagcgggagaggaggaaccaggagacccagcaggatgatggcaccttcaacagcagctacagcctcttcagcgagccctacaagaccaacaagggagatgagctgagcaaccgcatccagaacaccctgggcaactatgatgagatgaaggacttcctgacagacaggagcaaccagagccacctggtgggcgtgcccaagccaggagtgccccagacccctgtgaacaagattgatgagcactttgtggccgacagccgggcccagaaccagcccagcagcatctgcagcaccaccaccagcaccccagctgctgtgcctgtgcagcagagcaagaggggcaccatgggctggcagaaggccggccaccccccatctgatggccagcagagggccacccagcagggcagcctgcggaccctgctgggagatggagtgggccggcagcagccccgggccaagcaggtgtgcaatgtggaggtgggcctgcagacccaggagcggcccccagccatggccgccaagcacagcagcagcggccactgtgtgcagaacttcccccccagcctggccagcaagcccagcctggtgcagcagaagcccacagcctacgtgcggcccatggatggccaggaccaggccccagatgagagccccaagctgaagagcagcagcgagacctctgtgcactgcaccagctacagaggagtgcctgccagcaagccagagcccgcccgggccaaggccaagctgagcaagttcagcatccccaagcagggcgaggagagccgcagcggggagaccaacagctgtgtggaggagatcatccgggagatgacctggctgccccccctgagcgccatccaggcccctgggaaggtggagcccaccaagttccccttccccaacaaggacagccagctggtgagcagcggccacaacaaccccaagaagggagatgctgagcctgagagcccagattctggcaccagcaacacctccatgctggaggatgacctgaagctgagcagtgatgaggaggagaatgagcagcaggccgcccagaggacagccctgcgggccctgagtgacagcgctgtggtgcagcagcccaactgcaggacctctgtgcccagcagcaagggcagcagcagcagcagcagcagcggcagcagcagcagcagcagtgacagcgagagcagcagcggcagtgacagcgagacagagagcagcagcagcgagagcgagggcagcaagccaccccacttcagcagccctgaggccgagcccgccagcagcaacaagtggcagctggacaagtggctgaacaaggtgaacccccacaagccacccatcctgatccagaatgaaagccacggcagcgagagcaaccagtactacaaccctgtgaaggaggatgtgcaggactgtgggaaggtgcctgatgtgtgccagcccagcctgcgggagaaggagatcaagagcacctgcaaggaggagcagaggcccaggacagccaacaaggcccctggcagcaagggcgtgaagcagaagagccccccagctgctgtggccgtggccgtgtctgctgctgcccctcctcctgctgtgccctgtgccccagcagaaaatgccccagccccagccaggagatctgctgggaagaagcccaccaggagaacagagaggaccagcgctggagatggagccaactgccacaggcctgaggagcctgctgctgctgatgccctgggcacctctgtggtggtgcccccagagcccaccaagacccggccctgtggcaacaacagagccagccacaggaaggagctgcggagctctgtgacctgtgagaagaggaggacccggggcctgagcagaattgtgcccaagagcaaggagttcattgaaacagagagcagcagcagcagcagcagcagtgacagcgacctggagagcgagcaggaggagtaccccctgagcaaggcccagacagtggccgccagcgccagcagtggaaatgaccagaggctgaaggaggccgccgccaatggaggcagcggcccccgggcccctgtgggcagcatcaatgcccggaccaccagtgacatcgccaaggagctggaggagcagttctacaccctggtgccctttggaagaaatgagctgctgagccccctgaaggacagtgatgagatccgcagcctgtgggtgaagattgacctgaccctgctgagccgcatccctgagcacctgccccaggagcccggggtgctgagcgccccagccaccaaggacagcgagagcgccccacccagccacaccagtgacaccccagctgagaaggccctgcccaagagcaagaggaagaggaaatgtgacaatgaagatgactaccgggagatcaagaagagccagggcgagaaggacagcagcagccggctggccaccagcaccagcaacaccctgagcgccaaccactgcaacatgaacatcaacagcgtggccatccccatcaacaagaatgagaagatgctgcggagccccatcagccccctgagtgatgccagcaagcacaagtacaccagcgaggacctgaccagcagcagccggcccaacggcaacagcctcttcaccagcgccagcagcagcaagaagcccaaggctgacagccagctgcagccccatggaggagacctgaccaaggccgcccacaacaacagcgagaacatccccctgcacaagagccggccccagaccaagccctggagccctggcagcaatggccaccgggactgcaagaggcagaagctggtgtttgatgacatgcccaggtctgctgactacttcatgcaggaggccaagaggatgaagcacaaggcagatgccatggtggagaagtttgggaaggccctgaactatgcagaggccgccctgtccttcattgaatgtggaaatgccatggagcagggccccatggagagcaagagcccctacaccatgtacagcgagaccgtggagctgatccgctatgccatgaggctgaagacccacagcggccccaatgccaccccagaggacaagcagctggccgccctgtgctaccgctgcctggccctgctgtactggaggatgttccggctgaagagggaccatgctgtgaagtacagcaaggccctgattgactacttcaagaacagcagcaaggccgcccaggcccccagcccctggggcgccagcggcaagagcacaggcacccccagccccatgagccccaaccccagccctgccagctctgtgggcagccagggcagcctgagcaatgccagcgccctgagccccagcaccatcgtgtccatcccccagaggatccaccagatggccgccaaccacgtgtccatcaccaacagcatcctgcacagctatgactactgggagatggctgacaacctggccaaggaaaatcgggagttcttcaatgacctggacctgctgatgggccctgtgaccctgcacagctccatggagcacctggtgcagtacagccagcagggcctgcactggctgagaaattctgcccacctgtcctag

SEQ ID NO: 28539 - DNA, 2346 bp, Artificial Sequence
  derived and/or modified sequence
atggacagctttgacctggccctgctgcaggagtgggacctggagagcctgtggggcgaggacatcctgaaccagagaaatgacagcctggtggtggagttccagagcagcgccagccgctgccgctctgtgtatgagccagacagaaatgccctgcggaggaaggagcgggagaggaggaaccaggagacccagcaggatgatggcaccttcaacagcagctacagcctcttcagcgagccctacaagaccaacaagggagatgagctgagcaaccgcatccagaacaccctgggcaactatgatgagatgaaggacttcctgacagacaggagcaaccagagccacctggtgggcgtgcccaagccaggagtgccccagacccctgtgaacaagattgatgagcactttgtggccgacagccgggcccagaaccagcccagcagcatctgcagcaccaccaccagcaccccagctgctgtgcctgtgcagcagagcaagaggggcaccatgggctggcagaaggccggccaccccccatctgatggccagcagagggccacccagcagggcagcctgcggaccctgctgggagatggagtgggccggcagcagccccgggccaagcaggtgtgcaatgtggaggtgggcctgcagacccaggagcggcccccagccatggccgccaagcacagcagcagcggccactgtgtgcagaacttcccccccagcctggccagcaagcccagcctggtgcagcagaagcccacagcctacgtgcggcccatggatggccaggaccaggccccagatgagagccccaagctgaagagcagcagcgagacctctgtgcactgcaccagctacagaggagtgcctgccagcaagccagagcccgcccgggccaaggccaagctgagcaagttcagcatccccaagcagggcgaggagagccgcagcggggagaccaacagctgtgtggaggagatcatccgggagatgacctggctgccccccctgagcgccatccaggcccctgggaaggtggagcccaccaagttccccttccccaacaaggacagccagctggtgagcagcggccacaacaaccccaagaagggagatgctgagcctgagagcccagattctggcaccagcaacacctccatgctggaggatgacctgaagctgagcagtgatgaggaggagaatgagcagcaggccgcccagaggacagccctgcgggccctgagtgacagcgctgtggtgcagcagcccaactgcaggacctctgtgcccagcagcaagggcagcagcagcagcagcagcagcggcagcagcagcagcagcagtgacagcgagagcagcagcggcagtgacagcgagacagagagcagcagcagcgagagcgagggcagcaagccaccccacttcagcagccctgaggccgagcccgccagcagcaacaagtggcagctggacaagtggctgaacaaggtgaacccccacaagccacccatcctgatccagaatgaaagccacggcagcgagagcaaccagtactacaaccctgtgaaggaggatgtgcaggactgtgggaaggtgcctgatgtgtgccagcccagcctgcgggagaaggagatcaagagcacctgcaaggaggagcagaggcccaggacagccaacaaggcccctggcagcaagggcgtgaagcagaagagccccccagctgctgtggccgtggccgtgtctgctgctgcccctcctcctgctgtgccctgtgccccagcagaaaatgccccagccccagccaggagatctgctgggaagaagcccaccaggagaacagagaggaccagcgctggagatggagccaactgccacaggcctgaggagcctgctgctgctgatgccctgggcacctctgtggtggtgcccccagagcccaccaagacccggccctgtggcaacaacagagccagccacaggaaggagctgcggagctctgtgacctgtgagaagaggaggacccggggcctgagcagaattgtgcccaagagcaaggagttcattgaaacagagagcagcagcagcagcagcagcagtgacagcgacctggagagcgagcaggaggagtaccccctgagcaaggcccagacagtggccgccagcgccagcagtggaaatgaccagaggctgaaggaggccgccgccaatggaggcagcggcccccgggcccctgtgggcagcatcaatgcccggaccaccagtgacatcgccaaggagctggaggagcagttctacaccctggtgcccctggccggcaccaacttcagccccctgtag

SEQ ID NO: 28540 - DNA, 3756 bp, Artificial Sequence
  derived and/or modified sequence
atggacagcttcgacctggccctgctgcaggagtgggacctggagtcgctttggggcgaggatattttgaatcagaggaacgactccctggttgtggagttccagtcctcagcttctagatgcaggtcggtatatgagccagacaggaatgccctacgacggaaggagcgggagcggagaaatcaggaaactcaacaggacgacgggaccttcaacagttcttattctttattcagcgagccgtataagactaacaagggagatgagctgtctaatcgaatccagaatacgcttggaaattacgacgaaatgaaggactttctgacagatcgctctaatcagtctcacctggtgggagtcccaaaaccaggcgtcccacagacccccgtgaataagattgacgagcattttgtggcagacagtagggcccaaaaccaaccatcaagtatatgctctactactacctctacgcctgctgctgttccagtccaacaaagcaagaggggcactatgggttggcagaaggccggacaccccccctctgatggccaacagcgggccacacagcaaggttcattaaggactcttctcggagacggtgtgggtagacagcagccacgggctaagcaggtctgtaatgtcgaggtcggacttcaaacacaggaacggccacccgcaatggctgccaaacatagctcttccgggcactgtgtgcagaattttcctccgagcctcgcctccaagccctctttagtccagcagaagccaactgcatacgtcaggcccatggatggtcaggatcaggcgcccgatgagtcacctaagctgaagtcttcatctgaaacatccgtgcactgtacgtcgtaccgcggggtccctgccagcaaacccgagcctgcgcgagcaaaggctaagctgagcaagttttctatccctaaacagggcgaggaatcgcggtcgggagaaaccaattcatgcgtggaagagataatccgggaaatgacctggcttccaccactgtctgctatacaggcgccaggcaaagtcgagccaaccaaattcccgttccccaacaaagatagccagctagtctcctcagggcacaataacccaaagaaaggcgacgcagagcctgaaagtcccgattcagggacttcaaatacatccatgctcgaagacgaccttaagctgagttccgacgaggaggagaatgagcagcaggcagctcaacgaacagccctgcgagccctgagcgattctgctgtggtgcagcagcctaactgtcgtacctctgtcccctcttcgaaggggagttcttctagcagctcgagtggttctagctcatcttcatcggactctgagagcagctccggttctgattccgagacagagtcttcaagttcagagtcagaagggtccaagccaccacacttctcaagccctgaagcagaacctgcgagttcaaacaagtggcagctggataagtggttgaataaagttaatcctcacaagcctccaatcctcattcaaaatgaatcccatggcagcgaatccaaccagtactacaaccccgtgaaggaggacgtgcaggactgcgggaaagtccctgatgtttgtcagccatctctccgtgaaaaagagataaagtcaacttgcaaggaggaacagaggccccgcaccgcaaataaggctcctggatccaaaggggtcaagcaaaagtcccccccagctgctgtcgctgtggctgtgtctgcagcagcacctcctccagccgtcccatgcgctcccgccgagaacgccccagcaccggctcgcaggagcgctgggaaaaagccaacacggcggactgagcgaacctctgcaggcgacggcgctaattgccacaggcccgaggagcctgctgccgccgacgcccttggcacatccgtggtggtaccacccgagcccaccaaaaccaggccatgcgggaacaatagggcttcccaccggaaggaattacgttcgtctgtgacctgtgagaagaggaggactcgggggcttagcaggatcgttcctaaatccaaggaattcatcgagactgaatcaagctccagttcgtcaagctccgattccgacctcgagagcgaacaggaagagtaccctctgtcaaaggcacaaaccgttgccgcctctgcctcttccggaaacgatcagcgcctgaaggaagctgcagccaacggggggtcaggcccacgcgcgccggtgggatccatcaacgctcgaacaaccagcgatatcgccaaggagttggaagaacagttttacacacttgtgccttttggaaggaacgaactgctgtcacccctgaaagacagcgatgaaattcggtccctctgggtaaaaatcgacctgaccttgctctcccggattcccgaacacctaccgcaggagcctggcgtcttgtcagccccggccaccaaggatagcgagagcgcccccccctcccacacatctgacactcctgcggagaaagccttacctaaatccaagaggaagcggaagtgcgacaacgaggatgactatcgcgaaatcaaaaagtcacagggcgaaaaagacagcagctccagattagcgacgagcacttccaacaccctctccgccaaccactgcaacatgaatataaattccgtggctatccccatcaacaagaacgagaagatgctcaggtcacccatctcacctctgagcgatgcatccaaacacaagtatacgtcagaagatttaacttctagctcccgtcccaacgggaactcactctttacttcagccagttccagtaaaaagccaaaggccgactcccaattacagccacatggaggcgatcttaccaaagcagcacataacaacagcgagaacatcccactgcacaaatctcggccacagacaaaaccttggagccctgggtcaaatgggcacagagactgcaagcgccagaaactggtgtttgatgatatgcctcgttctgctgactacttcatgcaagaagctaaacgtatgaagcataaggccgatgcaatggttgagaaatttggaaaggctcttaattatgcagaggcagccctgtcctttatcgagtgcggcaacgctatggaacaaggacctatggaaagcaagtccccttatacaatgtactccgaaacggttgagctcatccgttacgctatgaggttgaaaactcattccggacccaatgcaactccagaggacaagcagctggcagccctgtgttatcgatgcttggccctgctgtactggaggatgtttagattgaagcgtgaccatgccgtaaagtactctaaagccctgattgactacttcaaaaacagttctaaagctgcccaggcgccttccccttggggcgccagtggcaaaagcacggggacgccgtcacccatgtcacctaatcctagccccgccagcagtgtcggaagccagggcagtctaagtaatgcatctgccctcagtcccagcaccatagtgtcaattccacaaaggatccatcaaatggctgctaatcacgtctccatcacaaacagcattctccacagttatgattattgggagatggccgacaacctggccaaggaaaatcgcgagttctttaatgatctagatctcctgatgggcccggtcactctgcatagtagcatggagcacctggtccagtactctcaacaggggctgcactggctccgtaatagtgcccatctatcttag

SEQ ID NO: 28541 - DNA, 2346 bp, Artificial Sequence
  derived and/or modified sequence
atggacagcttcgacctggccctgctgcaggagtgggacctggagtctctgtggggagaggatatcctgaatcagcgcaatgatagtctcgtagtggagttccagtcatccgcttcgcgttgtaggtccgtgtacgagccggatagaaatgctttgaggaggaaggagagggaacgacgtaatcaggaaacccagcaggatgacggcacctttaattcttcttattcactgttctctgagccttacaaaaccaacaagggtgacgaattgtccaaccggatccagaacactctcggtaattatgacgagatgaaagactttctcactgacagatccaaccagagtcatctcgtcggagtgcccaagcctggtgtgccacagacacctgtaaataagatcgacgagcacttcgttgctgattcaagagcccagaatcagccatctagcatctgttctacaaccacgtctacacctgctgcagtgcctgtccagcagtcgaagcggggcacaatgggttggcaaaaagctggacaccccccttcagatggccagcagagagcaactcagcaggggagcctacggactttgctgggcgacggcgtcggacgccagcagccacgcgccaagcaagtctgtaacgtggaagtcggtctgcagacacaggaacgccctcctgccatggccgcaaaacattccagctcaggtcactgcgtacagaactttcccccctccctggctagcaagccttccctggtgcagcagaagcccaccgcgtacgtgcggccaatggatggtcaggatcaggctcctgatgagagccctaaactgaaatccagttcggaaacaagtgtccactgcacttcctatcgtggggttcccgcgtcaaagccggagcctgctagggccaaggccaagttaagcaagttcagcatccccaaacaaggcgaggagtcacggtcaggggaaactaattcttgtgtcgaggagattatccgagaaatgacctggctgccaccgctgtccgccatccaggcccccggtaaggtggaacctacgaagttccctttcccgaataaggatagccagttagtgtcctccggccacaataatcccaagaaaggggacgcagaacctgagagcccagactccgggactagcaatacgagtatgctggaagacgatctaaaactgtcttcagacgaggaggaaaatgagcagcaggcagcccaacggactgcactgagagctttgagcgattcagcagtggttcagcaaccgaactgtcggacttctgtaccctcatccaaagggagctcttcctcttccagttccggatcatcatcatcatcatccgattcggagtcatcctctggatcagactctgagaccgaatccagttcatctgagtccgaggggtccaaacctccgcacttcagctctcctgaggcggagcccgcctcgagtaacaaatggcagctggataagtggctgaataaggtcaacccccataagccccctatattaattcagaatgaatcccacggcagcgagtctaaccagtattataaccctgtgaaagaagacgtgcaagactgcggcaaggtgccagacgtctgccagccaagccttcgagaaaaggaaatcaagtcaacatgcaaagaggaacagcgccccagaaccgccaacaaggctcctgggtccaagggcgtcaagcagaaaagtccccccgctgccgtggctgtggcagtcagcgcagcagccccaccaccggctgtcccttgtgccccagcggagaacgctccagcccctgccaggcgttcagctggcaagaaaccgaccagacgcaccgaacgaacaagtgcgggcgatggggccaattgccataggccggaagaacccgcagctgcagatgctctcggcacgagtgtggtcgtgcctcccgagccaaccaagacacggccgtgtggaaataaccgtgctagccatcggaaggaactgcgcagctccgttacatgtgagaaacgaagaactagaggcctgagcaggattgtacccaaatcaaaggagtttatcgagactgagtcatcaagctctagctctagctccgactctgaccttgaatcagaacaagaagagtatccactgagtaaagcccagacagttgctgcaagtgccagttccggtaatgatcagcgattgaaggaggccgcggccaacggaggcagcgggccgcgagctccagtaggctcaatcaacgcccgcacaacctctgacattgctaaggagttggaggagcagttttacaccctggtacccttggccgggaccaacttttcaccattgtag

SEQ ID NO: 28542 - DNA, 3756 bp, Artificial Sequence
  derived and/or modified sequence
atggacagttttgatctggcgctgttacaagagtgggacttggagtctctctggggggaggatattttgaaccagcgcaatgactctctggtcgtggagttccagtcatctgcaagcagatgtagaagcgtttatgagcccgacagaaatgcactgcggaggaaggaacgcgaaaggcgcaatcaagaaacccagcaggatgacggcacattcaacagcagctattcactgtttagcgaaccctacaaaactaacaaaggagatgaactttccaacagaattcagaatactctcggcaattacgacgagatgaaggactttttgacggaccggtctaaccagtcccaccttgtgggcgtacccaaacctggggtgccccaaacacccgtgaacaaaattgatgaacactttgtcgcggactcgcgggctcagaatcagccgagctctatctgttcaaccactacctccacaccagctgccgtgcccgtccagcagtctaaacggggaaccatggggtggcaaaaagctggccatcccccatcagatggccagcagcgggctacccagcagggatctctaaggaccttgctcggtgatggcgtgggtcgtcaacagccccgagcaaagcaggtgtgtaatgttgaagtcgggctccaaactcaggaaagaccacccgcaatggccgctaaacattcttcctctggacattgcgtccagaattttcctccatctctggcgagtaagccaagtctggttcaacagaagccaacagcgtacgttcgtcccatggatgggcaggaccaggctcccgatgagtccccgaaactcaagagctcctcagagacaagcgtacattgcacctcctaccgaggtgtgccagccagcaagcctgagccagcgagagccaaagctaaactgagcaaattctcgatccccaaacagggggaggagtcccgctctggagagacgaacagttgtgttgaggagatcatccgcgagatgacttggctgccccctcttagtgccattcaggcacctggaaaggtcgaaccaactaagttcccttttccaaataaagactcccagttggtttcctcagggcacaacaatcctaagaagggcgatgccgagcctgagtctccggactcagggacgtccaatacatcaatgcttgaagatgacctaaagcttagcagcgatgaggaggaaaatgaacaacaagccgcacaaaggacagcactgagggccctttcagacagtgctgtggtgcagcaacctaactgcaggacctccgtcccaagtagcaagggaagctcttctagctcatctagtggctcttccagctccagctccgattccgaaagctcctctggatcagacagcgaaaccgaatctagttcttctgagagtgagggcagcaaaccacctcatttcagctctccagaagccgaacccgcttcctctaacaagtggcaattagataagtggctgaacaaagtaaaccctcacaagcctcccattctgatacagaatgagtcacatgggagcgagtccaaccagtattacaaccccgttaaagaggatgtgcaagattgtggcaaggtcccagacgtttgccagccatctctgcgcgagaaggagattaagtccacctgcaaagaagagcagcgccctcgaaccgctaacaaggctccgggtagcaagggtgttaagcagaagagcccccctgctgctgtagcagtcgccgtgtccgccgctgctccacctccggctgtcccgtgtgcgccagccgaaaatgctccagcacccgctcgccgttccgcgggtaaaaagccgactcgccgtactgaaagaacatctgctggggacggggcaaattgccatcggcctgaagagccagccgctgctgatgccctaggcacctccgtggtagtgcccccagagccgaccaagacacgaccttgcgggaataatagggctagccatagaaaggagctccgaagcagtgtgacttgcgagaaacgtagaacgaggggactgagtcgaatcgtcccaaagtctaaagaattcatcgagacagagtcctctagcagctcttccagctctgacagcgatttagaatcggaacaggaagaataccctctttccaaggcacagacagtagcagcttcggcctcgtcaggtaacgatcagagacttaaggaagctgctgcgaatggcggaagcggtcctcgggctccagtcgggagtatcaatgcgagaaccacgagcgatattgccaaggagttagaagaacagttctataccttggtaccattcgggcgtaatgagctactcagccctctgaaggacagcgacgagataagatccctgtgggtcaaaattgatttgaccctcctgtccagaatcccagagcacttaccccaggaaccaggagtgttatctgcccctgccaccaaagacagcgaaagtgcaccaccatcgcatacaagcgacacacctgcagagaaagccttacctaagtctaaacggaaacgaaaatgcgacaacgaggatgattatcgtgagatcaagaagtcgcagggtgagaaggattccagcagccgattggctaccagcacatctaataccctttcagccaaccactgtaatatgaatatcaacagtgtggcaatccctatcaacaagaacgaaaagatgctgcgcagccccatctcaccactgtccgatgccagcaagcataagtatacgtcagaggacttaacctcttcctcgcggcctaatggcaattcgctgttcacttccgcatctagcagtaaaaaacccaaagctgatagccagctgcaaccacatggaggggacctcactaaggccgcacacaacaattcggagaatatacccctccataaatctaggccccagaccaaaccttggtcacccggttcaaacggccaccgtgattgcaaacggcagaaacttgtgttcgatgacatgcccagatcagctgattatttcatgcaggaggctaagagaatgaagcacaaggctgacgccatggtggagaagttcggcaaagcccttaattatgctgaggccgctctgagttttattgaatgcggcaatgcaatggaacaggggccaatggaatctaagtccccctacacaatgtattccgagacagtggagttgatcaggtatgccatgagacttaagacccacagtggcccaaatgcgaccccagaagataaacaactggcagccctatgctatcgctgcctggccctgctctattggagaatgttccgattaaaaagggatcacgccgtgaaatattccaaggctctgatagactatttcaagaattcctctaaggctgcccaggccccttcaccctggggcgcttccggtaagtccactggcacaccaagccctatgagccccaatccctcacccgcatccagcgttggtagtcagggatctctttccaacgctagcgcgctgagtccctccacaatcgttagcattccccagcggatccatcagatggccgctaatcatgtctccataacaaattccatcctgcacagctacgactactgggagatggccgataatttggctaaggagaacagagagttttttaacgatctggacctccttatgggccctgtcacgctgcactcttccatggaacatttggtgcagtactcacagcagggccttcactggttgaggaatagcgcccacctgtcgtag

SEQ ID NO: 28543 - DNA, 2346 bp, Artificial Sequence
  derived and/or modified sequence
atggattccttcgacctggcgctgttgcaggaatgggacctggagtcattatggggagaagatattctgaaccagcgaaacgattcgctggtcgttgagtttcagtccagcgcctctagatgtcggtctgtatacgaacccgatagaaacgcgcttcggcgtaaagaaagagagcgaagaaaccaggaaactcagcaagacgatgggacattcaatagttcctacagccttttctctgaaccatacaaaaccaacaagggagatgagctgtccaatcgcatacagaacactctgggcaattacgatgaaatgaaggattttcttacagatcggtctaatcagtcgcacttagtaggggtccctaaaccaggcgtaccacaaaccccagtgaacaagatagatgagcactttgtggccgattccagagcacagaatcagccaagttcaatctgctccactactacgagcacacctgccgcagttcctgtgcagcaaagcaagaggggaacaatgggctggcagaaggcaggccatccgccatcagacgggcagcagcgagccacccagcaaggatccctgaggaccctgcttggggacggggtcggacggcaacagcctagggcgaaacaggtgtgcaatgtagaagtcgggctgcaaacacaagagcgcccacctgctatggcagccaagcactctagctctggtcattgcgttcagaatttccccccatccctggcctcgaagccttctctcgtgcagcagaagccaacagcttatgtgaggccaatggatggacaggaccaggcaccagacgagtcgcctaagctgaagtcatctagtgagacatccgtacattgcacatcatatcggggtgtgccagccagtaaaccagaaccagcccgtgccaaagcaaagctgtccaaattctcaatccccaagcagggagaagaatctcggtctggagaaacgaattcctgtgtcgaggagatcatccgcgagatgacatggctgcctcccttgtccgccattcaggcccctgggaaagtggagcccacaaaattcccatttcctaacaaggacagccagttggtgtcctcaggacacaataaccccaagaaaggcgacgcggagcctgaaagccccgactctggcacatcgaacactagcatgctggaggacgaccttaagctgtcaagcgacgaggaggagaatgaacaacaggctgcccagcggacggccctgagggcccttagcgatagcgcagttgttcaacagccgaattgtcgcacctcagtgccaagcagcaaaggtagttcatcctcttcctcttccgggtcgagctcttccagctctgactcggaatcaagcagtggatccgatagcgagacagaatcatctagcagcgagagtgaggggtcaaagccgccacacttctctagcccagaggccgagcccgcaagcagtaataaatggcaactggataaatggcttaacaaggtcaacccacacaaacctcccattctcattcaaaatgagtcccacggatctgagtctaatcaatactataatcctgtcaaagaggacgtgcaggactgtggaaaagtgccggacgtgtgccagcccagcttgcgggaaaaagagattaaatccacttgcaaagaggagcagcgccctagaactgccaataaagccccaggatcaaagggagttaaacagaaatcaccacctgcagcagtggctgtcgctgtgtccgctgcggcaccaccgcctgccgtgccttgcgcgccagctgaaaacgcacccgctccggctcggaggtccgcaggaaaaaagcccacccgcagaaccgagagaacttccgccggagatggagccaattgtcatcgaccggaagagccggcagcggcagatgccctgggcaccagtgtggttgtgccccctgagcccacaaagacaaggccttgcgggaataatcgcgcatcccaccgtaaagaactgcggtcgtccgtcacctgtgaaaagcgcagaacccgaggactctcgcgtatagtgcccaagagcaaggaatttatcgagaccgaatcatcaagcagcagtagtagtagtgactctgacctggagtcagaacaagaggaatatcccctaagtaaagcccagaccgtcgccgcttcggcttcctccgggaatgaccagagacttaaggaggcagccgctaatggaggatctgggccaagagcacctgtcggttctatcaacgcccgaaccacaagcgacattgccaaggagctcgaagaacaattttacacattagtcccactcgcaggcactaacttctcgccattatag

SEQ ID NO: 28544 - DNA, 3756 bp, Artificial Sequence
  derived and/or modified sequence
atggacagcttcgacctggccctgctgcaggagtgggacctggagagcctgtggggcgaggacatcctgaaccagagaaacgacagcctggtggtggagttccagagcagcgccagcagatgcagaagcgtgtacgagcccgacagaaacgccctgagaagaaaggagagagagagaagaaaccaggagacccagcaggacgacggcaccttcaacagcagctacagcctgttcagcgagccctacaagaccaacaagggcgacgagctgagcaacagaatccagaacaccctgggcaactacgacgagatgaaggacttcctgaccgacagaagcaaccagagccacctggtgggcgtgcccaagcccggcgtgccccagacccccgtgaacaagatcgacgagcacttcgtggccgacagcagagcccagaaccagcccagcagcatctgcagcaccaccaccagcacccccgccgccgtgcccgtgcagcagagcaagagaggcaccatgggctggcagaaggccggccacccccccagcgacggccagcagagagccacccagcagggcagcctgagaaccctgctgggcgacggcgtgggcagacagcagcccagagccaagcaggtgtgcaacgtggaggtgggcctgcagacccaggagagaccccccgccatggccgccaagcacagcagcagcggccactgcgtgcagaacttcccccccagcctggccagcaagcccagcctggtgcagcagaagcccaccgcctacgtgagacccatggacggccaggaccaggcccccgacgagagccccaagctgaagagcagcagcgagaccagcgtgcactgcaccagctacagaggcgtgcccgccagcaagcccgagcccgccagagccaaggccaagctgagcaagttcagcatccccaagcagggcgaggagagcagaagcggcgagaccaacagctgcgtggaggagatcatcagagagatgacctggctgccccccctgagcgccatccaggcccccggcaaggtggagcccaccaagttccccttccccaacaaggacagccagctggtgagcagcggccacaacaaccccaagaagggcgacgccgagcccgagagccccgacagcggcaccagcaacaccagcatgctggaggacgacctgaagctgagcagcgacgaggaggagaacgagcagcaggccgcccagagaaccgccctgagagccctgagcgacagcgccgtggtgcagcagcccaactgcagaaccagcgtgcccagcagcaagggcagcagcagcagcagcagcagcggcagcagcagcagcagcagcgacagcgagagcagcagcggcagcgacagcgagaccgagagcagcagcagcgagagcgagggcagcaagcccccccacttcagcagccccgaggccgagcccgccagcagcaacaagtggcagctggacaagtggctgaacaaggtgaacccccacaagccccccatcctgatccagaacgagagccacggcagcgagagcaaccagtactacaaccccgtgaaggaggacgtgcaggactgcggcaaggtgcccgacgtgtgccagcccagcctgagagagaaggagatcaagagcacctgcaaggaggagcagagacccagaaccgccaacaaggcccccggcagcaagggcgtgaagcagaagagcccccccgccgccgtggccgtggccgtgagcgccgccgcccccccccccgccgtgccctgcgcccccgccgagaacgcccccgcccccgccagaagaagcgccggcaagaagcccaccagaagaaccgagagaaccagcgccggcgacggcgccaactgccacagacccgaggagcccgccgccgccgacgccctgggcaccagcgtggtggtgccccccgagcccaccaagaccagaccctgcggcaacaacagagccagccacagaaaggagctgagaagcagcgtgacctgcgagaagagaagaaccagaggcctgagcagaatcgtgcccaagagcaaggagttcatcgagaccgagagcagcagcagcagcagcagcagcgacagcgacctggagagcgagcaggaggagtaccccctgagcaaggcccagaccgtggccgccagcgccagcagcggcaacgaccagagactgaaggaggccgccgccaacggcggcagcggccccagagcccccgtgggcagcatcaacgccagaaccaccagcgacatcgccaaggagctggaggagcagttctacaccctggtgcccttcggcagaaacgagctgctgagccccctgaaggacagcgacgagatcagaagcctgtgggtgaagatcgacctgaccctgctgagcagaatccccgagcacctgccccaggagcccggcgtgctgagcgcccccgccaccaaggacagcgagagcgccccccccagccacaccagcgacacccccgccgagaaggccctgcccaagagcaagagaaagagaaagtgcgacaacgaggacgactacagagagatcaagaagagccagggcgagaaggacagcagcagcagactggccaccagcaccagcaacaccctgagcgccaaccactgcaacatgaacatcaacagcgtggccatccccatcaacaagaacgagaagatgctgagaagccccatcagccccctgagcgacgccagcaagcacaagtacaccagcgaggacctgaccagcagcagcagacccaacggcaacagcctgttcaccagcgccagcagcagcaagaagcccaaggccgacagccagctgcagccccacggcggcgacctgaccaaggccgcccacaacaacagcgagaacatccccctgcacaagagcagaccccagaccaagccctggagccccggcagcaacggccacagagactgcaagagacagaagctggtgttcgacgacatgcccagaagcgccgactacttcatgcaggaggccaagagaatgaagcacaaggccgacgccatggtggagaagttcggcaaggccctgaactacgccgaggccgccctgagcttcatcgagtgcggcaacgccatggagcagggccccatggagagcaagagcccctacaccatgtacagcgagaccgtggagctgatcagatacgccatgagactgaagacccacagcggccccaacgccacccccgaggacaagcagctggccgccctgtgctacagatgcctggccctgctgtactggagaatgttcagactgaagagagaccacgccgtgaagtacagcaaggccctgatcgactacttcaagaacagcagcaaggccgcccaggcccccagcccctggggcgccagcggcaagagcaccggcacccccagccccatgagccccaaccccagccccgccagcagcgtgggcagccagggcagcctgagcaacgccagcgccctgagccccagcaccatcgtgagcatcccccagagaatccaccagatggccgccaaccacgtgagcatcaccaacagcatcctgcacagctacgactactgggagatggccgacaacctggccaaggagaacagagagttcttcaacgacctggacctgctgatgggccccgtgaccctgcacagcagcatggagcacctggtgcagtacagccagcagggcctgcactggctgagaaacagcgcccacctgagctag

SEQ ID NO: 28545 - DNA, 2346 bp, Artificial Sequence
  derived and/or modified sequence
atggacagcttcgacctggccctgctgcaggagtgggacctggagagcctgtggggcgaggacatcctgaaccagagaaacgacagcctggtggtggagttccagagcagcgccagcagatgcagaagcgtgtacgagcccgacagaaacgccctgagaagaaaggagagagagagaagaaaccaggagacccagcaggacgacggcaccttcaacagcagctacagcctgttcagcgagccctacaagaccaacaagggcgacgagctgagcaacagaatccagaacaccctgggcaactacgacgagatgaaggacttcctgaccgacagaagcaaccagagccacctggtgggcgtgcccaagcccggcgtgccccagacccccgtgaacaagatcgacgagcacttcgtggccgacagcagagcccagaaccagcccagcagcatctgcagcaccaccaccagcacccccgccgccgtgcccgtgcagcagagcaagagaggcaccatgggctggcagaaggccggccacccccccagcgacggccagcagagagccacccagcagggcagcctgagaaccctgctgggcgacggcgtgggcagacagcagcccagagccaagcaggtgtgcaacgtggaggtgggcctgcagacccaggagagaccccccgccatggccgccaagcacagcagcagcggccactgcgtgcagaacttcccccccagcctggccagcaagcccagcctggtgcagcagaagcccaccgcctacgtgagacccatggacggccaggaccaggcccccgacgagagccccaagctgaagagcagcagcgagaccagcgtgcactgcaccagctacagaggcgtgcccgccagcaagcccgagcccgccagagccaaggccaagctgagcaagttcagcatccccaagcagggcgaggagagcagaagcggcgagaccaacagctgcgtggaggagatcatcagagagatgacctggctgccccccctgagcgccatccaggcccccggcaaggtggagcccaccaagttccccttccccaacaaggacagccagctggtgagcagcggccacaacaaccccaagaagggcgacgccgagcccgagagccccgacagcggcaccagcaacaccagcatgctggaggacgacctgaagctgagcagcgacgaggaggagaacgagcagcaggccgcccagagaaccgccctgagagccctgagcgacagcgccgtggtgcagcagcccaactgcagaaccagcgtgcccagcagcaagggcagcagcagcagcagcagcagcggcagcagcagcagcagcagcgacagcgagagcagcagcggcagcgacagcgagaccgagagcagcagcagcgagagcgagggcagcaagcccccccacttcagcagccccgaggccgagcccgccagcagcaacaagtggcagctggacaagtggctgaacaaggtgaacccccacaagccccccatcctgatccagaacgagagccacggcagcgagagcaaccagtactacaaccccgtgaaggaggacgtgcaggactgcggcaaggtgcccgacgtgtgccagcccagcctgagagagaaggagatcaagagcacctgcaaggaggagcagagacccagaaccgccaacaaggcccccggcagcaagggcgtgaagcagaagagcccccccgccgccgtggccgtggccgtgagcgccgccgcccccccccccgccgtgccctgcgcccccgccgagaacgcccccgcccccgccagaagaagcgccggcaagaagcccaccagaagaaccgagagaaccagcgccggcgacggcgccaactgccacagacccgaggagcccgccgccgccgacgccctgggcaccagcgtggtggtgccccccgagcccaccaagaccagaccctgcggcaacaacagagccagccacagaaaggagctgagaagcagcgtgacctgcgagaagagaagaaccagaggcctgagcagaatcgtgcccaagagcaaggagttcatcgagaccgagagcagcagcagcagcagcagcagcgacagcgacctggagagcgagcaggaggagtaccccctgagcaaggcccagaccgtggccgccagcgccagcagcggcaacgaccagagactgaaggaggccgccgccaacggcggcagcggccccagagcccccgtgggcagcatcaacgccagaaccaccagcgacatcgccaaggagctggaggagcagttctacaccctggtgcccctggccggcaccaacttcagccccctgtag

SEQ ID NO: 28546 - protein, 385 aa, Artificial Sequence
  derived and/or modified sequence
MLVRRGARAGPRMPRGWTALCLLSLLPSGFMSLDNNGTATPELPTQGTFSNVSTNVSYQETTTPSTLGSTSLHPVSQHGNEATTNITETTVKFTSTSVITSVYGNTNSSVQSQTSVISTVFTTPANVSTPETTLKPSLSPGNVSDLSTTSTSLATSPTKPYTSSSPILSDIKAEIKCSGIREVKLTQGICLEQNKTSSCAEFKKDRGEGLARVLCGEEQADADAGAQVCSLLLAQSEVRPQCLLLVLANRTEISSKLQLMKKHQSDLKKLGILDFTEQDVASHQSYSQKTLIALVTSGALLAVLGITGYFLMNRRSWSPTGERLGEDPYYTENGGGQGYSSGPGTSPEAQGKASVNRGAQENGTGQATSRNGHSARQHVVADTEL

SEQ ID NO: 28547 - protein, 227 aa, Artificial Sequence
  derived and/or modified sequence
MDFGPGRLFRFFSYCVVAHIQLAVFFFSVGILETRILLADGAEFKKDRGEGLARVLCGEEQADADAGAQVCSLLLAQSEVRPQCLLLVLANRTEISSKLQLMKKHQSDLKKLGILDFTEQDVASHQSYSQKTLIALVTSGALLAVLGITGYFLMNRRSWSPTGERLGEDPYYTENGGGQGYSSGPGTSPEAQGKASVNRGAQENGTGQATSRNGHSARQHVVADTEL

SEQ ID NO: 28548 - protein, 355 aa, Artificial Sequence
  derived and/or modified sequence
MSLDNNGTATPELPTQGTFSNVSTNVSYQETTTPSTLGSTSLHPVSQHGNEATTNITETTVKFTSTSVITSVYGNTNSSVQSQTSVISTVFTTPANVSTPETTLKPSLSPGNVSDLSTTSTSLATSPTKPYTSSSPILSDIKAEIKCSGIREVKLTQGICLEQNKTSSCAEFKKDRGEGLARVLCGEEQADADAGAQVCSLLLAQSEVRPQCLLLVLANRTEISSKLQLMKKHQSDLKKLGILDFTEQDVASHQSYSQKTLIALVTSGALLAVLGITGYFLMNRRSWSPTGERLGEDPYYTENGGGQGYSSGPGTSPEAQGKASVNRGAQENGTGQATSRNGHSARQHVVADTEL

SEQ ID NO: 28549 - protein, 250 aa, Artificial Sequence
  derived and/or modified sequence
MFLQMYPTKKLQHLVPLEVPACTLCLNMAMRPQQTSQAEIKCSGIREVKLTQGICLEQNKTSSCAEFKKDRGEGLARVLCGEEQADADAGAQVCSLLLAQSEVRPQCLLLVLANRTEISSKLQLMKKHQSDLKKLGILDFTEQDVASHQSYSQKTLIALVTSGALLAVLGITGYFLMNRRSWSPTGERLGEDPYYTENGGGQGYSSGPGTSPEAQGKASVNRGAQENGTGQATSRNGHSARQHVVADTEL

SEQ ID NO: 28550 - DNA, 1158 bp, Artificial Sequence
  derived and/or modified sequence
atgctagtgcggcgtggggccagagccggcccacgaatgccaaggggctggacggctttatgtctacttagtttattgccttctggattcatgtccctcgacaacaatgggaccgcgacacccgaactcccaactcagggcaccttttctaatgtctctacaaatgtttcttatcaggaaacaacaacaccgagcacactgggctcaacaagcttacatccggtgtcccaacacggtaatgaagcgacaactaatattacggaaaccacggttaagtttacctcgacttccgtcattacttcggtgtatggtaacaccaactcaagcgtccagtcccaaacatcggtcattagcacagtgtttaccacgccggctaatgtcagtactccggagaccacccttaaaccctcgttgtcaccagggaatgttagtgacctgtctaccacctcaaccagcctagccacaagtcccacaaagccctacacgtcctcttcccctatactcagcgacattaaagctgaaataaagtgtagcgggattcgtgaggtcaaactgactcaggggatctgtctggagcagaataagacatcaagctgtgccgaattcaagaaggatcgcggcgagggcttggctagagtactctgtggcgaggaacaagccgatgccgacgccggcgcccaggtgtgctcactgctcctcgcacagtctgaagtgcgtccacagtgccttttactggtactggctaatagaactgaaatctcctcaaagctgcagcttatgaagaagcatcagtctgacttgaagaagctgggaatcctcgactttactgaacaagacgtcgctagtcatcagtcttatagccagaagactcttattgcgcttgtgaccagcggcgccctccttgcggtactgggcatcacaggatattttctcatgaatcgccgttcgtggtctcctactggcgaaagattgggtgaggacccctactatacagaaaatggcggagggcaagggtacagtagcggccccggtacgagtccagaggcccagggtaaggctagtgtaaatagaggggcccaagagaacgggacgggtcaggccacctccaggaatggacactccgcacgacagcatgtggtcgccgataccgagctgtag

SEQ ID NO: 28551 - DNA, 684 bp, Artificial Sequence
  derived and/or modified sequence
atggacttcggacctggaaggctatttcggtttttctcatactgcgtagtggcccatattcagttagcagtgttctttttctctgtcggcattcttgaaacaagaatcctgctcgcagacggcgccgagttcaagaaggataggggggaaggcctcgcgagggtgctttgcggagaggagcaggcagacgcagatgctggcgcacaggtgtgttcactgctcctagcgcagtccgaggtacgaccccagtgtcttctcctggtattggcaaatcgcacggagataagctctaaactccagttgatgaagaaacaccagagtgatctaaagaagttggggatccttgactttacagaacaggacgtggcttcacatcaatcctattcccagaagacacttatagccctggtaacgtccggcgcactgctcgctgtcttgggcatcacaggttatttcctaatgaaccggcgctcatggtctccaacaggggaaaggctcggtgaagatccctactacaccgagaatgggggaggccagggctatagttctggccccggtacatccccagaggcccagggaaaggcatccgtcaacagaggggcccaagaaaatgggactggacaagcaacctctagaaacgggcatagcgcacgacagcatgtagtagcagataccgagttatag

SEQ ID NO: 28552 - DNA, 1068 bp, Artificial Sequence
  derived and/or modified sequence
atgtctttggacaacaatggcaccgctacacctgagctgccaacacaaggaacgttttccaacgtcagcactaatgtgtcttaccaggagaccacaacacctagtacattagggagcacctccctgcaccctgtgagtcagcatggtaatgaggccactacaaatataacggagactactgttaaatttactagcacaagcgtgataacatccgtgtacgggaatacgaactcctccgtgcagagccagacttccgtgatttcaacagtctttacaacccctgctaatgtatcaacccctgagaccactctaaagccatcactctctccaggcaatgtgtctgacttatcaaccacatctacttctctggcgactagccccaccaagccgtataccagttcttcacccattctgtctgacatcaaggctgaaatcaagtgcagcggcattcgggaggtcaagctcacgcaggggatatgtctggagcagaacaaaactagctcctgtgcagaattcaaaaaagaccgaggggaaggcctggcccgggtgctgtgcggggaggagcaggcggatgccgacgccggggcgcaggtctgctcgctgctcctagcccaatccgaggtccgcccccagtgtctgctgctcgtgcttgccaataggaccgagatttcaagcaagctgcagctcatgaagaaacaccagagcgacctgaagaagcttggcatccttgatttcaccgaacaggatgttgcgtcgcatcagagctactcccaaaaaactctcatcgcccttgtaacctccggtgccttacttgcagtccttggcattacaggctactttctgatgaaccggcggagctggtcacctaccggcgaaaggttaggagaggacccctactacacagagaatggcggtgggcagggctatagctctggtcccgggacctcgccagaagcccagggcaaggcctccgtgaatcgtggtgcacaggaaaatggcacaggccaggccacgagccggaacggccactccgccaggcaacacgtggtggcggacacagagctgtag

SEQ ID NO: 28553 - DNA, 753 bp, Artificial Sequence
  derived and/or modified sequence
atgtttttgcagatgtatccaaccaagaagcttcaacatctcgtccccctggaggtacccgcgtgcactttgtgtcttaatatggctatgaggccccagcagacgagccaagccgagataaagtgctccgggattagggaagtgaagctcacacagggcatatgtttggaacaaaacaagacctccagctgcgccgaatttaagaaagatcggggcgaaggcctcgcgcgcgtgctgtgcggcgaggagcaagcggatgctgatgcaggcgcccaggtttgctctctgttattagcccaaagcgaggttaggccacaatgcctcctgctcgtgctagcaaatcggacagagatcagcagcaagttgcagttaatgaagaagcaccaatctgacctgaagaagcttgggatacttgatttcaccgagcaggatgtggcctcccatcagagttactctcagaagaccctgatcgcattagtcaccagtggcgccctactagcagtgcttggaatcacagggtatttcctcatgaaccggcgatcctggtcccccactggcgagcgactgggcgaagacccttactatacggagaatggcgggggacagggatactcctctgggccaggaacatcccctgaggctcagggcaaagcgagcgtcaaccgcggcgcacaagagaacggaactggacaggctacttctagaaatggccatagcgcccggcagcacgtggttgcggatacggagttatag

SEQ ID NO: 28554 - DNA, 1158 bp, Artificial Sequence
  derived and/or modified sequence
atgctggtgcggcggggggcccgggccggccccaggatgccccggggctggacagccctgtgcctgctgagcctgctgcccagcggcttcatgagcctggacaacaacggcacagccaccccagagctgcccacccagggcaccttcagcaatgtgtccaccaacgtgtcctaccaggagaccaccacccccagcaccctgggcagcaccagcctgcaccctgtgtcccagcacggcaatgaggccaccaccaacatcacagagaccaccgtgaagttcaccagcaccagcgtcatcacctctgtgtatggcaacaccaacagctctgtgcagagccagaccagcgtcatcagcacagtgttcaccaccccagccaacgtgtccaccccagagaccaccctgaagcccagcctgagccctggaaatgtgtctgacctgagcaccaccagcaccagcctggccaccagccccaccaagccctacaccagcagcagccccatcctgagtgacatcaaggccgagatcaagtgcagcggcatccgggaggtgaagctgacccagggcatctgcctggagcagaacaagaccagcagctgtgccgagttcaagaaggacagaggagagggcctggcccgggtgctgtgtggggaggagcaggctgatgctgatgctggggcccaggtgtgcagcctgctgctggcccagagcgaggtgcggccccagtgcctgctgctggtgctggccaacagaacagagatcagcagcaagctgcagctgatgaagaagcaccagagcgacctgaagaagctgggcatcctggacttcacagagcaggatgtggccagccaccagagctacagccagaagaccctcatcgccctggtgaccagcggggccctgctggccgtgctgggcatcaccggctacttcctgatgaacagaagatcctggagccccaccggggagcggctgggggaggacccctactacacagaaaatggaggcggccagggctacagcagcggccctggcaccagccctgaggcccagggcaaggcctctgtgaacagaggagcccaggagaatggcaccggccaggccaccagcagaaatggccacagcgcccggcagcacgtggtggccgacacagagctgtag

SEQ ID NO: 28555 - DNA, 684 bp, Artificial Sequence
  derived and/or modified sequence
atggactttggacctggccgcctcttccgcttcttctcctactgtgtggtggcccacatccagctggccgtgttcttcttctctgtgggcatcctggagacccgcatcctgctggctgatggagctgagttcaagaaggacagaggagagggcctggcccgggtgctgtgtggggaggagcaggctgatgctgatgctggggcccaggtgtgcagcctgctgctggcccagagcgaggtgcggccccagtgcctgctgctggtgctggccaacagaacagagatcagcagcaagctgcagctgatgaagaagcaccagagcgacctgaagaagctgggcatcctggacttcacagagcaggatgtggccagccaccagagctacagccagaagaccctcatcgccctggtgaccagcggggccctgctggccgtgctgggcatcaccggctacttcctgatgaacagaagatcctggagccccaccggggagcggctgggggaggacccctactacacagaaaatggaggcggccagggctacagcagcggccctggcaccagccctgaggcccagggcaaggcctctgtgaacagaggagcccaggagaatggcaccggccaggccaccagcagaaatggccacagcgcccggcagcacgtggtggccgacacagagctgtag

SEQ ID NO: 28556 - DNA, 1068 bp, Artificial Sequence
  derived and/or modified sequence
atgagcctggacaacaacggcacagccaccccagagctgcccacccagggcaccttcagcaatgtgtccaccaacgtgtcctaccaggagaccaccacccccagcaccctgggcagcaccagcctgcaccctgtgtcccagcacggcaatgaggccaccaccaacatcacagagaccaccgtgaagttcaccagcaccagcgtcatcacctctgtgtatggcaacaccaacagctctgtgcagagccagaccagcgtcatcagcacagtgttcaccaccccagccaacgtgtccaccccagagaccaccctgaagcccagcctgagccctggaaatgtgtctgacctgagcaccaccagcaccagcctggccaccagccccaccaagccctacaccagcagcagccccatcctgagtgacatcaaggccgagatcaagtgcagcggcatccgggaggtgaagctgacccagggcatctgcctggagcagaacaagaccagcagctgtgccgagttcaagaaggacagaggagagggcctggcccgggtgctgtgtggggaggagcaggctgatgctgatgctggggcccaggtgtgcagcctgctgctggcccagagcgaggtgcggccccagtgcctgctgctggtgctggccaacagaacagagatcagcagcaagctgcagctgatgaagaagcaccagagcgacctgaagaagctgggcatcctggacttcacagagcaggatgtggccagccaccagagctacagccagaagaccctcatcgccctggtgaccagcggggccctgctggccgtgctgggcatcaccggctacttcctgatgaacagaagatcctggagccccaccggggagcggctgggggaggacccctactacacagaaaatggaggcggccagggctacagcagcggccctggcaccagccctgaggcccagggcaaggcctctgtgaacagaggagcccaggagaatggcaccggccaggccaccagcagaaatggccacagcgcccggcagcacgtggtggccgacacagagctgtag

SEQ ID NO: 28557 - DNA, 753 bp, Artificial Sequence
  derived and/or modified sequence
atgttcctgcagatgtaccccaccaagaagctgcagcacctggtgcccctggaggtgcctgcctgcaccctgtgcctgaacatggccatgaggccccagcagaccagccaggccgagatcaagtgcagcggcatccgggaggtgaagctgacccagggcatctgcctggagcagaacaagaccagcagctgtgccgagttcaagaaggacagaggagagggcctggcccgggtgctgtgtggggaggagcaggctgatgctgatgctggggcccaggtgtgcagcctgctgctggcccagagcgaggtgcggccccagtgcctgctgctggtgctggccaacagaacagagatcagcagcaagctgcagctgatgaagaagcaccagagcgacctgaagaagctgggcatcctggacttcacagagcaggatgtggccagccaccagagctacagccagaagaccctgattgccctggtgaccagcggggccctgctggccgtgctgggcatcaccggctacttcctgatgaacagaagatcctggagccccactggagagcggctgggggaggacccctactacacagaaaatggaggcggccagggctacagcagcggccctggcaccagccctgaggcccagggcaaggcctctgtgaacagaggagcccaggagaatggaacaggccaggccaccagcagaaatggccacagcgcccggcagcacgtggtggccgacacagagctgtag

SEQ ID NO: 28558 - DNA, 1158 bp, Artificial Sequence
  derived and/or modified sequence
atgctggtgcggcggggcgcccgggccggcccccggatgccccggggatggacggcattgtgtctgctttccttattgccttccggctttatgtccctcgataacaacgggacagccaccccagagttaccaacacaggggacattctctaacgtgtccactaacgtatcttaccaggagactactactccaagtacgctggggagcactagccttcaccctgtaagtcagcatgggaatgaagctaccacaaacatcaccgaaactaccgtgaagttcacttcgacatcagtgattacatccgtgtatggcaacactaacagtagcgtgcagtcacagacgtccgtgatctccactgtgttcacgacacccgccaacgtgagtactccagagacaaccctgaagccttcgctttctcctgggaatgtgtctgatctgtccaccacgtccacgtctctcgctaccagccctactaaaccctatacctcatcaagtcctatattgagtgatataaaagccgaaatcaaatgctctggcatccgcgaagtcaaactgacacaagggatctgtttggaacaaaataagacatcctcgtgtgccgaatttaagaaggaccggggcgaggggttggcgcgcgtgctgtgcggagaagagcaggcagatgctgatgccggcgctcaggtctgttccctgctcctggcccagagcgaggtgaggccccagtgcctactccttgtgctggccaacagaaccgagattagcagtaaacttcagcttatgaaaaagcaccagagcgatctcaaaaagctggggatcttagactttactgagcaagacgtggcttcacaccaatcttacagccaaaaaactctgatcgcactggttacaagtggagcactgctggctgtgctgggtatcactggctactttctcatgaacagaaggagctggagtccgacaggagagcgcctgggtgaagacccctattacacggaaaatggaggcggacagggttattcatccgggccgggcacttcccctgaggctcagggcaaggcctccgttaaccgcggtgcgcaggagaacggaacaggccaagccacttcccgtaatggccactctgctagacagcacgtcgtcgctgacacagagctttag

SEQ ID NO: 28559 - DNA, 684 bp, Artificial Sequence
  derived and/or modified sequence
atggacttcggccccggccggctgttccggttcttcagctactgcgttgtggcccatatccagctggccgtcttcttcttttccgtggggatcctcgaaaccagaattctccttgctgatggggcagaatttaaaaaggacagaggagaggggctcgcacgggtgctgtgcggcgaggaacaggccgacgccgacgccggggcccaagtgtgcagcctcctgctggcgcagtcggaagtgagacctcagtgtcttctcctagtcctcgccaatagaacggagatctcaagcaaacttcagctgatgaagaaacaccagagtgaccttaaaaagctgggcatcctggatttcacagagcaagatgtggccagccaccagagctattcgcaaaaaaccttaatcgccctggtcaccagtggcgcgctgctggcggtcctcggtataaccggatactttctgatgaaccgtaggtcatggtctcctacaggagagcgcttaggagaagatccatactatacagagaacggaggcggacagggatattcaagtggacctggcacaagcccagaagcacagggcaaagcatccgtgaatagaggcgcccaggaaaatgggactggccaggcaaccagccggaatgggcacagcgcacggcagcacgtggttgccgatactgagctgtag

SEQ ID NO: 28560 - DNA, 1068 bp, Artificial Sequence
  derived and/or modified sequence
atgagcctggacaacaacggcaccgccacccccgagctgcccacccagggtaccttctctaatgtatctacgaatgtctcttaccaggaaactactactcccagcacgctcggaagcactagcctgcatcccgtgagtcaacacggcaacgaggccaccacaaatatcactgagacaacagtgaaattcacttcaaccagtgtcatcacatccgtctatgggaataccaactcctcagttcaaagccagacgtccgtaatctcaactgtgttcacaacgcctgctaacgtaagtacaccagagactaccttgaaaccttctttgagcccaggaaacgtctctgatctgtcaactacatcaacctccctcgctacttctcctacaaaaccctatacctcttccagtccaatcttaagtgatatcaaggccgaaatcaagtgctcagggattcgcgaggtgaagttgactcagggaatttgtctggaacagaacaaaaccagttcctgcgcagagttcaaaaaagacagaggtgaaggtctggccagagtcctctgcggcgaagaacaggcagatgccgacgcaggggctcaggtctgcagtctcctactcgcgcagtccgaggtgcggccccagtgcctactcctagttctggccaaccgcactgagatatcctccaagctgcagcttatgaaaaagcaccagagtgacctcaaaaaactggggattcttgattttaccgagcaggacgtagcctcccatcagagctattcacaaaagacactgattgcgctggtcaccagtggtgctttactcgccgttttgggcattacgggttacttcctgatgaaccgtagatcgtggagccctacaggggaaaggctcggcgaggacccttactatacagagaacggaggaggtcagggctacagttctggccctgggactagccccgaggcgcaggggaaagctagcgtaaaccgcggcgcacaggaaaatgggacagggcaagcgacatcacgaaatgggcattccgcccggcagcacgtggtcgcggacacagaactctag

SEQ ID NO: 28561 - DNA, 753 bp, Artificial Sequence
  derived and/or modified sequence
atgttcctgcagatgtaccccaccaagaagctgcagcacctggtgcctttagaggtgccggcctgtacactgtgcttgaacatggcaatgcggcctcagcagacctcacaggctgaaattaagtgcagcggcattagggaggttaaactaacccagggtatctgcctcgaacagaacaaaacgtcaagttgtgctgagttcaagaaggaccgaggggaaggtctggcccgggtgctgtgcggagaggaacaggctgatgctgacgccggtgctcaggtttgttcactactgctcgcccagtccgaggtaagaccccagtgcttgctgttggtgctcgcaaatcgcaccgagatatcctcgaaactgcagttgatgaaaaaacatcagtcggacctcaaaaagctcgggattctggattttacggagcaggacgtggctagccatcagagctatagccaaaagacactgattgctctcgtgacatccggcgccctgttagctgttctgggaatcactggctattttttaatgaatcggcgatcctggtccccaactggcgaacgcctcggtgaagacccgtattatactgagaacggaggaggtcaagggtactcaagtggtcctggcacctcacctgaagcacagggcaaggcttctgttaatcgcggcgcacaggaaaacggaaccggacaggcgacgtcacgtaacggacacagcgcaagacagcatgtggtggcggatacagagctttag

SEQ ID NO: 28562 - DNA, 1158 bp, Artificial Sequence
  derived and/or modified sequence
atgctagtgaggcgcggagccagagccggaccacggatgcccagaggctggaccgccctttgccttctctctctcctgccctcagggttcatgtccctagataacaacggaaccgccacaccagaactgccaacacaaggcactttttcaaatgtctctaccaacgtttcctaccaggagactaccacacccagtacgctggggagtacgagcctgcaccctgtgtcacagcatggtaatgaggccactaccaacattacggaaaccaccgtaaagttcacatccacctctgtcatcacatccgtgtacgggaacactaactcctccgtgcaatcacagacatcagttatcagcaccgtctttacaacaccagccaacgtgtctactcctgaaacgacgctcaagccgtctctgtctcctggcaacgtatcagacctgagtactactagcaccagtctggcgacttcacccaccaagccatataccagttccagccccattttgagcgacataaaagccgagattaaatgctctggcattagggaggtaaaactgacccaggggatctgcctagagcagaacaaaacttcttcttgcgctgaattcaaaaaagatagaggagaggggctcgcccgagtgctctgcggcgaggaacaggctgatgctgacgcgggtgcccaggtctgctccttactgctggcacagtccgaggtccgacctcaatgtctactcctggttctagccaaccggacggagatctctagcaagctgcagctaatgaagaagcaccaatcggatctgaaaaagttgggaatactggactttaccgagcaagacgtcgccagtcaccagtcctatagccaaaagaccctcatcgctctcgtgacaagcggcgctttgctggccgtgcttggtataacagggtatttccttatgaaccgcaggagttggagtccgaccggcgaacggctgggtgaggacccctattacactgaaaatggcggtgggcagggctattctagtggacctggcacttcgcctgaagcccaaggaaaagcgagcgtaaatagaggggctcaggagaatggaacaggccaagccacatctaggaatggacacagcgccaggcaacacgtggtggccgatactgagctctag

SEQ ID NO: 28563 - DNA, 684 bp, Artificial Sequence
  derived and/or modified sequence
atggacttcgggccaggccgtctgttcagattcttctcttactgtgtagtagctcatatccaacttgccgtgttctttttctcagtcggaattctcgagacaaggattctgcttgctgacggcgcagagtttaagaaggacagaggagaggggctggcacgagtgctttgcggggaggaacaggcagatgctgatgctggtgctcaagtgtgttccctcctgctagcacagtccgaggtccggccacagtgccttcttctcgtgctcgccaacaggacagaaatcagcagcaagctgcaactgatgaagaaacatcagtctgacctgaaaaaactggggatcctggacttcacggagcaggacgtggcttcccatcagtcctattcccagaaaacactgattgcgctggtgacctcaggcgcactgctggctgtcctgggaataactggctatttcctgatgaacagaaggtcctggagcccaaccggcgaacgcctaggcgaagatccgtattatactgagaatgggggaggccagggttacagcagtggcccaggtacatctccagaagcgcagggcaaagcctccgttaataggggcgcacaggaaaacggtactgggcaggcaacctcacggaacggacactccgccagacaacatgttgtagccgacactgaattgtag

SEQ ID NO: 28564 - DNA, 1068 bp, Artificial Sequence
  derived and/or modified sequence
atgagcctcgacaacaacggtacagccacaccggagctccccacccagggaactttctccaacgtcagtactaacgtctcttaccaggaaactactacgcccagcacactggggtcaacatcactccatcccgtgtcacagcatggtaatgaggctactacaaacatcactgagacaaccgtgaaattcacaagcaccagtgtcatcacaagcgtgtacggcaataccaatagtagcgtgcaatcacagacttcagtaatcagtacagtgttcaccacaccggctaatgtgtccactccagagaccacattaaaaccctcattgtcacctgggaacgttagtgacctgtcgaccacatcaaccagtcttgccacaagccctacaaaaccatatacctcctcgtctcctattcttagtgacataaaggctgaaatcaagtgcagcggaatcagagaggtaaagcttacacagggcatatgcttggagcagaataagacctcctcctgcgccgaattcaagaaggatcggggagagggactcgcacgagttttgtgcggtgaggaacaggccgatgccgacgccggagctcaagtctgcagtctattactggcacagtctgaggtgaggccccaatgcctcctgctggttctagctaatagaaccgagatttccagcaagctacagttaatgaaaaagcaccaatccgacttgaaaaaactggggatcctcgacttcactgagcaggacgtcgctagtcaccagtcatactcccagaaaacactcatcgctctggtgaccagtggcgctctcctggcggttttaggaattacaggctacttcctgatgaaccggaggagttggtcacctaccggggaacggctgggcgaggacccttattacaccgagaatggagggggtcaaggttacagttctggtcccggaacctcacccgaggcgcagggaaaggcttctgtcaatcggggtgcccaggagaacgggaccggacaagctacatcaaggaacggacactccgcacgacagcacgtggtcgcagatacagaactgtag

SEQ ID NO: 28565 - DNA, 753 bp, Artificial Sequence
  derived and/or modified sequence
atgtttctgcaaatgtatcccacaaagaaactgcagcatcttgtgccccttgaagtgcccgcttgtactctgtgcctcaatatggctatgcggcctcagcagactagccaggcagagatcaagtgcagcgggatcagagaggtgaagctgacacagggaatatgtcttgagcaaaataaaacgtcgtcctgtgccgaattcaagaaggaccgaggcgaggggctcgcgcgtgtcttatgcggcgaggagcaagccgatgcggatgctggggcacaagtctgtagtctgttactggcacaaagcgaagtgcgacctcaatgtctcctgctggttcttgctaacagaacagaaattagcagcaagctgcagctgatgaaaaaacatcagtctgacttgaaaaaacttggcattcttgatttcacagaacaggatgtggcgagccatcagtcctattcacagaaaactctgatcgccttagtcaccagcggcgcactgttggccgtcctaggcataacgggatatttcctgatgaatcggaggtcatggtcgccaaccggagaaagattaggggaggacccatattacactgaaaatgggggaggacagggatacagctctggaccaggaacatccccagaagcccaggggaaggccagtgtgaacaggggtgcacaggaaaatgggacaggccaagccacaagcaggaacggacattctgctcggcagcatgtggtcgccgacacagagctgtag

SEQ ID NO: 28566 - DNA, 2679 bp, Artificial Sequence
  derived and/or modified sequence
aagaagtgggatggggcctctccagaaagctgaacgaggcatctggagcccgaacaaacctccaccttttttggcctcgacggcggcaacccagcctccctcctaacgccctccgcctttgggaccaaccaggggagctcaagttagtagcagccaaggagaggcgctgccttgccaagactaaaaagggaggggagaagagaggaaaaaagcaagaatcccccacccctctcccgggcggagggggcgggaagagcgcgtcctggccaagccgagtagtgtcttccactcggtgcgtctctctaggagccgcgcgggaaggatgctggtccgcaggggcgcgcgcgcagggcccaggatgccgcggggctggaccgcgctttgcttgctgagtttgctgccttctgggttcatgagtcttgacaacaacggtactgctaccccagagttacctacccagggaacattttcaaatgtttctacaaatgtatcctaccaagaaactacaacacctagtacccttggaagtaccagcctgcaccctgtgtctcaacatggcaatgaggccacaacaaacatcacagaaacgacagtcaaattcacatctacctctgtgataacctcagtttatggaaacacaaactcttctgtccagtcacagacctctgtaatcagcacagtgttcaccaccccagccaacgtttcaactccagagacaaccttgaagcctagcctgtcacctggaaatgtttcagacctttcaaccactagcactagccttgcaacatctcccactaaaccctatacatcatcttctcctatcctaagtgacatcaaggcagaaatcaaatgttcaggcatcagagaagtgaaattgactcagggcatctgcctggagcaaaataagacctccagctgtgcggagtttaagaaggacaggggagagggcctggcccgagtgctgtgtggggaggagcaggctgatgctgatgctggggcccaggtatgctccctgctccttgcccagtctgaggtgaggcctcagtgtctactgctggtcttggccaacagaacagaaatttccagcaaactccaacttatgaaaaagcaccaatctgacctgaaaaagctggggatcctagatttcactgagcaagatgttgcaagccaccagagctattcccaaaagaccctgattgcactggtcacctcgggagccctgctggctgtcttgggcatcactggctatttcctgatgaatcgccgcagctggagccccacaggagaaaggctgggcgaagacccttattacacggaaaacggtggaggccagggctatagctcaggacctgggacctcccctgaggctcagggaaaggccagtgtgaaccgaggggctcaggaaaacgggaccggccaggccacctccagaaacggccattcagcaagacaacacgtggtggctgataccgaattgtgactcggctaggtggggcaaggctgggcagtgtccgagagagcacccctctctgcatctgaccacgtgctacccccatgctggaggtgacatctcttacgcccaacccttccccactgcacacacctcagaggctgttcttggggccctacaccttgaggaggggcaggtaaactcctgtcctttacacattcggctccctggagccagactctggtcttctttgggtaaacgtgtgacgggggaaagccaaggtctggagaagctcccaggaacaatcgatggccttgcagcactcacacaggacccccttcccctaccccctcctctctgccgcaatacaggaacccccaggggaaagatgagcttttctaggctacaattttctcccaggaagctttgatttttaccgtttcttccctgtattttctttctctactttgaggaaaccaaagtaaccttttgcacctgctctcttgtaatgatatagccagaaaaacgtgttgccttgaaccacttccctcatctctcctccaagacactgtggacttggtcaccagctcctcccttgttctctaagttccactgagctccatgtgccccctctaccatttgcagagtcctgcacagttttctggctggagcctagaacaggcctcccaagttttaggacaaacagctcagttctagtctctctggggccacacagaaactctttttgggctcctttttctccctctggatcaaagtaggcaggaccatgggaccaggtcttggagctgagcctctcacctgtactcttccgaaaaatcctcttcctctgaggctggatcctagccttatcctctgatctccatggcttcctcctccctcctgccgactcctgggttgagctgttgcctcagtcccccaacagatgcttttctgtctctgcctccctcaccctgagccccttccttgctctgcacccccatatggtcatagcccagatcagctcctaacccttatcaccagctgcctcttctgtgggtgacccaggtccttgtttgctgttgatttctttccagaggggttgagcagggatcctggtttcaatgacggttggaaatagaaatttccagagaagagagtattgggtagatattttttctgaatacaaagtgatgtgtttaaatactgcaattaaagtgatactgaaacac

SEQ ID NO: 28567 - DNA, 2538 bp, Artificial Sequence
  derived and/or modified sequence
acagagacccagttctgatgatggtcacacaccccagcagttttcccctaacaggaaagttgtcagggctgttcaggcatttccttctctgccatctgccatccggactgaagagaaagtcttagtttcaattcctttcctgttcaggggaggaggacactctgattggaggctgctggaataaattctgactcactattgaagaattatcagagtttttcttctgagtccaaattcctgggtctgatggcccagtcagcaacctgaagaaaaatctatgaacttcattaaaactgggttccatgcttttaatggaaaacagagatggaagacgagacaaaaatgccatttcagtttgagcaatgcactttttgagactcctttgggtagaaagagggaggaggccactgaggtttccactgagtgtatattatagatttgttctctcctcctcacctcccttggcttttcttccatcattggggactgctgtaatcttgaaacagaatattttctcttagttattattgcattattaatattttctgtttttggccatttcttttgagtttaatttgcatatgtgtacatgggcaatgcttcaacgagacaatttttttaagtttgttctctaacatcttagatactagaagatatggattttggtcctgggagattatttaggtttttttcttattgtgttgttgcacatatacagttagcagttttttttttttctgttggaattttagaaacaaggatccttcttgcggacggggcggagtttaagaaggacaggggagagggcctggcccgagtgctgtgtggggaggagcaggctgatgctgatgctggggcccaggtatgctccctgctccttgcccagtctgaggtgaggcctcagtgtctactgctggtcttggccaacagaacagaaatttccagcaaactccaacttatgaaaaagcaccaatctgacctgaaaaagctggggatcctagatttcactgagcaagatgttgcaagccaccagagctattcccaaaagaccctgattgcactggtcacctcgggagccctgctggctgtcttgggcatcactggctatttcctgatgaatcgccgcagctggagccccacaggagaaaggctgggcgaagacccttattacacggaaaacggtggaggccagggctatagctcaggacctgggacctcccctgaggctcagggaaaggccagtgtgaaccgaggggctcaggaaaacgggaccggccaggccacctccagaaacggccattcagcaagacaacacgtggtggctgataccgaattgtgactcggctaggtggggcaaggctgggcagtgtccgagagagcacccctctctgcatctgaccacgtgctacccccatgctggaggtgacatctcttacgcccaacccttccccactgcacacacctcagaggctgttcttggggccctacaccttgaggaggggcaggtaaactcctgtcctttacacattcggctccctggagccagactctggtcttctttgggtaaacgtgtgacgggggaaagccaaggtctggagaagctcccaggaacaatcgatggccttgcagcactcacacaggacccccttcccctaccccctcctctctgccgcaatacaggaacccccaggggaaagatgagcttttctaggctacaattttctcccaggaagctttgatttttaccgtttcttccctgtattttctttctctactttgaggaaaccaaagtaaccttttgcacctgctctcttgtaatgatatagccagaaaaacgtgttgccttgaaccacttccctcatctctcctccaagacactgtggacttggtcaccagctcctcccttgttctctaagttccactgagctccatgtgccccctctaccatttgcagagtcctgcacagttttctggctggagcctagaacaggcctcccaagttttaggacaaacagctcagttctagtctctctggggccacacagaaactctttttgggctcctttttctccctctggatcaaagtaggcaggaccatgggaccaggtcttggagctgagcctctcacctgtactcttccgaaaaatcctcttcctctgaggctggatcctagccttatcctctgatctccatggcttcctcctccctcctgccgactcctgggttgagctgttgcctcagtcccccaacagatgcttttctgtctctgcctccctcaccctgagccccttccttgctctgcacccccatatggtcatagcccagatcagctcctaacccttatcaccagctgcctcttctgtgggtgacccaggtccttgtttgctgttgatttctttccagaggggttgagcagggatcctggtttcaatgacggttggaaatagaaatttccagagaagagagtattgggtagatattttttctgaatacaaagtgatgtgtttaaatactgcaattaaagtgatactgaaacac

SEQ ID NO: 28568 - DNA, 1307 bp, Artificial Sequence
  derived and/or modified sequence
aagcaagaatcccccacccctctcccgggcggagggggcgggaagagcgcgtcctggccaagccgagtagtgtcttccactcggtgcgtctctctaggagccgcgcgggaaggatgctggtccgcaggaccgcgctttgcttgctgagtttgctgccttctgggttcatgagtcttgacaacaacggtactgctaccccagagttacctacccagggaacattttcaaatgtttctacaaatgtatcctaccaagaaactacaacacctagtacccttggaagtaccagcctgcaccctgtgtctcaacatggcaatgaggccacaacaaacatcacagaaacgacagtcaaattcacatctacctctgtgataacctcagtttatggaaacacaaactcttctgtccagtcacagacctctgtaatcagcacagtgttcaccaccccagccaacgtttcaactccagagacaaccttgaagcctagcctgtcacctggaaatgtttcagacctttcaaccactagcactagccttgcaacatctcccactaaaccctatacatcatcttctcctatcctaagtgacatcaaggcagaaatcaaatgttcaggcatcagagaagtgaaattgactcagggcatctgcctggagcaaaataagacctccagctgtgcggagtttaagaaggacaggggagagggcctggcccgagtgctgtgtggggaggagcaggctgatgctgatgctggggcccaggtatgctccctgctccttgcccagtctgaggtgaggcctcagtgtctactgctggtcttggccaacagaacagaaatttccagcaaactccaacttatgaaaaagcaccaatctgacctgaaaaagctggggatcctagatttcactgagcaagatgttgcaagccaccagagctattcccaaaagaccctgattgcactggtcacctcgggagccctgctggctgtcttgggcatcactggctatttcctgatgaatcgccgcagctggagccccacaggagaaaggctgggcgaagacccttattacacggaaaacggtggaggccagggctatagctcaggacctgggacctcccctgaggctcagggaaaggccagtgtgaaccgaggggctcaggaaaacgggaccggccaggccacctccagaaacggccattcagcaagacaacacgtggtggctgataccgaattgtgactcggctaggtggggcaaggctgggcagtgtccgagagagcacccctctctgcatctgaccacgtgctaccc

SEQ ID NO: 28569 - DNA, 1362 bp, Artificial Sequence
  derived and/or modified sequence
cactcggtgcgtctctctaggagccgcgcgggaaggatgctggtccgcaggggcgcgcgcgcagggcccaggatgccgcggggctggaccgcgctttgcttgctgagtttgctgccttctgggttcatgagtcttgacaacaacggtactgctaccccagagttacctacccagggaacattttcaaatgtttctacaaatgtatcctaccaagaaactacaacacctagtacccttggaagtaccagcctgcaccctgtgtctcaacatggcaatgaggccacaacaaacatcacaggcagaaatcaaatgttcaggcatcagagaagtgaaattgactcagggcatctgcctggagcaaaataagacctccagctgtgcggagtttaagaaggacaggggagagggcctggcccgagtgctgtgtggggaggagcaggctgatgctgatgctggggcccaggtatgctccctgctccttgcccagtctgaggtgaggcctcagtgtctactgctggtcttggccaacagaacagaaatttccagcaaactccaacttatgaaaaagcaccaatctgacctgaaaaagctggggatcctagatttcactgagcaagatgttgcaagccaccagagctattcccaaaagaccctgattgcactggtcacctcgggagccctgctggctgtcttgggcatcactggctatttcctgatgaatcgccgcagctggagccccacaggagaaaggctgggcgaagacccttattacacggaaaacggtggaggccagggctatagctcaggacctgggacctcccctgaggctcagggaaaggccagtgtgaaccgaggggctcaggaaaacgggaccggccaggccacctccagaaacggccattcagcaagacaacacgtggtggctgataccgaattgtgactcggctaggtggggcaaggctgggcagtgtccgagagagcacccctctctgcatctgaccacgtgctacccccatgctggaggtgacatctcttacgcccaacccttccccactgcacacacctcagaggctgttcttggggccctacaccttgaggaggggcaggtaaactcctgtcctttacacattcggctccctggagccagactctggtcttctttgggtaaacgtgtgacgggggaaagccaaggtctggagaagctcccaggaacaatcgatggccttgcagcactcacacaggacccccttcccctaccccctcctctctgccgcaatacaggaacccccaggggaaagatgagcttttctaggctacaattttctcccaggaagctttgatttttaccgtttcttccctgta

SEQ ID NO: 28570 - DNA, 1158 bp, Artificial Sequence
  derived and/or modified sequence
atgctggtgagaagaggcgccagagccggccccagaatgcccagaggctggaccgccctgtgcctgctgagcctgctgcccagcggcttcatgagcctggacaacaacggcaccgccacccccgagctgcccacccagggcaccttcagcaacgtgagcaccaacgtgagctaccaggagaccaccacccccagcaccctgggcagcaccagcctgcaccccgtgagccagcacggcaacgaggccaccaccaacatcaccgagaccaccgtgaagttcaccagcaccagcgtgatcaccagcgtgtacggcaacaccaacagcagcgtgcagagccagaccagcgtgatcagcaccgtgttcaccacccccgccaacgtgagcacccccgagaccaccctgaagcccagcctgagccccggcaacgtgagcgacctgagcaccaccagcaccagcctggccaccagccccaccaagccctacaccagcagcagccccatcctgagcgacatcaaggccgagatcaagtgcagcggcatcagagaggtgaagctgacccagggcatctgcctggagcagaacaagaccagcagctgcgccgagttcaagaaggacagaggcgagggcctggccagagtgctgtgcggcgaggagcaggccgacgccgacgccggcgcccaggtgtgcagcctgctgctggcccagagcgaggtgagaccccagtgcctgctgctggtgctggccaacagaaccgagatcagcagcaagctgcagctgatgaagaagcaccagagcgacctgaagaagctgggcatcctggacttcaccgagcaggacgtggccagccaccagagctacagccagaagaccctgatcgccctggtgaccagcggcgccctgctggccgtgctgggcatcaccggctacttcctgatgaacagaagaagctggagccccaccggcgagagactgggcgaggacccctactacaccgagaacggcggcggccagggctacagcagcggccccggcaccagccccgaggcccagggcaaggccagcgtgaacagaggcgcccaggagaacggcaccggccaggccaccagcagaaacggccacagcgccagacagcacgtggtggccgacaccgagctgtag

SEQ ID NO: 28571 - DNA, 684 bp, Artificial Sequence
  derived and/or modified sequence
atggacttcggccccggcagactgttcagattcttcagctactgcgtggtggcccacatccagctggccgtgttcttcttcagcgtgggcatcctggagaccagaatcctgctggccgacggcgccgagttcaagaaggacagaggcgagggcctggccagagtgctgtgcggcgaggagcaggccgacgccgacgccggcgcccaggtgtgcagcctgctgctggcccagagcgaggtgagaccccagtgcctgctgctggtgctggccaacagaaccgagatcagcagcaagctgcagctgatgaagaagcaccagagcgacctgaagaagctgggcatcctggacttcaccgagcaggacgtggccagccaccagagctacagccagaagaccctgatcgccctggtgaccagcggcgccctgctggccgtgctgggcatcaccggctacttcctgatgaacagaagaagctggagccccaccggcgagagactgggcgaggacccctactacaccgagaacggcggcggccagggctacagcagcggccccggcaccagccccgaggcccagggcaaggccagcgtgaacagaggcgcccaggagaacggcaccggccaggccaccagcagaaacggccacagcgccagacagcacgtggtggccgacaccgagctgtag

SEQ ID NO: 28572 - DNA, 1068 bp, Artificial Sequence
  derived and/or modified sequence
atgagcctggacaacaacggcaccgccacccccgagctgcccacccagggcaccttcagcaacgtgagcaccaacgtgagctaccaggagaccaccacccccagcaccctgggcagcaccagcctgcaccccgtgagccagcacggcaacgaggccaccaccaacatcaccgagaccaccgtgaagttcaccagcaccagcgtgatcaccagcgtgtacggcaacaccaacagcagcgtgcagagccagaccagcgtgatcagcaccgtgttcaccacccccgccaacgtgagcacccccgagaccaccctgaagcccagcctgagccccggcaacgtgagcgacctgagcaccaccagcaccagcctggccaccagccccaccaagccctacaccagcagcagccccatcctgagcgacatcaaggccgagatcaagtgcagcggcatcagagaggtgaagctgacccagggcatctgcctggagcagaacaagaccagcagctgcgccgagttcaagaaggacagaggcgagggcctggccagagtgctgtgcggcgaggagcaggccgacgccgacgccggcgcccaggtgtgcagcctgctgctggcccagagcgaggtgagaccccagtgcctgctgctggtgctggccaacagaaccgagatcagcagcaagctgcagctgatgaagaagcaccagagcgacctgaagaagctgggcatcctggacttcaccgagcaggacgtggccagccaccagagctacagccagaagaccctgatcgccctggtgaccagcggcgccctgctggccgtgctgggcatcaccggctacttcctgatgaacagaagaagctggagccccaccggcgagagactgggcgaggacccctactacaccgagaacggcggcggccagggctacagcagcggccccggcaccagccccgaggcccagggcaaggccagcgtgaacagaggcgcccaggagaacggcaccggccaggccaccagcagaaacggccacagcgccagacagcacgtggtggccgacaccgagctgtag

SEQ ID NO: 28573 - DNA, 753 bp, Artificial Sequence
  derived and/or modified sequence
atgttcctgcagatgtaccccaccaagaagctgcagcacctggtgcccctggaggtgcccgcctgcaccctgtgcctgaacatggccatgagaccccagcagaccagccaggccgagatcaagtgcagcggcatcagagaggtgaagctgacccagggcatctgcctggagcagaacaagaccagcagctgcgccgagttcaagaaggacagaggcgagggcctggccagagtgctgtgcggcgaggagcaggccgacgccgacgccggcgcccaggtgtgcagcctgctgctggcccagagcgaggtgagaccccagtgcctgctgctggtgctggccaacagaaccgagatcagcagcaagctgcagctgatgaagaagcaccagagcgacctgaagaagctgggcatcctggacttcaccgagcaggacgtggccagccaccagagctacagccagaagaccctgatcgccctggtgaccagcggcgccctgctggccgtgctgggcatcaccggctacttcctgatgaacagaagaagctggagccccaccggcgagagactgggcgaggacccctactacaccgagaacggcggcggccagggctacagcagcggccccggcaccagccccgaggcccagggcaaggccagcgtgaacagaggcgcccaggagaacggcaccggccaggccaccagcagaaacggccacagcgccagacagcacgtggtggccgacaccgagctgtag

SEQ ID NO: 28574 - protein, 160 aa, Artificial Sequence
  derived and/or modified sequence
MHRRRSRSCREDQKPVMDDQRDLISNNEQLPMLGRRPGAPESKCSRGALYTGFSILVTLLLAGQATTAYFLYQQQGRLDKLTVTSQNLQLENLRMKLPKPPKPVSKMRMATPLLMQALPMGALPQGPMQNATKYGNMTEDHVMHLLQSHWNWRTRLLGWV

SEQ ID NO: 28575 - DNA, 483 bp, Artificial Sequence
  derived and/or modified sequence
atgcatcgaagacgttcgcggtcctgtagggaagaccaaaaacccgtgatggatgaccaaagggatctgatttctaacaatgaacagctcccaatgctgggccggaggccaggagcgcctgaatccaagtgtagcagaggtgccttgtacaccggcttctctatactagtgactttgctattggcgggccaggctaccaccgcttactttctataccagcaacagggccgactggacaagctgactgttacctcacagaatctgcagctcgaaaacctgaggatgaagttgccaaagccgccgaagcccgtcagcaagatgaggatggccacgcccctgctcatgcaggcgctgccgatgggggctctcccccagggcccaatgcagaatgcaacaaagtacggcaacatgactgaagatcatgtcatgcatctcctgcagagccactggaattggaggactagattactgggatgggtgtag

SEQ ID NO: 28576 - DNA, 369 bp, Artificial Sequence
  derived and/or modified sequence
atgcacaggagaaggagccgctcatgccgagaagatcaaaaacccgtgatggatgatcagcgcgatctgatctctaataacgagcagttacccatgttgggccgccggcccggggcacccgagtctaagtgttcaagaggtgctctgtatacaggatttagcatacttgtgacactgctgctcgctggccaagccacaaccgcatactttttgtaccagcaacagggccggctcgacaaattgactgtcacatcccagaatctgcagttggaaaatctgcgcatgaagttgccaaagccgcacgccgagtgccatcaggtctggcaacatgaccggggaccatgtgacgcgccagcgcctgagtgctag

SEQ ID NO: 28577 - DNA, 459 bp, Artificial Sequence
  derived and/or modified sequence
atgcatcggaggcgctctcggagctgcagggaggaccagaagccagttatggacgaccagcgggacttgatttccaataacgagcagctccctatgctcgggcgcaggcctggcgcccctgaatctaagtgctctcgaggggccctgtacaccggatttagcattctcgttaccctactgttagccggccaggccacaacggcctatttcctctaccagcaacaagggagactggataagttgacggtgacatcccagaaccttcagctcgaaaacctacggatgaaactgccaaaacccccaaagccagtgagcaaaatgagaatggctactcccttgctcatgcaggctctgcccatgggggcactcccacagggccctatgcagaacgccaccaagtatggcaacatgaccgaggaccacgtgatgcatctgttgcaggaagtggccaaatcctag

SEQ ID NO: 28578 - DNA, 483 bp, Artificial Sequence
  derived and/or modified sequence
atgcacagaagaagaagccgcagctgccgggaggaccagaagcctgtgatggatgaccagagggacctgatcagcaacaatgagcagctgcccatgctgggcagaagacctggggcccctgagagcaagtgcagcagaggagccctgtacacaggcttcagcatcctggtgaccctgctgctggccggccaggccaccacagcctacttcctgtaccagcagcagggccgcctggacaagctgactgtgaccagccagaacctgcagctggagaacctgaggatgaagctgcccaagccacccaagcctgtgtccaagatgaggatggccacccccctgctgatgcaggccctgcccatgggcgccctgccccagggccccatgcagaatgccaccaagtatggcaacatgacagaagatcatgtgatgcacctgctgcagagccactggaactggaggacccggctgctgggctgggtgtag

SEQ ID NO: 28579 - DNA, 369 bp, Artificial Sequence
  derived and/or modified sequence
atgcacagaagaagaagccgcagctgccgggaggaccagaagcctgtgatggatgaccagagggacctgatcagcaacaatgagcagctgcccatgctgggcagaagacctggggcccctgagagcaagtgcagcagaggagccctgtacacaggcttcagcatcctggtgaccctgctgctggccggccaggccaccacagcctacttcctgtaccagcagcagggccgcctggacaagctgactgtgaccagccagaacctgcagctggagaacctgaggatgaagctgcccaagccccatgctgagtgccaccaggtgtggcagcacgaccggggcccctgtgatgccccagccccagaatgttag

SEQ ID NO: 28580 - DNA, 459 bp, Artificial Sequence
  derived and/or modified sequence
atgcacagaagaagaagccgcagctgccgggaggaccagaagcctgtgatggatgaccagagggacctgatcagcaacaatgagcagctgcccatgctgggcagaagacctggggcccctgagagcaagtgcagcagaggagccctgtacacaggcttcagcatcctggtgaccctgctgctggccggccaggccaccacagcctacttcctgtaccagcagcagggccgcctggacaagctgactgtgaccagccagaacctgcagctggagaacctgaggatgaagctgcccaagccacccaagcctgtgtccaagatgaggatggccacccccctgctgatgcaggccctgcccatgggcgccctgccccagggccccatgcagaatgccaccaagtatggcaacatgacagaagatcatgtgatgcacctgctgcaggaggtggccaagagctag

SEQ ID NO: 28581 - DNA, 483 bp, Artificial Sequence
  derived and/or modified sequence
atgcaccggcggcggagccggagctgccgggaggaccagaagcccgtgatggacgaccaaagagacctcatctccaataatgagcagctgcctatgctgggccggcgccctggtgcaccagagtcaaagtgtagtagaggtgcattgtacacaggttttagtattctggttactctgctcttggccggccaagctactacggcatattttttataccagcagcagggcaggctggacaagctgaccgtcacatcacagaacttacagcttgaaaacctcaggatgaaactaccgaaacctccgaagccggttagcaagatgagaatggctaccccccttctcatgcaagcgttgcctatgggagccctccctcaggggcctatgcagaacgcgacaaaatacggaaacatgaccgaggatcacgtcatgcacctcctgcagtcccactggaactggagaacaagactcctcggctgggtgtag

SEQ ID NO: 28582 - DNA, 369 bp, Artificial Sequence
  derived and/or modified sequence
atgcaccggcggcggagccggagctgccgggaggaccagaagcccgtgatggatgatcagcgagacctcatttcgaacaacgagcagctgcccatgcttggacgccgcccaggcgctccggagtccaagtgctcgcgcggtgcactctacacgggatttagcatcctggtgacattattgctcgcgggacaagcgacaaccgcctactttctctaccagcagcagggcaggttggataagttaaccgtgacctctcaaaacctacagttagagaacctgagaatgaagctccctaagccacacgcagaatgccatcaggtctggcagcacgatcggggtccatgtgatgcccctgctcctgaatgttag

SEQ ID NO: 28583 - DNA, 459 bp, Artificial Sequence
  derived and/or modified sequence
atgcaccggcggcggagccggagctgccgggaggaccagaagcccgtgatggacgaccagcgggatctcatctccaataacgaacaactgcccatgttgggccgccgcccaggcgcaccggagtcaaagtgtagtcggggggccctgtacaccggcttttctatcctagtgacactcctgctcgccggccaagccactactgcctacttcctgtaccagcagcaagggaggctggataagctcactgttaccagtcaaaacctgcaacttgaaaacctgcgtatgaagttgcccaaacccccaaagcccgtgagcaagatgaggatggccactccactgctcatgcaggcactcccgatgggggccctcccacagggacccatgcagaatgcgactaagtacggtaacatgacagaggatcatgtgatgcacttgcttcaggaggttgctaagtcatag

SEQ ID NO: 28584 - DNA, 483 bp, Artificial Sequence
  derived and/or modified sequence
atgcatcggagaaggagcaggtcgtgtagggaagatcagaagcctgtaatggacgaccagagggacctcatctcaaataatgaacagctgcctatgctgggtcgcagacccggtgcgccagaatcgaagtgctcacgaggcgctctgtataccgggttctccatacttgttaccctcttactagctggccaagcaaccacagcctatttcctttatcagcagcaggggcgactcgacaagctcaccgtgacgtcacagaatcttcagctagaaaacctgcggatgaaactcccaaagccacctaaaccggtttccaaaatgcggatggccacacctttgcttatgcaggcattgcccatgggagccctgccacagggccctatgcagaatgctactaagtacggaaacatgacggaagatcacgtgatgcacctccttcaatctcattggaattggcggacccgtctcttgggctgggtgtag

SEQ ID NO: 28585 - DNA, 369 bp, Artificial Sequence
  derived and/or modified sequence
atgcacagaaggcgatcacgctcttgtcgggaggaccagaagcctgtgatggacgaccagcgtgatttgatcagcaataacgagcagcttccgatgctcggtagaagacctggcgctcccgagagtaaatgctcgcgaggcgcattatataccggctttagtattttggtgactctgcttctcgccggacaagcgaccactgcctattttttgtaccagcaacaggggagactcgataagttgacagtaacctcgcaaaacctccaactagaaaacctgcgaatgaagctgcccaaacctcatgctgagtgccatcaggtgtggcagcacgacagagggccatgcgatgccccagcacccgaatgctag

SEQ ID NO: 28586 - DNA, 459 bp, Artificial Sequence
  derived and/or modified sequence
atgcatcggagaagatcccggtcttgccgggaggaccagaaaccggtgatggacgaccagagggacctgatctccaacaacgaacaattgcctatgctcgggcgtcgacctggtgcccctgaatctaagtgttcccgcggagccctctacaccggcttcagtatcctggtcactctcctgctggccggtcaagccacaaccgcctatttcctgtaccagcaacaaggtcgccttgacaaattgaccgtaacatcccaaaacctacagctggagaatctgagaatgaaactccccaagcctccaaagccggtatccaagatgagaatggcaacccctttactgatgcaggccttacccatgggagccctgccacagggccctatgcagaatgccacaaaatacggtaacatgactgaggatcatgtgatgcacctattacaggaggttgctaaaagctag

SEQ ID NO: 28587 - DNA, 1138 bp, Artificial Sequence
  derived and/or modified sequence
ccggggggtcagggtcccagatgcacaggaggagaagcaggagctgtcgggaagatcagaagccagtcatggatgaccagcgcgaccttatctccaacaatgagcaactgcccatgctgggccggcgccctggggccccggagagcaagtgcagccgcggagccctgtacacaggcttttccatcctggtgactctgctcctcgctggccaggccaccaccgcctacttcctgtaccagcagcagggccggctggacaaactgacagtcacctcccagaacctgcagctggagaacctgcgcatgaagcttcccaagcctcccaagcctgtgagcaagatgcgcatggccaccccgctgctgatgcaggcgctgcccatgggagccctgccccaggggcccatgcagaatgccaccaagtatggcaacatgacagaggaccatgtgatgcacctgctccagagtcactggaactggaggacccgtcttctgggctgggtgtgaccaagcaggatctgggcccagtccccatgtgagagcagcagaggcggtcttcaacatcctgccagccccacacagctacagctttcttgctcccttcagcccccagcccctcccccatctcccaccctgtacctcatcccatgagaccctggtgcctggctctttcgtcacccttggacaagacaaaccaagtcggaacagcagataacaatgcagcaaggccctgctgcccaatctccatctgtcaacaggggcgtgaggtcccaggaagtggccaaaagctagacagatccccgttcctgacatcacagcagcctccaacacaaggctccaagacctaggctcatggacgagatgggaaggcacagggagaagggataaccctacacccagaccccaggctggacatgctgactgtcctctcccctccagcctttggccttggcttttctagcctatttacctgcaggctgagccactctcttccctttccccagcatcactccccaaggaagagccaatgttttccacccataatcctttctgccgacccctagttccctctgctcagccaagcttgttatcagctttcagggccatggttcacattagaataaaaggtagtaattagaaca

SEQ ID NO: 28588 - DNA, 584 bp, Artificial Sequence
  derived and/or modified sequence
agatgcacaggaggagaagcaggagctgtcgggaagatcagaagccagtcatggatgaccagcgcgaccttatctccaacaatgagcaactgcccatgctgggccggcgccctggggccccggagagcaagtgcagccgcggagccctgtacacaggcttttccatcctggtgactctgctcctcgctggccaggccaccaccgcctacttcctgtaccagcagcagggccggctggacaaactgacagtcacctcccagaacctgcagctggagaacctgcgcatgaagcttcccaagcctcccaagcctgtgagcaagatgcgcatggccaccccgctgctgatgcaggcgctgcccatgggagccctgccccaggggcccatgcagaatgccaccaagtatggcaacatgacagaggaccatgtgatgcacctgctccaggaagtggccaaaagctagacagatccccgttcctgacatcacagcagcctccaacacaaggctccaagacctaggctcatggacgagatgggaaggcacagggagaagggataaccctacacccagaccccaggctggaca

SEQ ID NO: 28589 - DNA, 483 bp, Artificial Sequence
  derived and/or modified sequence
atgcacagaagaagaagcagaagctgcagagaggaccagaagcccgtgatggacgaccagagagacctgatcagcaacaacgagcagctgcccatgctgggcagaagacccggcgcccccgagagcaagtgcagcagaggcgccctgtacaccggcttcagcatcctggtgaccctgctgctggccggccaggccaccaccgcctacttcctgtaccagcagcagggcagactggacaagctgaccgtgaccagccagaacctgcagctggagaacctgagaatgaagctgcccaagccccccaagcccgtgagcaagatgagaatggccacccccctgctgatgcaggccctgcccatgggcgccctgccccagggccccatgcagaacgccaccaagtacggcaacatgaccgaggaccacgtgatgcacctgctgcagagccactggaactggagaaccagactgctgggctgggtgtag

SEQ ID NO: 28590 - DNA, 369 bp, Artificial Sequence
  derived and/or modified sequence
atgcacagaagaagaagcagaagctgcagagaggaccagaagcccgtgatggacgaccagagagacctgatcagcaacaacgagcagctgcccatgctgggcagaagacccggcgcccccgagagcaagtgcagcagaggcgccctgtacaccggcttcagcatcctggtgaccctgctgctggccggccaggccaccaccgcctacttcctgtaccagcagcagggcagactggacaagctgaccgtgaccagccagaacctgcagctggagaacctgagaatgaagctgcccaagccccacgccgagtgccaccaggtgtggcagcacgacagaggcccctgcgacgcccccgcccccgagtgctag

SEQ ID NO: 28591 - DNA, 459 bp, Artificial Sequence
  derived and/or modified sequence
atgcacagaagaagaagcagaagctgcagagaggaccagaagcccgtgatggacgaccagagagacctgatcagcaacaacgagcagctgcccatgctgggcagaagacccggcgcccccgagagcaagtgcagcagaggcgccctgtacaccggcttcagcatcctggtgaccctgctgctggccggccaggccaccaccgcctacttcctgtaccagcagcagggcagactggacaagctgaccgtgaccagccagaacctgcagctggagaacctgagaatgaagctgcccaagccccccaagcccgtgagcaagatgagaatggccacccccctgctgatgcaggccctgcccatgggcgccctgccccagggccccatgcagaacgccaccaagtacggcaacatgaccgaggaccacgtgatgcacctgctgcaggaggtggccaagagctag

SEQ ID NO: 28592 - protein, 296 aa, Artificial Sequence
  derived and/or modified sequence
MHRRRSRSCREDQKPVMDDQRDLISNNEQLPMLGRRPGAPESKCSRGALYTGFSILVTLLLAGQATTAYFLYQQQGRLDKLTVTSQNLQLENLRMKLPKPPKPVSKMRMATPLLMQALPMGALPQGPMQNATKYGNMTEDHVMHLLQNADPLKVYPPLKGSFPENLRHLKNTMETIDWKVFESWMHHWLLFEMSRHSLEQKPTDAPPKVLTKCQEEVSHIPAVHPGSFRPKCDENGNYLPLQCYGSIGYCWCVFPNGTEVPNTRSRGHHNCSESLELEDPSSGLGVTKQDLGPVPM

SEQ ID NO: 28593 - protein, 316 aa, Artificial Sequence
  derived and/or modified sequence
  misc_feature (1)..(1): Xaa can be any naturally occurring amino acid
XRSCREDQKPVMDDQRDLISNNEQLPMLGRRPGAPESKCSRGALYTGFSILVTLLLAGQATTAYFLYQQQGRLDKLTVTSQNLQLENLRMKLPKPPKPVSKMRMATPLLMQALPMGALPQGPMQNATKYGNMTEDHVMHLLQNADPLKVYPPLKGSFPENLRHLKNTMETIDWKVFESWMHHWLLFEMSRHSLEQKPTDAPPKVLTKCQEEVSHIPAVHPGSFRPKCDENGNYLPLQCYGSIGYCWCVFPNGTEVPNTRSRGHHNCSESLELEDPSSGLGVTKQDLGPGKGLAEGHLVTSSSSPAGPAPLWAGEGV

SEQ ID NO: 28594 - DNA, 891 bp, Artificial Sequence
  derived and/or modified sequence
atgcacagacgacgctctagaagttgccgcgaagaccaaaaacctgtgatggatgatcagcgcgacctcatatcaaacaatgaacagctccccatgctggggaggcgcccaggggcacctgagagcaagtgttcacggggggccctgtacacaggattttcaatcttggttactctactgctggctggacaggcaactaccgcgtactttttataccagcagcagggaagattggacaagcttaccgttacgagccagaatctccaactcgaaaacctgcggatgaagctgccaaaaccccctaagccagtgtcaaagatgagaatggccacccctctcctcatgcaggcactcccaatgggcgccctgccacagggacccatgcagaatgccacgaagtacggcaacatgacagaagatcacgttatgcatctgctacagaatgccgaccccctcaaagtgtacccacctctgaaaggctctttcccagagaatctgagacatctgaagaataccatggagacaatagactggaaagtgttcgaatcttggatgcatcactggctactgttcgagatgtctcggcactcactagagcagaagcctaccgatgcacctcctaaagttctcactaaatgtcaggaagaggttagtcacattcccgcagtccaccccggcagttttagacctaagtgtgacgagaacggtaactaccttcccctccagtgctatggaagtattgggtactgctggtgcgtattcccgaacggcactgaagtgcctaatactcgttcccgagggcaccacaactgctctgagtccttggagttagaggatcccagcagtgggctgggtgttacaaagcaggaccttgggccagttcctatgtag

SEQ ID NO: 28595 - DNA, 951 bp, Artificial Sequence
  derived and/or modified sequence
tagagaagttgcagagaagatcaaaaaccggtgatggacgatcagcgggatcttatttccaataatgaacagctgccgatgttgggccggcggcctggggcccccgagtcgaagtgttccagaggagccctgtacactggctttagtattctcgtgacccttctcctggcgggacaggccaccacggcctacttcctctatcagcagcaaggacggctggacaagctcacggtcactagccaaaatctgcagctggagaatctgcgcatgaagttacccaagccccctaagccggtctccaaaatgcgtatggctacaccactgctgatgcaggcactccctatgggagcgttgcctcagggcccaatgcagaatgctacaaagtatggcaatatgaccgaggaccacgtgatgcacctgcttcagaacgctgatcccctcaaggtgtatcctcctctcaagggaagctttccggagaatctgagacacttgaagaacactatggagacgattgattggaaggtgtttgaatcctggatgcaccactggctactttttgaaatgtcacggcattccctggagcagaagccaaccgacgcacccccaaaggtcttgaccaagtgccaggaagaagtttctcatattccagctgtgcaccctggcagttttcgtcccaaatgtgacgaaaacggcaactatctgcctctccagtgttacggcagcattggatattgctggtgtgtgtttcctaatggaaccgaagtgcccaacacaaggagtagaggccaccataattgttccgagagtctggagttggaagatccttcctctggactcggggtgaccaaacaggatctggggccaggcaaggggctggcggaagggcacctcgttacctcctcttcctcaccagccgggcccgccccattgtgggccggcgagggcgtgtag

SEQ ID NO: 28596 - DNA, 891 bp, Artificial Sequence
  derived and/or modified sequence
atgcacagaagaagaagccgcagctgccgggaggaccagaagcctgtgatggatgaccagagggacctgatcagcaacaatgagcagctgcccatgctgggcagaagacctggggcccctgagagcaagtgcagcagaggagccctgtacacaggcttcagcatcctggtgaccctgctgctggccggccaggccaccacagcctacttcctgtaccagcagcagggccgcctggacaagctgactgtgaccagccagaacctgcagctggagaacctgaggatgaagctgcccaagccacccaagcctgtgtccaagatgaggatggccacccccctgctgatgcaggccctgcccatgggcgccctgccccagggccccatgcagaatgccaccaagtatggcaacatgacagaagatcatgtgatgcacctgctgcagaatgctgaccccctgaaggtgtacccacccctgaagggcagcttccctgagaacctgcggcacctgaagaacaccatggagaccatcgactggaaggtgtttgagagctggatgcaccactggctgctgtttgagatgagccgccacagcctggagcagaagcccacagatgccccacccaaggtgctgaccaagtgccaggaggaggtgagccacatcccagctgtgcaccctggcagcttccggcccaagtgtgatgaaaatggaaactacctgcccctgcagtgctacggcagcatcggctactgctggtgtgtgttccccaacggcacagaggtgcccaacaccaggagccggggccaccacaactgcagcgagagcctggagctggaggaccccagcagcggcctgggcgtgaccaagcaggacctgggccctgtgcccatgtag

SEQ ID NO: 28597 - DNA, 951 bp, Artificial Sequence
  derived and/or modified sequence
tgaagaagctgccgggaggaccagaagcctgtgatggatgaccagagggacctgatcagcaacaatgagcagctgcccatgctgggccggcggcctggggcccctgagagcaagtgcagcagaggagccctgtacacaggcttcagcatcctggtgaccctgctgctggccggccaggccaccacagcctacttcctgtaccagcagcagggccgcctggacaagctgactgtgaccagccagaacctgcagctggagaacctgaggatgaagctgcccaagccacccaagcctgtgtccaagatgaggatggccacccccctgctgatgcaggccctgcccatgggcgccctgccccagggccccatgcagaatgccaccaagtatggcaacatgacagaggaccacgtgatgcacctgctgcagaatgctgaccccctgaaggtgtacccacccctgaagggcagcttccctgagaacctgcggcacctgaagaacaccatggagaccatcgactggaaggtgtttgagagctggatgcaccactggctgctgtttgagatgagccgccacagcctggagcagaagcccacagatgccccacccaaggtgctgaccaagtgccaggaggaggtgagccacatcccagctgtgcaccctggcagcttccggcccaagtgtgatgaaaatggaaactacctgcccctgcagtgctacggcagcatcggctactgctggtgtgtgttccccaatggaacagaggtgcccaacaccaggagccggggccaccacaactgcagcgagagcctggagctggaggaccccagcagcggcctgggcgtgaccaagcaggacctgggccctgggaagggcctggccgagggccacctggtgaccagcagcagcagccctgctggccctgcccccctgtgggccggggagggcgtgtag

SEQ ID NO: 28598 - DNA, 891 bp, Artificial Sequence
  derived and/or modified sequence
atgcaccggcggcggagccggagctgccgggaggaccagaagcccgtaatggatgaccagagggatctaatctccaacaacgaacagttacccatgctgggcagaaggcctggggccccagagagcaaatgcagccggggagcgctgtatacagggttctccatcctcgtcacccttctcctggccgggcaggccaccacagcttactttttgtaccaacagcaaggcagacttgacaagctgacagtcacatcacagaacctccagttggagaacctccgcatgaagctgccaaaaccaccaaaacctgtcagcaagatgcgcatggccacacctttactgatgcaggctctcccgatgggagccttgccgcagggacccatgcagaatgcgaccaaatatggaaacatgaccgaggatcacgtcatgcacctcctccagaatgccgaccccctcaaggtgtatccccccctgaaaggcagttttccagaaaaccttcggcatctgaaaaataccatggaaacgattgattggaaggtgtttgaatcatggatgcatcactggctgctgttcgaaatgtctcgccactctcttgaacagaagcccacggatgctcctccaaaagtcctaacgaagtgccaagaggaagtgagccatatccccgcagtccaccccggatcgtttaggcccaaatgcgacgaaaacggcaattatctccccctgcagtgttatggaagcattgggtactgttggtgtgtgttcccaaatggcacggaggttcctaatactagatcaagggggcaccacaattgctccgagagcctggagctcgaggatccctctagtggactcggagttacaaaacaagatctcggccctgttcctatgtag

SEQ ID NO: 28599 - DNA, 951 bp, Artificial Sequence
  derived and/or modified sequence
tgacggagctgccgggaggaccagaagcccgtgatggacgaccagcgagacctgatcagcaataatgaacagctgccaatgctgggccggcgccctggggcacccgaatcaaagtgttctcgtggagccctttacacaggcttctctattctcgtcacccttctccttgccggtcaggccactacggcatatttcctctatcagcagcagggcaggcttgataagcttacggtgacatcacagaatttacagctggaaaatctgcgcatgaaactccctaagccgccaaagccagtttctaagatgaggatggccacgccgctccttatgcaggcactccccatgggggctcttccgcagggacccatgcagaatgcaacgaagtacggtaacatgacggaggatcatgtcatgcatttgctgcagaacgcagaccctctcaaagtctacccacccttaaagggctccttccccgagaatcttcgccacctgaagaacaccatggagacaatcgactggaaggtgttcgagagttggatgcatcactggctcctctttgaaatgtctaggcatagtcttgagcagaagcccactgacgctcccccaaaagtactaaccaaatgtcaagaagaggtttcacacatacccgccgtccacccaggctcctttagaccaaaatgcgacgagaacggcaattacctcccactgcagtgctatggtagtataggatactgttggtgtgtgttccccaatggaaccgaagtgcctaatactagatctaggggccaccacaattgtagcgagtctttagagctcgaggatccatcctcaggactgggtgtgacaaaacaggacctggggcctggcaaggggcttgcagaaggtcacctcgtgacaagtagtagcagtccagccgggcctgctccactctgggctggggagggcgtttag

SEQ ID NO: 28600 - DNA, 891 bp, Artificial Sequence
  derived and/or modified sequence
atgcaccgtcgtcgatctcgcagttgccgggaggaccagaagcccgttatggacgatcagagggatcttatttctaacaacgagcagctacccatgctcggcagaaggcctggggctccggagtccaagtgcagtcgtggcgctctgtacaccggcttcagtatactagtgactctgctactggcaggccaagctacaactgcatattttctgtaccagcagcagggacgccttgataagctgacagtcaccagccagaatctgcagctcgagaacctgaggatgaagctgcccaagccccctaagcctgtttccaagatgcgaatggccacgcctctgttaatgcaggcacttcctatgggggctctgcctcaaggcccaatgcagaatgccaccaagtacggaaatatgacagaggatcatgtgatgcacctcttgcaaaatgctgacccattaaaagtgtacccgcctctgaaagggagcttccccgagaatctccggcatctcaaaaacaccatggagacgatcgactggaaggtcttcgaaagctggatgcatcactggctgctgtttgagatgagccgacactcactggagcagaagcccacagacgccccaccaaaggttttgaccaagtgccaggaggaggtgagtcacatacccgctgttcatcctggctccttcagaccaaagtgtgacgagaacggcaactatctcccactccagtgttacggcagcatcgggtactgttggtgtgtgtttccaaatggtaccgaagttcccaatactcgcagtagggggcaccacaattgctctgaatccctggaactcgaagacccttcaagcggactgggcgtgacaaaacaggacctcggaccagtccccatgtag

SEQ ID NO: 28601 - DNA, 951 bp, Artificial Sequence
  derived and/or modified sequence
tgacggtcctgccgcgaagatcagaaacccgttatggatgaccagcgagatttgatctcaaataatgaacagctaccaatgctgggtcgccgtcccggagcacctgagtcaaagtgttcccgtggcgcactgtacacaggattctccatcctggttaccctgcttttggccggacaggccacaaccgcttacttcctataccagcagcaggggagactggacaaactgaccgtgacatcccagaatctccaattggagaatttgcggatgaagcttccgaagccaccaaaacctgtatccaaaatgagaatggctactcctttgctgatgcaagctctgcccatgggtgccctgccacagggacccatgcagaatgcgaccaagtatggaaatatgaccgaggaccacgtcatgcacctcctgcagaatgctgatccgctgaaggtgtatccacccctgaaggggtctttccccgagaatcttaggcacttgaagaataccatggagaccatcgattggaaagtgttcgagtcatggatgcaccactggttgctgtttgagatgtcaagacattctctggaacaaaaaccgacggacgcccctcccaaggtgctaaccaaatgccaagaagaggtgagccacatcccagccgtacacccaggcagcttccggccaaagtgtgacgagaacggtaactatctgccgcttcagtgctacggttctattggttattgttggtgcgtctttcctaatggtaccgaagttccaaacacccgcagtcgcggtcatcacaattgcagcgagagcctggaattggaagaccccagtagcggtctaggcgtaaccaagcaagatctggggccaggtaaagggcttgctgagggtcatctggtgacctctagttcctctccggcaggacctgccccactttgggccggagaaggcgtgtag

SEQ ID NO: 28602 - DNA, 891 bp, Artificial Sequence
  derived and/or modified sequence
atgcatagacgaagaagcagaagctgccgcgaagaccaaaaacccgtgatggacgatcagcgtgacttaatcagcaataacgagcagctgcctatgctcggccgcaggcccggcgccccagagtccaaatgcagtagaggagccttgtataccggcttcagcatattggtcaccttacttctggccgggcaagcaacgaccgcttactttctgtatcagcaacaaggaagactggataagctgactgtcaccagtcagaatctccagctggagaatctaagaatgaaactcccgaagccccccaagccagtgtctaaaatgaggatggcaaccccgcttctcatgcaggcccttcctatgggcgctctcccacagggtcctatgcagaatgctacaaaatacggaaacatgactgaggatcacgtaatgcatttgttacaaaatgctgacccactaaaggtctacccacccctcaaaggatctttcccagagaatcttcgccatttgaagaatactatggagaccattgactggaaggtgttcgagtcctggatgcaccactggctcctatttgagatgagtaggcactcgctcgagcagaagccaacagatgcaccacccaaggtgctcactaagtgccaggaggaagtctctcacattccagccgtacatccaggttcctttcgcccaaaatgtgatgaaaacggaaattacctccctctccagtgttatggttccattggatactgttggtgtgtttttcctaacggcacagaagttccgaatacccgcagccgggggcaccataactgttctgagagccttgagcttgaagatccaagtagtggcctcggtgtcactaaacaggacctgggaccggtccccatgtag

SEQ ID NO: 28603 - DNA, 891 bp, Artificial Sequence
  derived and/or modified sequence
atgcacagacgcaggtcgcggagttgccgagaagatcagaaacctgtaatggacgaccaacgagacctcatttccaataatgaacagctaccaatgctaggaagaagaccaggtgctccagaatcaaaatgcagccggggcgccctgtatactggattcagcatcctcgtgacattgctgcttgcaggtcaggctactaccgcttatttcttgtatcagcagcagggccgattggacaagctcacagtcacgtcccaaaatctgcaattggagaatctcagaatgaagctgcccaaacctcccaaaccagtgtctaagatgagaatggccacaccactgctgatgcaggccctgcccatgggtgccctcccccaaggtccaatgcagaacgccactaagtacgggaatatgacggaagatcacgtgatgcacctactccaaaatgcggaccctctcaaagtctaccccccactcaaaggcagcttccctgaaaatctgcggcacctcaagaacactatggaaaccatagactggaaggtttttgaaagttggatgcaccactggttattgttcgaaatgtcgcgccactcgctcgaacagaagccaaccgacgccccaccaaaggttctgacaaagtgccaagaagaagtctcgcatatccctgccgttcaccctggctcttttcgcccaaaatgtgacgaaaatggaaactacttgccgcttcagtgttatggcagtatcggctactgttggtgtgtatttcctaacggaaccgaggttcccaatactcgaagccgggggcaccataattgctcagagtccctggaattggaggatccatctagcggtctcggcgtaactaagcaggacttgggcccagtccccatgtag

SEQ ID NO: 28604 - DNA, 981 bp, Artificial Sequence
  derived and/or modified sequence
agatgcacaggaggagaagcaggagctgtcgggaagatcagaagccagtcatggatgaccagcgcgaccttatctccaacaatgagcaactgcccatgctgggccggcgccctggggccccggagagcaagtgcagccgcggagccctgtacacaggcttttccatcctggtgactctgctcctcgctggccaggccaccaccgcctacttcctgtaccagcagcagggccggctggacaaactgacagtcacctcccagaacctgcagctggagaacctgcgcatgaagcttcccaagcctcccaagcctgtgagcaagatgcgcatggccaccccgctgctgatgcaggcgctgcccatgggagccctgccccaggggcccatgcagaatgccaccaagtatggcaacatgacagaggaccatgtgatgcacctgctccagaatgctgaccccctgaaggtgtacccgccactgaaggggagcttcccggagaacctgagacaccttaagaacaccatggagaccatagactggaaggtctttgagagctggatgcaccattggctcctgtttgaaatgagcaggcactccttggagcaaaagcccactgacgctccaccgaaagtactgaccaagtgccaggaagaggtcagccacatccctgctgtccacccgggttcattcaggcccaagtgcgacgagaacggcaactatctgccactccagtgctatgggagcatcggctactgctggtgtgtcttccccaacggcacggaggtccccaacaccagaagccgcgggcaccataactgcagtgagtcactggaactggaggacccgtcttctgggctgggtgtgaccaagcaggatctgggcccagtccccatgtgagagcagcagaggcggtcttcaacatcctgccagccccacacagctacagctttcttgctcccttcagcccccagcccctcccccatct

SEQ ID NO: 28605 - DNA, 1727 bp, Artificial Sequence
  derived and/or modified sequence
caggagctgtcgggaagatcagaagccagtcatggatgaccagcgcgaccttatctccaacaatgagcaactgcccatgctgggccggcgccctggggccccggagagcaagtgcagccgcggagccctgtacacaggcttttccatcctggtgactctgctcctcgctggccaggccaccaccgcctacttcctgtaccagcagcagggccggctggacaaactgacagtcacctcccagaacctgcagctggagaacctgcgcatgaagcttcccaagcctcccaagcctgtgagcaagatgcgcatggccaccccgctgctgatgcaggcgctgcccatgggagccctgccccaggggcccatgcagaatgccaccaagtatggcaacatgacagaggaccatgtgatgcacctgctccagaatgctgaccccctgaaggtgtacccgccactgaaggggagcttcccggagaacctgagacaccttaagaacaccatggagaccatagactggaaggtctttgagagctggatgcaccattggctcctgtttgaaatgagcaggcactccttggagcaaaagcccactgacgctccaccgaaagtactgaccaagtgccaggaagaggtcagccacatccctgctgtccacccgggttcattcaggcccaagtgcgacgagaacggcaactatctgccactccagtgctatgggagcatcggctactgctggtgtgtcttccccaacggcacggaggtccccaacaccagaagccgcgggcaccataactgcagtgagtcactggaactggaggacccgtcttctgggctgggtgtgaccaagcaggatctgggcccaggtaagggccttgcagaggggcatctggtcaccagcagctcatccccagcagggccagctcctttgtgggcaggtgaaggagtgtgacgctgggccactctccaacattcctgggatgtccatttcacagacgaaggaacagggttggggggctgtggggagttacacaaatccatgatggtcattattggacctgagcagggggcaggggagggtggacagtccttaactgctctgcaggtccaggatgttagaaaggggcagggacaacaaatgggtgaccccaacctcaacctgctgcttctctctccagtccccatgtgagagcagcagaggcggtcttcaacatcctgccagccccacacagctacagctttcttgctcccttcagcccccagcccctcccccatctcccaccctgtacctcatcccatgagaccctggtgcctggctctttcgtcacccttggacaagacaaaccaagtcggaacagcagataacaatgcagcaaggccctgctgcccaatctccatctgtcaacaggggcgtgaggtcccaggaagtggccaaaagctagacagatccccgttcctgacatcacagcagcctccaacacaaggctccaagacctaggctcatggacgagatgggaaggcacagggagaagggataaccctacacccagaccccaggctggacatgctgactgtcctctcccctccagcctttggccttggcttttctagcctatttacctgcaggctgagccactctcttccctttccccagcatcactccccaaggaagagccaatgttttccacccataatcctttctgccgacccctagttccctctgctcagcc

SEQ ID NO: 28606 - DNA, 563 bp, Artificial Sequence
  derived and/or modified sequence
agatgcacaggaggagaagcaggagctgtcgggaagatcagaagccagtcatggatgaccagcgcgaccttatctccaacaatgagcaactgcccatgctgggccggcgccctggggccccggagagcaagtgcagccgcggagccctgtacacaggcttttccatcctggtgactctgctcctcgctggccaggccaccaccgcctacttcctgtaccagcagcagggccggctggacaaactgacagtcacctcccagaacctgcagctggagaacctgcgcatgaagcttcccaagccccatgcagaatgccaccaagtatggcaacatgacagaggaccatgtgatgcacctgctccagaatgctgaccccctgaaggtgtacccgccactgaaggggagcttcccggagaacctgagacaccttaagaacaccatggagaccatagactggaaggtctttgagagctggatgcaccattggctcctgtttgaaatgagcaggcactccttggagcaaaagcccactgacgctccaccgaaaggtacagggagtgggag

SEQ ID NO: 28607 - DNA, 891 bp, Artificial Sequence
  derived and/or modified sequence
atgcacagaagaagaagcagaagctgcagagaggaccagaagcccgtgatggacgaccagagagacctgatcagcaacaacgagcagctgcccatgctgggcagaagacccggcgcccccgagagcaagtgcagcagaggcgccctgtacaccggcttcagcatcctggtgaccctgctgctggccggccaggccaccaccgcctacttcctgtaccagcagcagggcagactggacaagctgaccgtgaccagccagaacctgcagctggagaacctgagaatgaagctgcccaagccccccaagcccgtgagcaagatgagaatggccacccccctgctgatgcaggccctgcccatgggcgccctgccccagggccccatgcagaacgccaccaagtacggcaacatgaccgaggaccacgtgatgcacctgctgcagaacgccgaccccctgaaggtgtacccccccctgaagggcagcttccccgagaacctgagacacctgaagaacaccatggagaccatcgactggaaggtgttcgagagctggatgcaccactggctgctgttcgagatgagcagacacagcctggagcagaagcccaccgacgccccccccaaggtgctgaccaagtgccaggaggaggtgagccacatccccgccgtgcaccccggcagcttcagacccaagtgcgacgagaacggcaactacctgcccctgcagtgctacggcagcatcggctactgctggtgcgtgttccccaacggcaccgaggtgcccaacaccagaagcagaggccaccacaactgcagcgagagcctggagctggaggaccccagcagcggcctgggcgtgaccaagcaggacctgggccccgtgcccatgtag

SEQ ID NO: 28608 - DNA, 951 bp, Artificial Sequence
  derived and/or modified sequence
tgaagaagctgcagagaggaccagaagcccgtgatggacgaccagagagacctgatcagcaacaacgagcagctgcccatgctgggcagaagacccggcgcccccgagagcaagtgcagcagaggcgccctgtacaccggcttcagcatcctggtgaccctgctgctggccggccaggccaccaccgcctacttcctgtaccagcagcagggcagactggacaagctgaccgtgaccagccagaacctgcagctggagaacctgagaatgaagctgcccaagccccccaagcccgtgagcaagatgagaatggccacccccctgctgatgcaggccctgcccatgggcgccctgccccagggccccatgcagaacgccaccaagtacggcaacatgaccgaggaccacgtgatgcacctgctgcagaacgccgaccccctgaaggtgtacccccccctgaagggcagcttccccgagaacctgagacacctgaagaacaccatggagaccatcgactggaaggtgttcgagagctggatgcaccactggctgctgttcgagatgagcagacacagcctggagcagaagcccaccgacgccccccccaaggtgctgaccaagtgccaggaggaggtgagccacatccccgccgtgcaccccggcagcttcagacccaagtgcgacgagaacggcaactacctgcccctgcagtgctacggcagcatcggctactgctggtgcgtgttccccaacggcaccgaggtgcccaacaccagaagcagaggccaccacaactgcagcgagagcctggagctggaggaccccagcagcggcctgggcgtgaccaagcaggacctgggccccggcaagggcctggccgagggccacctggtgaccagcagcagcagccccgccggccccgcccccctgtgggccggcgagggcgtgtag

SEQ ID NO: 28609 - DNA, 1698 bp, Artificial Sequence
  derived and/or modified sequence
ctgcctggggagcccccccgccccacatcctgccccgcaaaaggcagcttcaccaaagtggggtatttccagcctttgtagctttcacttccacatctaccaagtgggcggagtggccttctgtggacgaatcagattcctctccagcaccgactttaagaggcgagccggggggtcagggtcccagatgcacaggaggagaagcaggagctgtcgggaagatcagaagccagtcatggatgaccagcgcgaccttatctccaacaatgagcaactgcccatgctgggccggcgccctggggccccggagagcaagtgcagccgcggagccctgtacacaggcttttccatcctggtgactctgctcctcgctggccaggccaccaccgcctacttcctgtaccagcagcagggccggctggacaaactgacagtcacctcccagaacctgcagctggagaacctgcgcatgaagcttcccaagcctcccaagcctgtgagcaagatgcgcatggccaccccgctgctgatgcaggcgctgcccatgggagccctgccccaggggcccatgcagaatgccaccaagtatggcaacatgacagaggaccatgtgatgcacctgctccagaatgctgaccccctgaaggtgtacccgccactgaaggggagcttcccggagaacctgagacaccttaagaacaccatggagaccatagactggaaggtctttgagagctggatgcaccattggctcctgtttgaaatgagcaggcactccttggagcaaaagcccactgacgctccaccgaaagtactgaccaagtgccaggaagaggtcagccacatccctgctgtccacccgggttcattcaggcccaagtgcgacgagaacggcaactatctgccactccagtgctatgggagcatcggctactgctggtgtgtcttccccaacggcacggaggtccccaacaccagaagccgcgggcaccataactgcagtgagtcactggaactggaggacccgtcttctgggctgggtgtgaccaagcaggatctgggcccagtccccatgtgagagcagcagaggcggtcttcaacatcctgccagccccacacagctacagctttcttgctcccttcagcccccagcccctcccccatctcccaccctgtacctcatcccatgagaccctggtgcctggctctttcgtcacccttggacaagacaaaccaagtcggaacagcagataacaatgcagcaaggccctgctgcccaatctccatctgtcaacaggggcgtgaggtcccaggaagtggccaaaagctagacagatccccgttcctgacatcacagcagcctccaacacaaggctccaagacctaggctcatggacgagatgggaaggcacagggagaagggataaccctacacccagaccccaggctggacatgctgactgtcctctcccctccagcctttggccttggcttttctagcctatttacctgcaggctgagccactctcttccctttccccagcatcactccccaaggaagagccaatgttttccacccataatcctttctgccgacccctagttccctctgctcagccaagcttgttatcagctttcagggccatggttcacattagaataaaaggtagtaattagaacaaaaaaaaaaaaaaaaaa

SEQ ID NO: 28610 - protein, 786 aa, Artificial Sequence
  derived and/or modified sequence
MGGRVFLAFCVWLTLPGAETQDSRGCARWCPQNSSCVNATACRCNPGFSSFSEIITTPTETCDDINECATPSKVSCGKFSDCWNTEGSYDCVCSPGYEPVSGAKTFKNESENTCQDVDECQQNPRLCKSYGTCVNTLGSYTCQCLPGFKFIPEDPKVCTDVDECSSGQHQCDSSTVCFNTVGSYSCRCRPGWKPRHGIPNNQKDTVCEDMTFSTWTPPPGVHSQTLSRFFDKVQDLGRDSKTSSAEVTIQNVIKLVDELMEAPGDVEALAPPVRHLIATQLLSNLEDIMRILAKSLPKGPFTYISPSNTELTLMIQERGDKNVTMGQSSARMKLNWAVAAGAEDPGPAVAGILSIQNMTTLLANASLNLHSKKQAELEEIYESSIRGVQLRRLSAVNSIFLSHNNTKELNSPILFAFSHLESSDGEAGRDPPAKDVMPGPRQELLCAFWKSDSDRGGHWATEGCQVLGSKNGSTTCQCSHLSSFAILMAHYDVEDWKLTLITRVGLALSLFCLLLCILTFLLVRPIQGSRTTIHLHLCICLFVGSTIFLAGIENEGGQVGLRCRLVAGLLHYCFLAAFCWMSLEGLELYFLVVRVFQGQGLSTRWLCLIGYGVPLLIVGVSAAIYSKGYGRPRYCWLDFEQGFLWSFLGPVTFIILCNAVIFVTTVWKLTQKFSEINPDMKKLKKARALTITAIAQLFLLGCTWVFGLFIFDDRSLVLTYVFTILNCLQGAFLYLLHCLLNKKVREEYRKWACLVAGGSKYSEFTSTTSGTGHNQTRALRASESGI

SEQ ID NO: 28611 - protein, 785 aa, Artificial Sequence
  derived and/or modified sequence
GGRIMRAFCVWLTLPGAETQDSRGCARWCPQNSSCVNATACRCNPGFSSFSEIITTPTETCDDINECATPSKVSCGKFSDCWNTEGSYDCVCSPGYEPVSGAKTFKNESENTCQDVDECQQNPRLCKSYGTCVNTLGSYTCQCLPGFKFIPEDPKVCTDVDECSSGQHQCDSSTVCFNTVGSYSCRCRPGWKPRHGIPNNQKDTVCEDMTFSTWTPPPGVHSQTLSRFFDKVQDLGRDSKTSSAEVTIQNVIKLVDELMEAPGDVEALAPPVRHLIATQLLSNLEDIMRILAKSLPKGPFTYISPSNTELTLMIQERGDKNVTMGQSSARMKLNWAVAAGAEDPGPAVAGILSIQNMTTLLANASLNLHSKKQAELEEIYESSIRGVQLRRLSAVNSIFLSHNNTKELNSPILFAFSHLESSDGEAGRDPPAKDVMPGPRQELLCAFWKSDSDRGGHWATEGCQVLGSKNGSTTCQCSHLSSFAILMAHYDVEDWKLTLITRVGLALSLFCLLLCILTFLLVRPIQGSRTTIHLHLCICLFVGSTIFLAGIENEGGQVGLRCRLVAGLLHYCFLAAFCWMSLEGLELYFLVVRVFQGQGLSTRWLCLIGYGVPLLIVGVSAAIYSKGYGRPRYCWLDFEQGFLWSFLGPVTFIILCNAVIFVTTVWKLTQKFSEINPDMKKLKKARALTITAIAQLFLLGCTWVFGLFIFDDRSLVLTYVFTILNCLQGAFLYLLHCLLNKKVREEYRKWACLVAGGSKYSEFTSTTSGTGHNQTRALRASESGI

SEQ ID NO: 28612 - DNA, 2361 bp, Artificial Sequence
  derived and/or modified sequence
atggggggcagggtgtttcttgcattctgtgtgtggctgacccttcctggagctgaaactcaggacagccgaggatgtgccagatggtgtccgcagaattcctcctgcgttaacgcaactgcttgcagatgcaatcctggattctcgtctttctctgaaattataacaactccaactgaaacatgcgacgacatcaacgagtgcgcaacgccttcaaaggtgagctgcgggaagtttagtgactgctggaacacagaaggttcgtacgactgcgtgtgctcacctgggtacgagcccgtttctggggccaaaacgtttaagaacgagtccgagaacacatgtcaggacgtcgatgagtgccagcagaatccccgcctttgtaagtcttatggcacctgcgtgaatacattggggtcgtatacctgccagtgtctcccaggttttaaatttattccagaggatcccaaagtctgtaccgatgtggacgaatgttcttctggccagcatcagtgcgactcaagcacagtgtgttttaacacagttgggtcttactcctgccgatgtcggcctggatggaaaccaaggcatggcatcccaaacaaccaaaaggatacggtgtgtgaagatatgactttttctacatggacgccgcccccgggcgtgcactcccagaccctaagcaggttcttcgacaaggtacaggacttaggacgcgactcaaagacttcttctgcagaagtcaccattcagaacgttattaagttagtggatgagctgatggaggcccctggtgacgtagaagctcttgctcctcctgttcgtcatttgatcgctacccagctgctgtcaaacctggaggacattatgagaatactggctaaaagccttcccaaaggcccgtttacatacatatctcctagcaataccgagcttaccttgatgatccaggagcggggggacaagaatgtcactatgggacagtcttcagcccgtatgaagctgaattgggccgttgccgccggagcagaggatcccggacctgcagtggcaggcatccttagtatccagaatatgaccacgttattggctaatgctagtcttaacctgcattcgaaaaagcaagccgagctcgaggaaatttacgagtcgtccattagaggcgttcaactgagacgactctctgcagtgaattctatttttctcagccataacaacaccaaggagctgaattcccctatcctctttgcctttagccacttggaatccagtgatggtgaggcaggtagagaccccccagcgaaagatgtaatgccgggcccccggcaagagctgctgtgtgccttctggaagtctgattccgaccggggggggcattgggcaacagagggctgtcaggtgctagggagcaagaacggttcaactacctgtcaatgcagtcacctgagctctttcgccatcctgatggcccactacgacgtggaggactggaaactgaccctcatcactcgcgtggggcttgccctatcactcttttgtctgctgttgtgtatactgacattccttttggttcgacctattcaaggcagcagaaccaccattcatctgcatttatgtatttgtcttttcgtgggcagcactatttttctagctgggatagagaatgaaggggggcaggttgggctccgctgccggctcgtcgctggactgctccactattgttttctggctgcattttgctggatgtccctcgagggcctggagctgtacttccttgtggttagggtgtttcaaggccagggcctgagcacacgctggctttgcttgatcgggtacggcgtgcctctgctgatcgtgggagtgtctgctgccatctattccaaaggatatggaagacctaggtactgttggctcgatttcgagcaaggatttctttggtccttcttggggccggtcaccttcatcattttatgcaatgcagtcatctttgtgactacagtttggaaactaacacaaaaattttccgaaatcaaccccgacatgaaaaaacttaaaaaagctcgcgcgctgaccataacagccatcgcccagctgtttttgctaggctgcacctgggttttcggcctgtttatttttgacgataggtctctggtgctgacatacgtttttactatactcaattgcctgcagggcgcattcctgtatctgttacactgcctgctgaataaaaaagtgcgcgaagaatatcgcaaatgggcctgcttagtggcagggggatctaagtatagcgagttcaccagcaccacatcaggcactgggcacaaccagacaagagcattgagagcgagcgaaagcggcatttag

SEQ ID NO: 28613 - DNA, 2358 bp, Artificial Sequence
  derived and/or modified sequence
ggcggacgtatcatgcgggcattttgcgtttggttaactctgcctggtgctgaaacccaggactcccgtggatgcgcaaggtggtgcccacagaactccagttgtgttaatgccaccgcctgcagatgtaaccctggtttttcctcattctcggaaattatcacgacacctaccgaaacttgtgacgatataaacgaatgtgcaacgccatccaaagtcagctgcggaaaattctcggattgctggaataccgagggaagctacgattgtgtgtgtagcccaggatatgaacctgtctctggtgcgaagactttcaaaaatgaaagtgaaaacacctgccaggacgtggatgaatgccagcagaatcctcgcctttgcaaaagctatggcacatgcgttaacaccctggggagctacacctgccagtgcctgccaggctttaaattcatcccagaagaccctaaggtctgcacagacgtagatgagtgcagctctgggcagcaccaatgtgactcaagcacggtttgttttaacactgtgggttcttatagctgtaggtgccgccctgggtggaaacctcgacacggcatccccaacaatcaaaaggatacagtttgcgaggatatgaccttcagcacgtggacacctccaccaggagtgcattctcagaccctcagccgattcttcgacaaggtccaggatctgggccgggatagcaaaacctccagtgctgaggttaccatccagaacgtaattaaactcgtggatgagctcatggaagctccaggcgacgtggaagccctggctccccccgtcagacacttaatcgccactcagcttctgagcaatcttgaagatattatgcgaatcctggctaagtctctccctaaaggcccctttacctatatttcccctagcaacacagagttaacgctgatgatccaggaaaggggtgataagaacgttactatggggcagtctagcgcccggatgaagctcaattgggcagtggccgccggagccgaggatcctgggcccgctgtcgccggcatcttgtccatacagaacatgaccacattgctggccaatgctagcctgaatctgcattcaaagaaacaagcggagctggaggagatttacgaatccagcattcggggcgtgcagctgcggcggctctccgccgtaaattcaatcttcctgagccacaacaacaccaaagaactgaactcaccgattctattcgcctttagccacttagaaagttcagacggggaagcagggcgtgaccctcccgccaaggacgtaatgcctggacctcggcaggagctcctgtgcgccttttggaaaagcgatagtgacagaggcgggcactgggcaaccgaggggtgccaagtccttggctcaaagaacggctctacgacatgtcaatgtagccatttatctagttttgcaatccttatggcccattacgatgtagaggactggaagctaacactgataactcgggtgggcctggctctcagtttgttttgcctcctgctgtgcatcttaaccttcttgcttgtgaggcccatccaggggtcccgaaccaccatacacctgcacctgtgtatttgtctatttgtaggatctacaattttccttgctggcattgagaatgaaggggggcaggtgggactgcggtgccgacttgtagctggactgctccactactgctttctggccgcattttgttggatgagcctggaaggcctagagctgtactttttagttgtacgtgtgtttcaggggcaaggcctgtctactcgctggttgtgtttaatcggatacggcgttcccctgctgattgtgggcgtgagtgctgctatctacagcaaagggtatggtagaccacgttattgctggctggacttcgagcaaggattcttgtggtctttcctaggccccgtgacattcataatcctgtgtaacgctgtaattttcgtgaccaccgtgtggaagctcactcagaagttctctgagatcaatcccgacatgaaaaagctgaagaaagctagagccctgacaataactgccattgctcagttgttcctcctgggctgcacctgggtctttggactgtttatctttgacgatagaagtttggtgttaacatatgtattcactatccttaattgccttcagggggcctttttgtatctattgcactgcctgctgaacaaaaaagtgagagaagaataccgcaaatgggcttgtctggttgctggaggctcgaagtattctgagttcacgagcaccaccagcggaaccggtcacaatcaaactcgtgccctgcgagcatctgagtctgggatttag

SEQ ID NO: 28614 - DNA, 2361 bp, Artificial Sequence
  derived and/or modified sequence
atgggcggccgggtcttcctggccttctgtgtgtggctgaccctgcccggggctgagacccaggacagccggggctgtgcccgctggtgcccccagaacagcagctgtgtgaatgccacagcctgccgctgcaaccctggcttcagcagcttcagcgagatcatcaccacccccacagagacctgtgatgacatcaatgaatgtgccacccccagcaaggtgtcctgtgggaagttcagtgactgctggaacacagagggcagctatgactgtgtgtgcagccctggctatgagcctgtgtctggggccaagaccttcaagaatgaaagtgagaacacctgccaggatgtggatgagtgccagcagaacccccggctgtgcaagagctatggcacctgtgtgaacaccctgggcagctacacctgccagtgcctgcccggcttcaagttcatccctgaggaccccaaggtgtgcacagatgtggatgaatgtagcagcggccagcaccagtgtgacagcagcacagtgtgcttcaacacagtgggcagctacagctgccgctgccggcccggctggaagcccaggcatggcatccccaacaaccagaaggacacagtgtgtgaggacatgaccttcagcacctggaccccacctcctggggtgcacagccagaccctgagccgcttctttgacaaggtgcaggacctgggccgggacagcaagaccagcagcgctgaggtgaccatccagaatgtcatcaagctggtggatgagctgatggaggcccctggagatgtggaggccctggcccctcctgtgcgccacctgattgccacccagctgctgagcaacctggaggacatcatgaggatcctggccaagagcctgcccaagggccccttcacctacatcagccccagcaacacagagctgaccctgatgatccaggagcggggggacaagaatgtgaccatgggccagagcagcgccaggatgaagctgaactgggccgtggccgccggggctgaagatcctggccctgctgtggccggcatcctgagcatccagaacatgaccaccctgctggccaatgccagcctgaacctgcacagcaagaagcaggccgagctggaggagatctatgagagcagcatccggggcgtgcagctgcggcggctgtctgctgtgaacagcatcttcctgagccacaacaacaccaaggagctgaacagccccatcctgtttgccttcagccacctggagagcagtgatggagaggccggccgggaccccccagccaaggatgtgatgcctggcccccggcaggagctgctgtgtgccttctggaagagtgacagcgaccggggcggccactgggccacagagggctgccaggtgctgggcagcaagaatggcagcaccacctgccagtgcagccacctgagcagctttgccatcctgatggcccactatgatgtggaggactggaagctgaccctcatcaccagggtgggcctggccctgagcctcttctgcctgctgctgtgcatcctgaccttcctgctggtgcggcccatccagggcagcaggaccaccatccacctgcacctgtgcatctgcctgtttgtgggcagcaccatcttcctggccggcattgaaaatgaaggaggccaggtgggcctgcgctgccgcctggtggccggcctgctgcactactgcttcctggccgccttctgctggatgagcctggagggcctggagctgtacttcctggtggtgcgggtcttccagggccagggcctgagcacccgctggctgtgcctgattggctatggagtgcccctgctgattgtgggcgtgtctgctgccatctacagcaagggctacggccggccccgctactgctggctggactttgagcagggcttcctgtggagcttcctgggccctgtgaccttcatcatcctgtgcaatgctgtgatctttgtgaccaccgtgtggaagctgacccagaagttcagcgagatcaacccagacatgaagaagctgaagaaggcccgggccctgaccatcacagccatcgcccagctgttcctgctgggctgcacctgggtgtttggcctcttcatctttgatgacaggagcctggtgctgacctacgtgttcaccatcctgaactgcctgcagggcgccttcctgtacctgctgcactgcctgctgaacaagaaggtgcgggaggagtacaggaagtgggcctgcctggtggccggcggcagcaagtacagcgagttcaccagcaccaccagcggcaccggccacaaccagacccgggccctgcgggccagcgagagcggcatctag

SEQ ID NO: 28615 - DNA, 2358 bp, Artificial Sequence
  derived and/or modified sequence
gggggccgcatcatgagggccttctgtgtgtggctgaccctgcctggagctgagacccaggacagccggggctgtgcccgctggtgcccccagaacagcagctgtgtgaatgccacagcctgccgctgcaaccctggcttcagcagcttcagcgagatcatcaccacccccacagagacctgtgatgacatcaatgaatgtgccacccccagcaaggtgtcctgtgggaagttcagtgactgctggaacacagagggcagctatgactgtgtgtgcagccctggctatgagcctgtgtctggggccaagaccttcaagaatgaaagtgagaacacctgccaggatgtggatgagtgccagcagaacccccggctgtgcaagagctatggcacctgtgtgaacaccctgggcagctacacctgccagtgcctgcccggcttcaagttcatccctgaggaccccaaggtgtgcacagatgtggatgagtgcagcagcggccagcaccagtgtgacagcagcacagtgtgcttcaacacagtgggcagctacagctgccgctgcaggcctggctggaagcccaggcatggcatccccaacaaccagaaggacacagtgtgtgaggacatgaccttcagcacctggaccccacctcctggggtgcacagccagaccctgagccgcttctttgacaaggtgcaggacctgggccgggacagcaagaccagcagcgctgaggtgaccatccagaatgtcatcaagctggtggatgagctgatggaggcccctggagatgtggaggccctggcccctcctgtgcgccacctgattgccacccagctgctgagcaacctggaggacatcatgaggatcctggccaagagcctgcccaagggccccttcacctacatcagccccagcaacacagagctgaccctgatgatccaggagcggggggacaagaatgtgaccatgggccagagcagcgccaggatgaagctgaactgggccgtggccgccggggctgaggaccccggccctgctgtggccggcatcctgagcatccagaacatgaccaccctgctggccaatgccagcctgaacctgcacagcaagaagcaggccgagctggaggagatctatgagagcagcatccggggcgtgcagctgcggcggctgtctgctgtgaacagcatcttcctgagccacaacaacaccaaggagctgaacagccccatcctgtttgccttcagccacctggagagcagtgatggagaggccggccgggaccccccagccaaggatgtgatgcctggcccccggcaggagctgctgtgtgccttctggaagagtgacagcgacagaggaggccactgggccacagagggctgccaggtgctgggcagcaagaatggcagcaccacctgccagtgcagccacctgagcagctttgccatcctgatggcccactatgatgtggaggactggaagctgaccctcatcaccagggtgggcctggccctgagcctcttctgcctgctgctgtgcatcctgaccttcctgctggtgcggcccatccagggcagcaggaccaccatccacctgcacctgtgcatctgcctgtttgtgggcagcaccatcttcctggccggcattgaaaatgaaggaggccaggtgggcctgcgctgccgcctggtggccggcctgctgcactactgcttcctggccgccttctgctggatgagcctggagggcctggagctgtacttcctggtggtgcgggtcttccagggccagggcctgagcacccgctggctgtgcctgattggctacggcgtgcccctgctgattgtgggcgtgtctgctgccatctacagcaagggctacggccggccccgctactgctggctggactttgagcagggcttcctgtggagcttcctgggccctgtgaccttcatcatcctgtgcaatgctgtgatctttgtgaccaccgtgtggaagctgacccagaagttcagcgagatcaacccagacatgaagaagctgaagaaggcccgggccctgaccatcacagccatcgcccagctgttcctgctgggctgcacctgggtgtttggcctcttcatctttgatgacaggagcctggtgctgacctacgtgttcaccatcctgaactgcctgcagggcgccttcctgtacctgctgcactgcctgctgaacaagaaggtgcgggaggagtacaggaagtgggcctgcctggtggccggcggcagcaagtacagcgagttcaccagcaccaccagcggcaccggccacaaccagacccgggccctgcgggccagcgagagcggcatctag

SEQ ID NO: 28616 - DNA, 2361 bp, Artificial Sequence
  derived and/or modified sequence
atgggcggccgggtgttcctggccttctgcgtgtggctgaccctgcctggcgcagagacacaggactccaggggatgtgcccgctggtgtccacagaattcttcatgcgtcaacgctactgcctgcaggtgcaacccaggcttttcctccttctctgagatcattacaaccccaacagagacctgcgacgatattaacgaatgcgctacccctagtaaggtgagctgtggaaaattcagtgactgttggaatacggagggctcgtatgattgtgtgtgttccccagggtacgagccagtcagtggggcgaagacttttaagaacgaaagcgaaaatacctgtcaggacgtcgacgagtgccagcagaaccctcggctctgcaagagctacggaacatgtgtgaacaccctcggctcatacacatgccagtgtttgcccggctttaagttcattccagaggacccgaaagtgtgcacggatgtggacgagtgctcttcgggccagcaccagtgtgatagttcaactgtctgtttcaatacagtcgggtcttattcttgtagatgccgcccagggtggaagccgcgccacggcatacctaacaaccaaaaggacaccgtgtgtgaggatatgacatttagcacgtggacaccaccaccaggggtgcatagtcagaccttgtcaagattcttcgataaagtccaggatctcggcagagattctaaaacatcttctgcggaggtcaccatccagaatgtcataaagttagtggatgagctgatggaggcacccggagacgttgaagccctcgcaccacccgtgcgacacttaatagccacacagctactttcaaacttggaggatataatgcgcatcctggcaaaatccctgcctaagggccccttcacttacatcagccctagcaataccgagctaaccctgatgattcaggagcggggggataagaacgtcacgatggggcagtcttctgcgaggatgaagctgaactgggctgttgctgctggcgcagaggatccagggcccgctgtcgccggaatactgtccatccagaatatgacgacgcttcttgctaacgccagtcttaacttgcactctaagaagcaagcagaactggaagaaatttatgagtcctctatccggggggtccagctgagacgtctatctgccgtaaattcgatctttctgagtcataataataccaaggagcttaattcccctatcctcttcgccttttcccaccttgaatcctccgacggggaggccggacgagatcccccagctaaggacgtaatgcctggaccacgtcaggaactcctgtgcgctttctggaagagcgacagcgatcgtggcggtcactgggctaccgaaggttgtcaagtcctggggagcaagaatggtagtaccacgtgtcaatgttctcacttgagttcctttgcaatccttatggcacattacgacgtggaagactggaagctgactctgatcacgagggtcgggctcgccctcagcctcttttgtctcttgttgtgcatacttaccttcctgttggtccggcctatacaggggtcacgcactacaatacatctccacttgtgtatctgtctctttgtcggcagtacaatttttctggccggcatcgagaatgaagggggccaggtgggcctaaggtgcagacttgttgccggcctattgcactattgtttccttgcagccttttgttggatgtccttggagggactcgagttgtactttctggtcgtgagggtgtttcaaggccaaggtttgtctacacgctggctgtgcctgataggctacggtgtgcctttgctgattgttggcgttagcgccgccatctacagcaaggggtacggtaggcccaggtattgctggctggatttcgagcagggattcctgtggagctttcttgggcctgttacttttatcattctttgcaacgccgtcatctttgtaacaacggtatggaagcttacccagaagttttcagaaatcaaccctgatatgaaaaaactgaaaaaggcgagggccttaactattaccgcaatcgcgcagctcttcctcttgggttgtacgtgggtgttcgggttgtttatctttgatgaccggtcacttgtgctgacctatgtttttaccattctcaattgcctgcagggtgccttcctgtatttattacactgcttgttgaataagaaggttcgagaggaatacaggaaatgggcctgtctagttgccggggggtccaagtactccgagttcacatctacaacgtctggtactgggcataatcagactcgggctttaagagcgagtgaatccggtatatag

SEQ ID NO: 28617 - DNA, 2358 bp, Artificial Sequence
  derived and/or modified sequence
ggcggccggatcatgcgggccttctgcgtgtggctgaccctgcccggcgctgagacgcaagacagcagagggtgtgctcgatggtgcccccaaaattcaagttgtgtaaatgccaccgcatgtagatgtaaccccggtttcagcagctttagcgagatcatcacgacaccgaccgagacatgcgacgacattaatgaatgcgccactccctccaaagtctcctgcggtaagttctccgattgctggaatacagaggggagctatgattgtgtgtgctcccccggctacgaaccagtgagcggagccaaaactttcaaaaatgagtcagagaatacttgtcaggatgtagacgaatgccagcaaaatcccaggctgtgcaagagttacggtacatgcgtaaatacgctcggctcttacacttgccagtgtttacccggcttcaagtttatccccgaggaccccaaagtctgtacagacgtcgacgagtgcagctccggacagcaccagtgcgacagttctacagtgtgtttcaacacagtgggttcctactcttgcaggtgcagacccggctggaagcctaggcatggcattccaaataaccagaaggatacagtgtgcgaggatatgacattttctacttggacacccccgccgggagtccactctcagaccctgtctcgctttttcgacaaggtccaagacctaggcagagactccaagacatcttccgctgaggtgaccatccaaaacgtaatcaagctggtggacgaacttatggaggccccaggagatgtcgaagctctcgctcctccagtgagacatctcatagccacacagcttctgagcaatctggaggacattatgcggattctcgcgaaatcactccccaaaggacctttcacctatatatccccgtctaacaccgagctgacgcttatgatccaggaacgcggcgataagaacgtgactatgggccagtcttcagcgcggatgaagctgaactgggccgtcgcagccggagcagaggaccctggacctgctgttgccggtatcctgagcatacagaacatgactaccctgctagcaaatgcctctttgaatctacattccaagaagcaggccgagctagaggagatttacgagtccagtattagaggcgtccagctccgtagattgagtgccgttaacagtatcttcctgtcccacaataacacaaaggaactgaactctcccattctctttgcttttagtcacttagagagttccgacggggaggccggcagggatcctccagccaaagacgtcatgcccggaccccgacaggagctgctttgcgccttttggaaaagtgattcagatcgagggggccactgggccaccgaggggtgccaggttcttgggtccaaaaacggtagtactacttgccagtgcagccacctgagtagtttcgcaatccttatggcgcactatgacgttgaggattggaaactgaccctgatcactagagtcggactggcactgtcactattttgcctacttctgtgtattctgacctttctcttggtgaggcccattcaaggcagccgcacgactattcacctccatctgtgcatatgcctttttgtgggttccacgattttcctggcaggcatcgagaacgaaggagggcaagtgggactgagatgccggctcgttgccgggcttttgcattactgtttccttgctgcgttttgctggatgagcctcgagggactggaattgtatttcctcgtggtccgagtgttccaaggccaaggcttgtccacccgctggttatgtctcattggctacggtgtcccattgctgatcgtcggagtctccgcagccatatactcaaagggctacggtcgaccacggtactgttggctcgatttcgaacagggattcctgtggtccttcctgggacccgtcactttcatcattttgtgcaatgctgtgatctttgtcactaccgtctggaagttgacccaaaagtttagcgaaattaatccagatatgaaaaagctcaagaaagcaagagcacttaccattaccgccattgcccagctgttcttgctgggctgtacctgggttttcgggctctttatcttcgacgaccgtagcctggtgcttacctacgtgtttactatattgaactgtctgcagggtgccttcctgtatctcttgcattgcttgctgaataaaaaggtcagggaggagtatcgcaagtgggcctgcttagtggccggcgggagcaagtactcagaatttacctcaacgacttctggaacaggccataaccaaaccagggccctgagggcctccgagagtggcatctag

SEQ ID NO: 28618 - DNA, 2361 bp, Artificial Sequence
  derived and/or modified sequence
atgggaggcagagtgttcctggctttttgcgtctggctgaccctgcctggggctgagacacaggattctcggggatgcgccagatggtgcccccagaatagtagttgcgtcaacgcaactgcttgtcgctgtaatcccggtttctcttccttttcagaaatcataactacgccaaccgaaacatgcgatgatatcaacgagtgcgctactccctccaaggtgagttgcgggaagttctccgactgttggaacacagaaggcagctacgattgtgtctgctctcccggatacgagcccgtttccggagccaaaacattcaagaatgagtccgaaaacacttgtcaagatgtggacgagtgtcagcagaatccacgactgtgtaagtcctatggcacctgcgtgaacacactgggatcatatacatgccaatgtcttccaggcttcaaattcataccggaagatcccaaagtgtgcacagatgtggacgaatgtagcagtggccagcaccagtgtgattcatctacggtctgttttaatactgtcggatcatactcctgccggtgcagacccggatggaagccaaggcatggcattcccaacaatcaaaaagacacagtgtgcgaggacatgaccttttctacgtggactcccccaccaggcgtgcactcacagacacttagccgcttcttcgacaaggtccaagatctgggacgcgacagcaaaacatcctccgccgaggtgacaatacaaaatgtaatcaagctcgttgacgagctgatggaggcacctggggatgtcgaagcattggcgcctcccgttagacacctgatcgccacccaactgctgtcaaacctagaggacatcatgcgcatcctggcaaagtctctgccaaagggcccttttacctatatttctccttctaatacggaactaacgctgatgatacaggagcgcggagataagaatgtgaccatgggacagtctagtgctcggatgaaactaaactgggccgtggcagctggcgcagaagatcccggtcccgcagtggctggaatactgtcgattcagaatatgacaacgctgctggctaacgcaagtctgaatcttcatagcaaaaaacaagccgaactagaggagatttacgagtcttccatccggggagttcaactgaggcgactcagcgccgtcaattcaatttttttgtctcataataacactaaagaattgaactcccctatcctttttgctttctctcacctggagtcaagtgacggcgaggcgggacgagatcctccggcaaaggacgtcatgcccggacccagacaggagcttttatgcgctttttggaagagcgactcagaccgtggcggacactgggctacagagggctgtcaggtgctggggtccaaaaacggtagcaccacctgtcagtgtagtcacctaagcagttttgcgatcctgatggcgcactatgacgtagaggattggaagctgacactgattactcgcgtcggattagcattgtctttattttgccttctactttgtattctcactttcctgctcgtccgccctatccagggaagtagaacgacgattcacttacacctttgtatctgcctcttcgtcgggagcacaattttcctcgctggtatcgagaacgaggggggtcaggtgggcctgcgctgccgcctggtcgcgggtctcctgcactactgctttctcgctgcattctgctggatgtctctagagggactcgagctgtattttctggttgtgcgtgtgttccagggccagggtttgagcaccaggtggttgtgtttgatagggtacggggtccccctcctgatcgtgggagtttcggccgctatttactctaaaggttacggcagacctcggtactgctggctggatttcgaacaggggtttctctggtctttcctgggcccagtgacattcatcatcttatgtaacgccgttatctttgtgactactgtgtggaagttgactcagaagttctccgagattaacccggacatgaagaagttgaagaaagccagagctcttactatcactgccattgctcaactcttcctgctgggctgcacatgggtgtttggattgtttatctttgatgacagaagtttggtgctcacatacgtctttactattttgaactgcctgcaaggagcttttctgtacctcctccactgtctcctcaacaaaaaggtgcgggaagagtatagaaagtgggcctgtctggtagcagggggtagcaaatactcggaatttaccagtaccacttcaggtacaggccacaaccaaacacgcgctctaagagcatccgagtccggcatttag

SEQ ID NO: 28619 - DNA, 2358 bp, Artificial Sequence
  derived and/or modified sequence
ggaggtcgaattatgagagcgttctgcgtctggttgacactcccaggcgcagaaacgcaagactcccggggttgcgcaaggtggtgcccgcagaactcaagctgtgtgaatgccaccgcttgtcgctgcaatccaggctttagttcgttctctgagataatcaccactcccaccgaaacctgcgacgacatcaatgagtgtgctacaccttctaaggtgtcgtgtgggaagttcagcgattgctggaatacagagggtagctacgattgtgtgtgcagccccggatatgaacctgtgtccggcgctaagacgttcaagaatgaaagtgagaacacttgccaggatgttgacgagtgtcagcagaatcctagactctgtaagtcttacggaacctgcgtcaatactctgggtagctatacttgtcagtgcttgcccggattcaagtttattcctgaggatcctaaagtgtgcactgatgtcgatgaatgtagtagtggacagcatcagtgtgattcgagcactgtttgtttcaatacggtgggtagttactcgtgccgctgcagacccggatggaagccgaggcacggaatccctaataatcagaaggatactgtgtgtgaggatatgacattcagcacatggacaccccctccaggggtacactctcagactctgtcacgtttcttcgacaaggtgcaagatctcggacgggattctaagacgagttcagctgaggtgaccattcaaaacgtgatcaaactggtagatgagctaatggaggccccaggtgatgttgaggcactggctcctccagtccgtcatctgatagcaacacagctgctgtccaatctggaggacatcatgaggatccttgctaaaagtctcccaaagggaccttttacatacatctctcccagcaacactgagctgactctgatgatccaggagagaggggacaagaatgtcacaatgggacagagcagcgcaagaatgaaactcaactgggctgttgcagctggggctgaggacccagggcctgccgtggccggtatattgtccatccagaacatgaccacgctcctggctaatgccagcctcaatcttcactcaaagaaacaagctgagctggaagagatctacgagagctcaataaggggcgtccagctccgcagactaagcgccgtgaattccatattcctctcgcacaataacacaaaggagctcaactccccaatactttttgctttctcacacctggagtcttcggatggcgaggcaggcagagacccccctgccaaagacgtgatgccaggaccgagacaagagcttctctgcgctttttggaaatccgacagtgacagaggaggtcattgggctacagaggggtgccaagtgttgggaagtaagaatggcagtactacttgccagtgttcccacctctcgtctttcgccattctgatggctcattatgatgtggaggactggaaactcacactgatcacacgcgtgggcctcgccctctccttgttctgcctgctgctgtgtatactgacctttcttttagtccggccaatccaggggtccaggacaactatccatttgcatttgtgcatctgcttgtttgtgggatccaccatttttctcgcaggaattgagaacgaaggaggccaggtgggcttacgctgcaggctcgtggccggtctgttgcactactgcttcctggccgctttctgctggatgagtctggagggactagagttgtattttcttgtggttcgcgtcttccaggggcaggggttgtccacccgttggctgtgtctgattgggtatggcgtcccactgttgattgtcggggtgagcgcagccatttacagcaagggctatgggagaccaaggtactgttggctggattttgagcaaggcttcctatggagctttctcggaccagtgactttcattatcctgtgtaacgccgtgatcttcgtaaccacagtgtggaagcttactcaaaagtttagtgagattaatccggatatgaaaaagctgaagaaggccagggcgctgacaataaccgctatcgcacagctattcctgttgggatgcacttgggttttcgggctattcatcttcgacgacagatcccttgtgctgacatacgtgttcactatcctcaattgcctccagggcgcattcttatatctcctgcactgtctgctgaataaaaaagtgcgagaggagtaccggaagtgggcttgtttagtggccggtggctctaagtatagcgaattcacatccactacttccggtactggacacaaccagaccagggcgctgagagccagcgagtccggaatttag

SEQ ID NO: 28620 - DNA, 3082 bp, Artificial Sequence
  derived and/or modified sequence
cgccccccctccttcataaagtcctggcctcgggacagcctgcacagctgcctagcctgtggagacgggacagccctgtcccactcactctttcccctgccgctcctgccggcagctccaaccatgggaggccgcgtctttctcgcattctgtgtctggctgactctgccgggagctgaaacccaggactccaggggctgtgcccggtggtgccctcagaactcctcgtgtgtcaatgccaccgcctgtcgctgcaatccagggttcagctctttttctgagatcatcaccaccccgacggagacttgtgacgacatcaacgagtgtgcaacaccgtcgaaagtgtcatgcggaaaattctcggactgctggaacacagaggggagctacgactgcgtgtgcagcccgggatatgagcctgtttctggggcaaaaacattcaagaatgagagcgagaacacctgtcaagatgtggacgaatgtcagcagaacccaaggctctgtaaaagctacggcacctgcgtcaacacccttggcagctatacctgccagtgcctgcctggcttcaagttcatacctgaggatccgaaggtctgcacagatgtggacgagtgcagctccgggcagcatcagtgtgacagctccaccgtctgcttcaacaccgtgggttcatacagctgccgctgccgcccaggctggaagcccagacacggaatcccgaataaccaaaaggacactgtctgtgaagatatgactttctccacctggaccccgccccctggagtccacagccagacgctttcccgattcttcgacaaagtccaggacctgggcagagactccaagacaagctcagccgaggtcaccatccagaatgtcatcaaattggtggatgaactgatggaagctcctggagacgtagaggccctggcgccacctgtccggcacctcatagccacccagctgctctcaaaccttgaagatatcatgaggatcctggccaagagcctgcctaaaggccccttcacctacatttccccttcgaacacagagctgaccctgatgatccaggagcggggggacaagaacgtcactatgggtcagagcagcgcacgcatgaagctgaattgggctgtggcagctggagccgaggatccaggccccgccgtggcgggcatcctctccatccagaacatgacgacattgctggccaatgcctccttgaacctgcattccaagaagcaagccgaactggaggagatatatgaaagcagcatccgtggtgtccaactcagacgcctctctgccgtcaactccatctttctgagccacaacaacaccaaggaactcaactcccccatccttttcgccttctcccaccttgagtcctccgatggggaggcgggaagagaccctcctgccaaggacgtgatgcctgggccacggcaggagctgctctgtgccttctggaagagtgacagcgacaggggagggcactgggccaccgagggctgccaggtgctgggcagcaagaacggcagcaccacctgccaatgcagccacctgagcagctttgcgatccttatggctcattatgacgtggaggactggaagctgaccctgatcaccagggtgggactggcgctgtcactcttctgcctgctgctgtgcatcctcactttcctgctggtgcggcccatccagggctcgcgcaccaccatacacctgcacctctgcatctgcctcttcgtgggctccaccatcttcctggccggcatcgagaacgaaggcggccaggtggggctgcgctgccgcctggtggccgggctgctgcactactgtttcctggccgccttctgctggatgagcctcgaaggcctggagctctactttcttgtggtgcgcgtgttccaaggccagggcctgagtacgcgctggctctgcctgatcggctatggcgtgcccctgctcatcgtgggcgtctcggctgccatctacagcaagggctacggccgccccagatactgctggttggactttgagcagggcttcctctggagcttcttgggacctgtgaccttcatcattttgtgcaatgctgtcattttcgtgactaccgtctggaagctcactcagaagttttctgaaatcaatccagacatgaagaaattaaagaaggcgagggcgctgaccatcacggccatcgcgcagctcttcctgttgggctgcacctgggtctttggcctgttcatcttcgacgatcggagcttggtgctgacctatgtgtttaccatcctcaactgcctgcagggcgccttcctctacctgctgcactgcctgctcaacaagaaggttcgggaagaataccggaagtgggcctgcctagttgctggggggagcaagtactcagaattcacctccaccacgtctggcactggccacaatcagacccgggccctcagggcatcagagtccggcatatgaaggcgcatggttctggacggcccagcagctcctgtggccacagcagctttgtacacgaagaccatccatcctcccttcgtccaccactctactccctccaccctccctccctgatcccgtgtgccaccaggagggagtggcagctatagtctggcaccaaagtccaggacacccagtggggtggagtcggagccactggtcctgctgctggctgcctctctgctccaccttgtgacccagggtggggacaggggctggcccagggctgcaatgcagcatgttgccctggcacctgtggccagtactcgggacagactaagggcgcttgtcccatcctggacttttcctctcatgtctttgctgcagaactgaagagactaggcgctggggctcagcttccctcttaagctaagactgatgtcagaggccccatggcgaggccccttggggccactgcctgaggctcacggtacagaggcctgccctgcctggccgggcaggaggttctcactgttgtgaaggttgtagacgttgtgtaatgtgtttttatctgttaaaatttttcagtgttgacacttaaaattaaacacatgcatac

SEQ ID NO: 28621 - DNA, 2956 bp, Artificial Sequence
  derived and/or modified sequence
ggcgggcggatcatgagagcattctgtgtctggctgactctgccgggagctgaaacccaggactccaggggctgtgcccggtggtgccctcagaactcctcgtgtgtcaatgccaccgcctgtcgctgcaatccagggttcagctctttttctgagatcatcaccaccccgacggagacttgtgacgacatcaacgagtgtgcaacaccgtcgaaagtgtcatgcggaaaattctcggactgctggaacacagaggggagctacgactgcgtgtgcagcccgggatatgagcctgtttctggggcaaaaacattcaagaatgagagcgagaacacctgtcaagatgtggacgaatgtcagcagaacccaaggctctgtaaaagctacggcacctgcgtcaacacccttggcagctatacctgccagtgcctgcctggcttcaagttcatacctgaggatccgaaggtctgcacagatgtggacgagtgcagctccgggcagcatcagtgtgacagctccaccgtctgcttcaacaccgtgggttcatacagctgccgctgccgcccaggctggaagcccagacacggaatcccgaataaccaaaaggacactgtctgtgaagatatgactttctccacctggaccccgccccctggagtccacagccagacgctttcccgattcttcgacaaagtccaggacctgggcagagactccaagacaagctcagccgaggtcaccatccagaatgtcatcaaattggtggatgaactgatggaagctcctggagacgtagaggccctggcgccacctgtccggcacctcatagccacccagctgctctcaaaccttgaagatatcatgaggatcctggccaagagcctgcctaaaggccccttcacctacatttccccttcgaacacagagctgaccctgatgatccaggagcggggggacaagaacgtcactatgggtcagagcagcgcacgcatgaagctgaattgggctgtggcagctggagccgaggatccaggccccgccgtggcgggcatcctctccatccagaacatgacgacattgctggccaatgcctccttgaacctgcattccaagaagcaagccgaactggaggagatatatgaaagcagcatccgtggtgtccaactcagacgcctctctgccgtcaactccatctttctgagccacaacaacaccaaggaactcaactcccccatccttttcgccttctcccaccttgagtcctccgatggggaggcgggaagagaccctcctgccaaggacgtgatgcctgggccacggcaggagctgctctgtgccttctggaagagtgacagcgacaggggagggcactgggccaccgagggctgccaggtgctgggcagcaagaacggcagcaccacctgccaatgcagccacctgagcagctttgcgatccttatggctcattatgacgtggaggactggaagctgaccctgatcaccagggtgggactggcgctgtcactcttctgcctgctgctgtgcatcctcactttcctgctggtgcggcccatccagggctcgcgcaccaccatacacctgcacctctgcatctgcctcttcgtgggctccaccatcttcctggccggcatcgagaacgaaggcggccaggtggggctgcgctgccgcctggtggccgggctgctgcactactgtttcctggccgccttctgctggatgagcctcgaaggcctggagctctactttcttgtggtgcgcgtgttccaaggccagggcctgagtacgcgctggctctgcctgatcggctatggcgtgcccctgctcatcgtgggcgtctcggctgccatctacagcaagggctacggccgccccagatactgctggttggactttgagcagggcttcctctggagcttcttgggacctgtgaccttcatcattttgtgcaatgctgtcattttcgtgactaccgtctggaagctcactcagaagttttctgaaatcaatccagacatgaagaaattaaagaaggcgagggcgctgaccatcacggccatcgcgcagctcttcctgttgggctgcacctgggtctttggcctgttcatcttcgacgatcggagcttggtgctgacctatgtgtttaccatcctcaactgcctgcagggcgccttcctctacctgctgcactgcctgctcaacaagaaggttcgggaagaataccggaagtgggcctgcctagttgctggggggagcaagtactcagaattcacctccaccacgtctggcactggccacaatcagacccgggccctcagggcatcagagtccggcatatgaaggcgcatggttctggacggcccagcagctcctgtggccacagcagctttgtacacgaagaccatccatcctcccttcgtccaccactctactccctccaccctccctccctgatcccgtgtgccaccaggagggagtggcagctatagtctggcaccaaagtccaggacacccagtggggtggagtcggagccactggtcctgctgctggctgcctctctgctccaccttgtgacccagggtggggacaggggctggcccagggctgcaatgcagcatgttgccctggcacctgtggccagtactcgggacagactaagggcgcttgtcccatcctggacttttcctctcatgtctttgctgcagaactgaagagactaggcgctggggctcagcttccctcttaagctaagactgatgtcagaggccccatggcgaggccccttggggccactgcctgaggctcacggtacagaggcctgccctgcctggccgggcaggaggttctcactgttgtgaaggttgtagacgttgtgtaatgtgtttttatctgttaaaatttttcagtgttgacacttaaaattaaacacatgcatac

SEQ ID NO: 28622 - DNA, 2361 bp, Artificial Sequence
  derived and/or modified sequence
atgggcggcagagtgttcctggccttctgcgtgtggctgaccctgcccggcgccgagacccaggacagcagaggctgcgccagatggtgcccccagaacagcagctgcgtgaacgccaccgcctgcagatgcaaccccggcttcagcagcttcagcgagatcatcaccacccccaccgagacctgcgacgacatcaacgagtgcgccacccccagcaaggtgagctgcggcaagttcagcgactgctggaacaccgagggcagctacgactgcgtgtgcagccccggctacgagcccgtgagcggcgccaagaccttcaagaacgagagcgagaacacctgccaggacgtggacgagtgccagcagaaccccagactgtgcaagagctacggcacctgcgtgaacaccctgggcagctacacctgccagtgcctgcccggcttcaagttcatccccgaggaccccaaggtgtgcaccgacgtggacgagtgcagcagcggccagcaccagtgcgacagcagcaccgtgtgcttcaacaccgtgggcagctacagctgcagatgcagacccggctggaagcccagacacggcatccccaacaaccagaaggacaccgtgtgcgaggacatgaccttcagcacctggacccccccccccggcgtgcacagccagaccctgagcagattcttcgacaaggtgcaggacctgggcagagacagcaagaccagcagcgccgaggtgaccatccagaacgtgatcaagctggtggacgagctgatggaggcccccggcgacgtggaggccctggccccccccgtgagacacctgatcgccacccagctgctgagcaacctggaggacatcatgagaatcctggccaagagcctgcccaagggccccttcacctacatcagccccagcaacaccgagctgaccctgatgatccaggagagaggcgacaagaacgtgaccatgggccagagcagcgccagaatgaagctgaactgggccgtggccgccggcgccgaggaccccggccccgccgtggccggcatcctgagcatccagaacatgaccaccctgctggccaacgccagcctgaacctgcacagcaagaagcaggccgagctggaggagatctacgagagcagcatcagaggcgtgcagctgagaagactgagcgccgtgaacagcatcttcctgagccacaacaacaccaaggagctgaacagccccatcctgttcgccttcagccacctggagagcagcgacggcgaggccggcagagacccccccgccaaggacgtgatgcccggccccagacaggagctgctgtgcgccttctggaagagcgacagcgacagaggcggccactgggccaccgagggctgccaggtgctgggcagcaagaacggcagcaccacctgccagtgcagccacctgagcagcttcgccatcctgatggcccactacgacgtggaggactggaagctgaccctgatcaccagagtgggcctggccctgagcctgttctgcctgctgctgtgcatcctgaccttcctgctggtgagacccatccagggcagcagaaccaccatccacctgcacctgtgcatctgcctgttcgtgggcagcaccatcttcctggccggcatcgagaacgagggcggccaggtgggcctgagatgcagactggtggccggcctgctgcactactgcttcctggccgccttctgctggatgagcctggagggcctggagctgtacttcctggtggtgagagtgttccagggccagggcctgagcaccagatggctgtgcctgatcggctacggcgtgcccctgctgatcgtgggcgtgagcgccgccatctacagcaagggctacggcagacccagatactgctggctggacttcgagcagggcttcctgtggagcttcctgggccccgtgaccttcatcatcctgtgcaacgccgtgatcttcgtgaccaccgtgtggaagctgacccagaagttcagcgagatcaaccccgacatgaagaagctgaagaaggccagagccctgaccatcaccgccatcgcccagctgttcctgctgggctgcacctgggtgttcggcctgttcatcttcgacgacagaagcctggtgctgacctacgtgttcaccatcctgaactgcctgcagggcgccttcctgtacctgctgcactgcctgctgaacaagaaggtgagagaggagtacagaaagtgggcctgcctggtggccggcggcagcaagtacagcgagttcaccagcaccaccagcggcaccggccacaaccagaccagagccctgagagccagcgagagcggcatctag

SEQ ID NO: 28623 - DNA, 2358 bp, Artificial Sequence
  derived and/or modified sequence
ggcggcagaatcatgagagccttctgcgtgtggctgaccctgcccggcgccgagacccaggacagcagaggctgcgccagatggtgcccccagaacagcagctgcgtgaacgccaccgcctgcagatgcaaccccggcttcagcagcttcagcgagatcatcaccacccccaccgagacctgcgacgacatcaacgagtgcgccacccccagcaaggtgagctgcggcaagttcagcgactgctggaacaccgagggcagctacgactgcgtgtgcagccccggctacgagcccgtgagcggcgccaagaccttcaagaacgagagcgagaacacctgccaggacgtggacgagtgccagcagaaccccagactgtgcaagagctacggcacctgcgtgaacaccctgggcagctacacctgccagtgcctgcccggcttcaagttcatccccgaggaccccaaggtgtgcaccgacgtggacgagtgcagcagcggccagcaccagtgcgacagcagcaccgtgtgcttcaacaccgtgggcagctacagctgcagatgcagacccggctggaagcccagacacggcatccccaacaaccagaaggacaccgtgtgcgaggacatgaccttcagcacctggacccccccccccggcgtgcacagccagaccctgagcagattcttcgacaaggtgcaggacctgggcagagacagcaagaccagcagcgccgaggtgaccatccagaacgtgatcaagctggtggacgagctgatggaggcccccggcgacgtggaggccctggccccccccgtgagacacctgatcgccacccagctgctgagcaacctggaggacatcatgagaatcctggccaagagcctgcccaagggccccttcacctacatcagccccagcaacaccgagctgaccctgatgatccaggagagaggcgacaagaacgtgaccatgggccagagcagcgccagaatgaagctgaactgggccgtggccgccggcgccgaggaccccggccccgccgtggccggcatcctgagcatccagaacatgaccaccctgctggccaacgccagcctgaacctgcacagcaagaagcaggccgagctggaggagatctacgagagcagcatcagaggcgtgcagctgagaagactgagcgccgtgaacagcatcttcctgagccacaacaacaccaaggagctgaacagccccatcctgttcgccttcagccacctggagagcagcgacggcgaggccggcagagacccccccgccaaggacgtgatgcccggccccagacaggagctgctgtgcgccttctggaagagcgacagcgacagaggcggccactgggccaccgagggctgccaggtgctgggcagcaagaacggcagcaccacctgccagtgcagccacctgagcagcttcgccatcctgatggcccactacgacgtggaggactggaagctgaccctgatcaccagagtgggcctggccctgagcctgttctgcctgctgctgtgcatcctgaccttcctgctggtgagacccatccagggcagcagaaccaccatccacctgcacctgtgcatctgcctgttcgtgggcagcaccatcttcctggccggcatcgagaacgagggcggccaggtgggcctgagatgcagactggtggccggcctgctgcactactgcttcctggccgccttctgctggatgagcctggagggcctggagctgtacttcctggtggtgagagtgttccagggccagggcctgagcaccagatggctgtgcctgatcggctacggcgtgcccctgctgatcgtgggcgtgagcgccgccatctacagcaagggctacggcagacccagatactgctggctggacttcgagcagggcttcctgtggagcttcctgggccccgtgaccttcatcatcctgtgcaacgccgtgatcttcgtgaccaccgtgtggaagctgacccagaagttcagcgagatcaaccccgacatgaagaagctgaagaaggccagagccctgaccatcaccgccatcgcccagctgttcctgctgggctgcacctgggtgttcggcctgttcatcttcgacgacagaagcctggtgctgacctacgtgttcaccatcctgaactgcctgcagggcgccttcctgtacctgctgcactgcctgctgaacaagaaggtgagagaggagtacagaaagtgggcctgcctggtggccggcggcagcaagtacagcgagttcaccagcaccaccagcggcaccggccacaaccagaccagagccctgagagccagcgagagcggcatctag

SEQ ID NO: 28624 - protein, 445 aa, Artificial Sequence
  derived and/or modified sequence
MGLEALVPLAMIVAIFLLLVDLMHRHQRWAARYPPGPLPLPGLGNLHVDFQNTPYCFDQLRRRFGDVFSLQLAWTPVVVLNGLAAVREAMVTRGEDTADRPPAPIYQVLGFGPRSQGRPFRPNGLLDKAVSNVIASLTCGRRFEYDDPRFLRLLDLAQEGLKEESGFLREVLNAVPVLLHIPALAGKVLRFQKAFLTQLDELLTEHRMTWDPAQPPRDLTEAFLAKKEKAKGSPESSFNDENLRIVVGNLFLAGMVTTLTTLAWGLLLMILHLDVQLRVQQEIDDVIGQVRRPEMGDQAHMPYTTAVIHEVQRFGDIIPLSVTHMTSHDIEVQGFRIPKGTTLITNLSSVLKDEAVWKKPFRFHPEHFLDAQGHFVKPEAFLPFSAGRRACLGEPLARMELFLFFTSLLQHFSFSVAAGQPRPSHSRVVSFLVTPSPYELCAVPR

SEQ ID NO: 28625 - protein, 446 aa, Artificial Sequence
  derived and/or modified sequence
MGLEALVPLAVIVAIFLLLVDLMHRRQRWAARYPPGPLPLPGLGNLLHVDFQNTPYCFDQLRRRFGDVFSLQLAWTPVVVLNGLAAVREALVTHGEDTADRPPVPITQILGFGPRSQGRPFRPNGLLDKAVSNVIASLTCGRRFEYDDPRFLRLLDLAQEGLKEESGFLREVLNAVPVLLHIPALAGKVLRFQKAFLTQLDELLTEHRMTWDPAQPPRDLTEAFLAEMEKAKGNPESSFNDENLCIVVADLFSAGMVTTSTTLAWGLLLMILHPDVQRRVQQEIDDVIGQVRRPEMGDQAHMPYTTAVIHEVQRFGDIVPLGVTHMTSRDIEVQGFRIPKGTTLITNLSSVLKDEAVWEKPFRFHPEHFLDAQGHFVKPEAFLPFSAGRRACLGEPLARMELFLFFTSLLQHFSFSVPTGQPRPSHHGVFAFLVTPSPYELCAVPR

SEQ ID NO: 28626 - protein, 446 aa, Artificial Sequence [sequence omitted]

SEQ ID NO: 28627 - DNA, 1338 bp, Artificial Sequence
  derived and/or modified sequence
atgggcctggaggccctggtgcccctggccatgatcgtggccatcttcctgctgctggtggacctgatgcacagacaccagagatgggccgccagatacccccccggccccctgcccctgcccggcctgggcaacctgcacgtggacttccagaacaccccctactgcttcgaccagctgagaagaagattcggcgacgtgttcagcctgcagctggcctggacccccgtggtggtgctgaacggcctggccgccgtgagagaggccatggtgaccagaggcgaggacaccgccgacagaccccccgcccccatctaccaggtgctgggcttcggccccagaagccagggcagacccttcagacccaacggcctgctggacaaggccgtgagcaacgtgatcgccagcctgacctgcggcagaagattcgagtacgacgaccccagattcctgagactgctggacctggcccaggagggcctgaaggaggagagcggcttcctgagagaggtgctgaacgccgtgcccgtgctgctgcacatccccgccctggccggcaaggtgctgagattccagaaggccttcctgacccagctggacgagctgctgaccgagcacagaatgacctgggaccccgcccagccccccagagacctgaccgaggccttcctggccaagaaggagaaggccaagggcagccccgagagcagcttcaacgacgagaacctgagaatcgtggtgggcaacctgttcctggccggcatggtgaccaccctgaccaccctggcctggggcctgctgctgatgatcctgcacctggacgtgcagctgagagtgcagcaggagatcgacgacgtgatcggccaggtgagaagacccgagatgggcgaccaggcccacatgccctacaccaccgccgtgatccacgaggtgcagagattcggcgacatcatccccctgagcgtgacccacatgaccagccacgacatcgaggtgcagggcttcagaatccccaagggcaccaccctgatcaccaacctgagcagcgtgctgaaggacgaggccgtgtggaagaagcccttcagattccaccccgagcacttcctggacgcccagggccacttcgtgaagcccgaggccttcctgcccttcagcgccggcagaagagcctgcctgggcgagcccctggccagaatggagctgttcctgttcttcaccagcctgctgcagcacttcagcttcagcgtggccgccggccagcccagacccagccacagcagagtggtgagcttcctggtgacccccagcccctacgagctgtgcgccgtgcccagatag

SEQ ID NO: 28628 - DNA, 1413 bp, Artificial Sequence
  derived and/or modified sequence
atggggctagaagcactggtgcccctggccatgatagtggccatcttcctgctcctggtggacctgatgcaccggcaccaacgctgggctgcacgctacccgccaggtcccctgccactgcccgggctgggcaaccttcatgtggacttccagaacacaccatactgcttcgaccagttgcggcgccgcttcggggacgtgttcagcctgcagctggcctggacgccggtggtcgtgctcaatgggctggcggccgtgcgcgaggcgatggtgacccgcggcgaggacacggccgaccgcccgcctgcgcccatctaccaggtcctgggcttcgggccgcgttcccaaggacgcccctttcgccccaacggtctcttggacaaagccgtgagcaacgtgatcgcctccctcacctgcgggcgccgcttcgagtacgacgaccctcgcttcctcaggctgctggacctagctcaggagggactgaaggaggagtcgggcttcctgcgcgaggtgctgaatgctgtccccgtcctcctgcacatcccagcgctggctggcaaggtcctacgcttccaaaaggctttcctgacccagctggatgagctgctaactgagcacaggatgacctgggacccagcccagccaccccgagacctgactgaggccttcctggcaaagaaggagaaggccaaggggagccctgagagcagcttcaatgatgagaacctgcgcatagtggtgggtaacctgttccttgccgggatggtgaccaccttgaccacgctggcctggggcctcctgctcatgatcctacacctggatgtgcagctccgtgtccaacaggagatcgacgacgtgatagggcaggtgcggcgaccagagatgggtgaccaggctcacatgccctacaccactgccgtgattcacgaggtgcagcgctttggggacatcatccccctgagtgtgacccatatgacatcccatgacatcgaagtacagggcttccgcatccctaagggaacgacactcatcaccaacctgtcatcggtgctgaaggatgaggccgtctggaagaagcccttccgcttccaccccgaacacttcctggatgcccagggccactttgtgaagccggaggccttcctgcctttctcagcaggccgccgtgcatgcctcggggagcccctggcccgcatggagctcttcctcttcttcacctccctgctgcagcacttcagcttctccgtggccgccggacagccccggcccagccactctcgtgtcgtcagctttctggtgaccccatccccctacgagctttgtgctgtgccccgctagaatggggtacctagtccccagcctgctccctagccagaggctctaatgtacaataaagcaatgtggtagttccaa

SEQ ID NO: 28629 - DNA, 1240 bp, Artificial Sequence
  derived and/or modified sequence
cagttgcggcgccgcttcggggacgtgttcagcctgcagctggcctggacgccggtggtcgtgcaatgggctggcggccgtgcgcgaggcgatggtgacccgcggcgaggacacggccgaccgcccgcctgcgcccatctaccaggcgaccccttacccgcatctcccacccccaggacgcccctttcgccccaacggtctcttggacaaagccgtgagcaacgtgatcgcctccctcacctgcgggcgccgcttcgagtacgacgaccctcgcttcctcaggctgctggacctagctcaggagggactgaaggaggagtcgggcttcctgcgcgaggtgctgaatgctgtccccgtcctcctgcacatcccagcgctggctggcaaggtcctacgcttccaaaaggctttcctgacccagctggatgagctgctaactgagcacaggatgacctgggacccagcccagccaccccgagacctgactgaggccttcctggcaaagaaggagaaggccaaggggagccctgagagcagcttcaatgatgagaacctgcgcatagtggtgggtaacctgttccttgccgggatggtgaccaccttgaccacgctggcctggggcctcctgctcatgatcctacacctggatgtgcagctccgtgtccaacaggagatcgacgacgtgatagggcaggtgcggcgaccagagatgggtgaccaggctcacatgccctacaccactgccgtgattcacgaggtgcagcgctttggggacatcatccccctgagtgtgacccatatgacatcccatgacatcgaagtacagggcttccgcatccctaagggaacgacactcatcaccaacctgtcatcggtgctgaaggatgaggccgtctggaagaagcccttccgcttccaccccgaacacttcctggatgcccagggccactttgtgaagccggaggccttcctgcctttctcagcaggccgccgtgcatgcctcggggagcccctggcccgcatggagctcttcctcttcttcacctccctgctgcagcacttcagcttctccgtggccgccggacagccccggcccagccactctcgtgtcgtcagctttctggtgaccccatccccctacgagctttgtgctgtgccccgctagaatggggtacctagtccccagcctgctccctagccagaggctctaatgtacaataaagcaatgtggtagttccaa

SEQ ID NO: 28630 - DNA, 1338 bp, Artificial Sequence
  derived and/or modified sequence
atgggactcgaagcgctcgtacccttggcaatgatagtcgcgatttttttgttactggtggatctgatgcacaggcaccagcgttgggccgctagataccctcctggccctctgcccctgccaggcctgggcaatctgcacgttgatttccaaaacactccatactgcttcgatcaacttagacggaggtttggggatgtcttttccctacaattagcctggaccccagtggtagtgctgaacgggctagctgcagtgagagaggcgatggtgactcgaggcgaggacactgccgatcgaccccccgcccctatttatcaagtgctaggcttcgggcctagatcgcaaggtaggccgttcaggcccaatgggcttctcgacaaagccgtgtctaacgtgatcgcctcgctgacctgtggtaggaggttcgagtatgacgatccacgctttcttagattattggaccttgcccaggagggccttaaggaagagtctggcttcctgcgggaggtgcttaatgccgtgcccgtgctgcttcacatacctgcacttgctggaaaggtgctgcgcttccaaaaggcatttttgactcagctcgatgagctgctgaccgaacaccggatgacgtgggatcccgcgcagccaccacgggatctcacagaagcctttctcgccaagaaggaaaaggctaagggctctccggagagttctttcaacgatgagaatctacgcatcgttgtggggaatctctttctcgctgggatggttaccaccctgacgacgctcgcttggggcctgctcttgatgatattgcatctagacgtgcagttgagagtacagcaagaaatcgatgatgtaatcggccaggtgagaagacccgagatgggtgatcaggcacatatgccttacaccaccgctgtcatccacgaggtccagcgtttcggagacattattccgctgtccgtgacccacatgacctcccacgacatagaagtgcaggggtttagaattccaaaggggaccactcttatcacgaatctatcctcagttctgaaagacgaggccgtgtggaagaaacccttccgattccatccagagcactttttagacgctcagggccatttcgttaaacccgaagcttttctcccgttttctgccggcaggcgagcttgcctcggagaacctttggccagaatggagctctttctgttctttactagtcttctgcagcatttcagcttctcagtcgccgcaggtcagcctagaccctcacattcacgcgtggtgtcttttctggtgactcctagtccctatgagctgtgtgccgtcccacgttag

SEQ ID NO: 28631 - DNA, 1338 bp, Artificial Sequence
  derived and/or modified sequence
atgggcctggaggccctggtgcccctggccatgattgtggccatcttcctgctgctggtggacctgatgcaccgccaccagcgctgggccgcccgctacccacctggccccctgcccctgcccggcctgggcaacctgcacgtggacttccagaacaccccctactgctttgaccagctgcggaggagatttggagatgtgttcagcctgcagctggcctggacccctgtggtggtgctgaatggcctggccgctgtgcgggaggccatggtgaccagaggagaggacacagctgaccggcccccagcccccatctaccaggtgctgggcttcggccccaggagccagggccggcccttccggcccaacggcctgctggacaaggctgtgtccaatgtcatcgccagcctgacctgtggcagaagatttgaatatgatgacccccgcttcctgcggctgctggacctggcccaggagggcctgaaggaggagagcggcttcctgcgggaggtgctgaatgctgtgcctgtgctgctgcacatcccagccctggccggcaaggtgctgcgcttccagaaggccttcctgacccagctggatgagctgctgacagagcacaggatgacctgggaccctgcccagcccccccgggacctgacagaggccttcctggccaagaaggagaaggccaagggcagccctgagagcagcttcaatgatgagaacctgagaattgtggtgggcaacctcttcctggccggcatggtgaccaccctgaccaccctggcctggggcctgctgctgatgatcctgcacctggatgtgcagctgcgggtgcagcaggagattgatgatgtgattggccaggtgagaagacctgagatgggagaccaggcccacatgccctacaccacagctgtgattcatgaggtgcagagatttggagacatcatccccctgtctgtgacccacatgaccagccatgacatcgaggtgcagggcttccgcatccccaagggcaccaccctcatcaccaacctgagctctgtgctgaaggatgaagctgtgtggaagaagcccttccgcttccaccctgagcacttcctggatgcccagggccactttgtgaagccagaggccttcctgcccttctctgctggccggcgggcctgcctgggggagcccctggccaggatggagctgttcctgttcttcaccagcctgctgcagcacttctccttctctgtggccgccggccagccccggcccagccacagccgggtggtgtccttcctggtgacccccagcccctatgagctgtgtgctgtgcccaggtag

SEQ ID NO: 28632 - DNA, 1338 bp, Artificial Sequence
  derived and/or modified sequence
atgggcctggaggccctggtgcccctggccatgatcgtggccatcttcctgctgcttgtggacctcatgcaccgccatcagaggtgggctgcccgctacccacctggccccctacccttgccaggtttagggaatcttcatgtggattttcagaacacgccctactgctttgaccaattgcggagaaggttcggggatgtgttttcccttcaactggcctggacacccgtggtggtcctcaacggactggcagccgtcagggaagccatggtgactcgcggtgaggacaccgctgatcggccccccgccccaatttaccaggtcctaggattcggcccacgaagtcagggaagaccgttccgtcctaacggcctgctcgataaggccgtgagtaatgttatcgcttccctgacctgcggaaggcgctttgaatatgacgatccccgtttcctcaggttgctcgacctggctcaggaagggttgaaggaagagagtggcttccttcgagaggtactgaatgccgtgccggtcttgctccacataccggctctggccggtaaggtactaaggttccagaaagcttttttaacacagttagatgagttactgaccgaacacaggatgacctgggatcccgcccagcctcccagagacctaacggaggcctttctggccaagaaagaaaaggccaaaggctcaccagaatctagcttcaatgatgagaatctcaggatcgtggtcggaaaccttttcctagccgggatggtgactactcttactactctggcctggggcctgctcctgatgatccttcacctggatgttcagctgagggtgcaacaagagatagatgacgtgatcggtcaggtccgccgtcctgaaatgggcgatcaagcgcacatgccttacacgactgccgtcatacatgaggtgcagaggttcggagacataatcccactctcagtaacgcacatgaccagccatgacatagaagtacaagggttcagaatcccgaagggtacgaccctcatcactaacctctctagcgtgctgaaagacgaagcagtatggaagaagccttttcggttccatccagagcattttctcgacgcccaaggacattttgtaaaacccgaagccttcctgccatttagcgctggcaggcgggcttgcctgggcgaaccactagcccgcatggagctcttcctttttttcacctctctcctccagcacttttctttctcagtggccgctggacagcctaggccgtctcacagcagggtggtgagctttctggttactccctccccgtacgaactgtgcgctgtgccacggtag

SEQ ID NO: 28633 - DNA, 1338 bp, Artificial Sequence
  derived and/or modified sequence
atgggtctcgaggcactggtacctctggccatgattgttgctatttttttactgttagtcgatctgatgcaccggcaccagaggtgggctgcgaggtatccacctgggccactgcctctaccgggtttgggtaacttgcatgtggactttcagaatactccttactgcttcgatcagctgagacgcagatttggagacgtctttagtttgcagctggcttggacaccggttgttgtccttaacggtctggctgccgtgcgcgaagctatggtgacccgcggagaggataccgctgataggcctccagcgcctatctaccaggttctggggtttggccctcgctcacagggcagaccattcagacctaacggtctcttagataaagccgtaagcaacgtgattgctagtctgacgtgcggtcggaggtttgaatatgacgatcctcgttttctgagactgcttgacttagcacaggagggcctgaaggaagagagcggatttctcagggaggtgctgaatgccgtaccggttcttcttcacataccagcactcgctgggaaggtcctacggttccagaaggcattcttgacacaactcgacgagttgctaacagagcacaggatgacctgggatcccgctcagccgcctcgagatctcacagaggcctttttggcaaagaaggaaaaggcaaaaggttctccagagtcaagttttaacgatgaaaacctccgcattgtcgtgggaaatctatttctagctggcatggtgaccactctgacgactcttgcttggggactgctgctgatgatactccatctggatgtgcagctgcgtgtgcaacaggaaatcgatgatgtcatcgggcaggtgcgaagacctgaaatgggcgaccaagcacacatgccatacaccacggcggttatacatgaagttcaacgcttcggggatatcatccccttgagtgttactcatatgacctctcacgatatcgaagtgcagggcttccgtatccccaaagggacgacactaattaccaatctaagctcggtgttaaaggacgaggcagtgtggaaaaagccattcagatttcatcctgagcatttcttggatgcccaaggccacttcgtaaagcccgaggcattcctcccatttagtgccggacgacgggcttgcctgggagaaccattagctcggatggagctgtttctcttttttacctccctgcttcaacacttttccttctcggttgctgccggtcagcctcgcccaagtcacagccgcgtggtgagctttctagtgacgccttctccttacgagctgtgcgctgtgcctcgctag

SEQ ID NO: 28634 - DNA, 1341 bp, Artificial Sequence
  derived and/or modified sequence
atgggactcgaagcattggtgccgctcgccgtcatcgtggccatctttctgttactcgttgacctcatgcaccgcagacagcgctgggccgcacgctatcccccagggccactgcctcttcccggactgggcaacctactgcatgtagactttcagaacacaccttactgtttcgatcagctacgcaggaggttcggggacgtgttcagcctgcagctggcctggaccccggtggtggttctcaacggcttagccgctgtgcgtgaagcccttgtgacccatggggaagacacagcggaccgccctcccgttccaatcacccaaatcctgggatttggtcccaggagccaaggtagaccttttagaccgaatggtctgctagacaaggctgtgtcaaatgtaattgcatctctaacttgtggtagacgtttcgagtatgacgatcctcgattcctaagactgctggatctcgcccaggaaggattgaaagaagagtcaggcttcttgagggaagtgctcaacgcagtcccagtactgctacacatccccgctctggctgggaaggttctcagattccagaaggcatttctcactcagctggatgaactgttaacggaacatcgaatgacatgggatcctgcacagccacccagggaccttactgaagcctttttagcggaaatggagaaagccaaggggaaccccgagtccagcttcaacgacgaaaacctgtgtattgttgtcgccgacctcttttccgctggtatggtgacaacttccactaccctggcctggggcttacttttaatgatcctacaccctgacgtgcaaaggcgggtacaacaggaaatagacgatgtcattggccaggtacgtcgtccggagatgggcgaccaggctcatatgccgtacaccactgccgtgatccacgaagttcagaggttcggcgatatcgtgcctctcggtgttacgcacatgacaagtagagatatcgaggtccaaggctttagaataccaaaaggcacaaccctgatcaccaatctatcctctgtgttgaaggacgaggccgtgtgggagaagcccttccggtttcatccggagcatttcctcgacgctcagggccattttgtcaagcccgaagcttttctcccgttttccgcgggacgcagagcatgtctcggcgagcccctggcgcgcatggaactatttttgttttttacaagcctcctgcagcacttcagtttttccgtgccgacgggacagcccagaccctcacaccacggagtattcgcatttctggtcaccccttcaccctacgaactgtgtgcggtgccaagatag

SEQ ID NO: 28635 - DNA, 1341 bp, Artificial Sequence
  derived and/or modified sequence
atgggcttagaggcgcttgttcccctcgctatgattgtggcgatatttcttctgctcgttgacctgatgcacaggaggcagcgctgggccgcccgttacccgcctggccccctcccactgccagggctcggaaacttgctgcatgtggacttccaaaacacaccttactgctttgatcaactcagaaggcgattcggtgatgtgttctcattgcagctagcgtggacaccagtcgtcgtcctaaatggtcttgccgctgtcagggaagccctcgtcacccacggggaggacactgctgaccgccctccggtgccaattacccagatcttaggattcgggcccagatcccagggcaggcctttccgcccgaacgggttactcgacaaagcggtgagtaacgtcatcgcttctcttacctgcggcagacgattcgaatatgacgatcctagattcctgaggctgttggatctggctcaagaggggttaaaggaagaaagcggctttctgagggaggttctgaacgctgtaccggtgctcctgcacatccccgccttagccggcaaagtacttagattccagaaggccttcttgactcagctggacgagctgctgacagagcaccgtatgacttgggatcctgcacaacctccacgcgaccttactgaagcatttctcgctgaaatggaaaaagctaagggcaatcctgaaagctcttttaatgacgaaaatctgtgtattgtggttgctgacctcttcagcgccggtatggttactacttcgacaacactcgcgtggggactcctgcttatgatcctccacccagatgttcaaaggagagtgcagcaagagatcgacgacgtcatcggtcaggtccggaggcctgagatgggggatcaggcgcacatgccctacacaaccgccgtaatccacgaagtccagcggttcggcgacatagtcccgttaggcgttacgcacatgactagcagggacatcgaggtgcaggggttcaggatccccaagggtacaactctgattactaacctgtcatcggtcttgaaggacgaagccgtgtgggaaaaacctttccgcttccatccagagcactttcttgatgcacagggtcatttcgtcaaacctgaagcatttctgcccttttccgcaggcaggcgcgcatgtctcggggaacccctagccaggatggagttgtttctgtttttcactagtttgcttcaacacttttctttttccgttcctacagggcaacctaggcctagtcatcacggggtgtttgcttttctcgtcacaccatcaccatacgaactgtgtgctgtcccacgatag

SEQ ID NO: 28636 - DNA, 1341 bp, Artificial Sequence
  derived and/or modified sequence
atgggcctggaggccctggtgcccctggccgtcatcgtggccatcttcctgctgctggtggacctgatgcaccggcggcagcgctgggccgcccgctacccacctggccccctgcccctgcccggcctgggcaacctgctgcacgtggacttccagaacaccccctactgctttgaccagctgcggaggagatttggagatgtgttcagcctgcagctggcctggacccctgtggtggtgctgaatggcctggccgctgtgcgggaggccctggtgacccacggggaggacacagctgaccggccccctgtgcccatcacccagatcctgggcttcggccccaggagccagggccggcccttccggcccaacggcctgctggacaaggctgtgtccaatgtgattgccagcctgacctgtggccgccgctttgaatatgatgacccccgcttcctgcggctgctggacctggcccaggagggcctgaaggaggagagcggcttcctgcgggaggtgctgaatgctgtgcctgtgctgctgcacatcccagccctggccggcaaggtgctgcgcttccagaaggccttcctgacccagctggatgagctgctgacagagcacaggatgacctgggaccctgcccagcccccccgggacctgacagaggccttcctggccgagatggagaaggccaagggcaaccctgagagcagcttcaatgatgagaacctgtgcatcgtggtggccgacctcttctctgctggcatggtgaccaccagcaccaccctggcctggggcctgctgctgatgatcctgcacccagatgtgcagaggagagtgcagcaggagattgatgatgtgattggccaggtgcggcggcctgagatgggagaccaggcccacatgccctacaccacagctgtgatccacgaggtgcagagatttggagacatcgtgcccctgggcgtgacccacatgaccagccgggacatcgaggtgcagggcttccgcatccccaagggcaccaccctcatcaccaacctgagctctgtgctgaaggatgaggccgtgtgggagaagcccttccgcttccaccctgagcacttcctggatgcccagggccactttgtgaagccagaggccttcctgcccttctctgctggaagaagagcctgcctgggggagcccctggccaggatggagctgttcctgttcttcaccagcctgctgcagcacttctccttctctgtgcccaccggccagccccggcccagccaccacggcgtgtttgccttcctggtgacccccagcccctatgagctgtgtgctgtgcccaggtag

SEQ ID NO: 28637 - DNA, 1341 bp, Artificial Sequence
  derived and/or modified sequence
atgggcctggaggccctggtgcccctggccatgattgtggccatcttcctgctgctggtggacctgatgcaccggcggcagcgctgggccgcccgctacccacctggccccctgcccctgcccggcctgggcaacctgctgcacgtggacttccagaacaccccctactgctttgaccagctgcggaggagatttggagatgtgttcagcctgcagctggcctggacccctgtggtggtgctgaatggcctggccgctgtgcgggaggccctggtgacccacggggaggacacagctgaccggccccctgtgcccatcacccagatcctgggcttcggccccaggagccagggccggcccttccggcccaacggcctgctggacaaggctgtgtccaatgtgattgccagcctgacctgtggccgccgctttgaatatgatgacccccgcttcctgcggctgctggacctggcccaggagggcctgaaggaggagagcggcttcctgcgggaggtgctgaatgctgtgcctgtgctgctgcacatcccagccctggccggcaaggtgctgcgcttccagaaggccttcctgacccagctggatgagctgctgacagagcacaggatgacctgggaccctgcccagcccccccgggacctgacagaggccttcctggccgagatggagaaggccaagggcaaccctgagagcagcttcaatgatgagaacctgtgcatcgtggtggccgacctcttctctgctggcatggtgaccaccagcaccaccctggcctggggcctgctgctgatgatcctgcacccagatgtgcagaggagagtgcagcaggagattgatgatgtgattggccaggtgcggcggcctgagatgggagaccaggcccacatgccctacaccacagctgtgatccacgaggtgcagagatttggagacatcgtgcccctgggcgtgacccacatgaccagccgggacatcgaggtgcagggcttccgcatccccaagggcaccaccctcatcaccaacctgagctctgtgctgaaggatgaggccgtgtgggagaagcccttccgcttccaccctgagcacttcctggatgcccagggccactttgtgaagccagaggccttcctgcccttctctgctggaagaagagcctgcctgggggagcccctggccaggatggagctgttcctgttcttcaccagcctgctgcagcacttctccttctctgtgcccaccggccagccccggcccagccaccacggcgtgtttgccttcctggtgacccccagcccctatgagctgtgtgctgtgcccaggtag

SEQ ID NO: 28638 - DNA, 1341 bp, Artificial Sequence
  derived and/or modified sequence
atgggcctggaggccctggtgcccctggccgtgatcgtggccatcttcttgctgctagtggacctgatgcacagaaggcagcgatgggctgcccggtatcccccaggacctctgcctctcccaggcctaggaaacctcctgcatgttgatttccaaaatacaccttactgcttcgaccagttacgcagaagatttggcgacgtgtttagcctccagctcgcgtggaccccagtggtggtgctgaatggactcgcagccgtgagggaggccctcgttactcacggcgaggacacagccgatcggcctcctgtcccaattacccagatcttaggcttcggtccaaggagccaggggaggccgtttcgcccaaatggtttgctcgataaggccgtaagcaacgtcatcgcaagtctaacatgcggccgccggttcgagtatgatgacccgaggtttctgcgcctgttggacctggctcaggagggattgaaggaagagagcggtttcttgcgtgaggtcctgaacgccgtgcctgtgctgctgcacatccctgcgctggccggtaaagtgctaaggtttcaaaaagcctttttaacccaactagacgaactactgaccgaacaccggatgacctgggatcctgctcagccccctcgggacctaactgaagccttcctggctgagatggagaaggccaaaggcaatcctgaatcttcttttaatgatgaaaacctctgtatcgtggtcgccgatctctttagcgcggggatggttaccactagtacaacactcgcttggggactgttgttgatgatccttcatccagatgtccagcggagggtacagcaggaaatcgacgatgtcattggccaagttaggcgccccgagatgggagaccaggctcacatgccgtataccaccgccgtgatccatgaagtgcagcgctttggggacatagtgcctctaggggttacacatatgacatcaagggacatcgaggtgcagggcttccgcattcctaagggtacgacactcatcactaatttaagctcagtgctcaaggatgaggccgtctgggaaaagccatttaggttccatcccgaacactttttagatgcacaaggccattttgtgaaaccagaggcattcctccccttttctgctggaaggcgcgcttgtttgggcgagcctctcgctagaatggaacttttcctgtttttcacgtctctgctacagcatttttcgttttctgtacccacaggccagccacgaccatcgcatcacggcgtcttcgcatttttagtcacaccctcaccgtatgagctctgcgcggttcccagatag

SEQ ID NO: 28639 - DNA, 1341 bp, Artificial Sequence
  derived and/or modified sequence
atgggcctggaggccctggtgcccctggccatgatcgtggccatcttccttctactagtcgatctgatgcaccgacgacagaggtgggcggcaagatatcctcccggccccttacctctgcccggcttaggcaatctcttacatgttgacttccagaacaccccctactgctttgaccagctgaggagacggttcggggacgtattttctctgcagctggcatggacgcccgtggtcgtcttgaatgggctcgcagccgtgagagaggcactggtgacccacggagaggacacagctgacagaccccccgtgccgattacccaaatcttgggattcgggcccaggtcccagggccggcccttccggcccaacgggctgctcgataaggccgtctcgaatgtgatcgcttcactcacatgtgggcgacgatttgaatatgacgatcccagattcttacgactgttggatctagctcaggagggcctcaaggaagagtccggctttcttagggaggtactgaacgctgttccggtcttactccacatccccgctctggccggtaaggtgctgcgctttcagaaagccttcttaacacagttagacgaactgcttacagaacacagaatgacctgggatccagcacaacctcctcgcgacctgacggaggctttcctggctgagatggaaaaggccaaagggaaccctgagagtagtttcaatgatgagaatttatgcattgtggttgccgatcttttctctgccggcatggtaacaacctctacaacattagcgtggggcctccttctcatgatcttgcaccctgatgtccaacggcgcgtacaacaagagatcgatgacgtgataggacaggtgcgccgccccgagatgggggatcaagctcacatgccatacaccacggccgtgatacacgaggttcaacgcttcggcgatatagtgcctttgggggttacacacatgactagccgcgatatagaggttcaaggatttcgaattcccaaggggactaccctcataacaaacctttcttctgtgctcaaggacgaagccgtctgggagaaaccatttcggttccaccctgaacacttcctggacgcccaggggcatttcgtgaaaccagaggctttcttgccttttagcgctggccgaagagcctgtttgggggaacctttggcccgaatggagttatttctcttttttacctctctcctccagcatttctctttctctgttccaactggacagccccgcccctctcaccatggggtgttcgcatttttggtgacaccctctccgtatgaactatgcgcagtgccgcgctag

SEQ ID NO: 28640 - DNA, 1341 bp, Artificial Sequence
  derived and/or modified sequence
atgggtttggaggctttagtacctttagctgtgattgtggcaatttttctactgctagtggacctgatgcatcgacggcagcgatgggcggctaggtacccaccaggccctctgcctcttcctggcctcggcaatctactacacgtcgatttccagaataccccctactgttttgaccagctccgaagaagattcggcgacgtattctctctgcagctcgcctggactcccgtggttgtgttaaacggacttgccgcagtgcgagaggcgcttgtcacacatggcgaggatacagcagatcggcctcccgtgccaatcactcagatccttggattcggacctaggagccagggcagaccctttcgtcctaatgggctgctagacaaggctgtgagtaacgtgattgcctcactaacctgtggacgtcggtttgaatacgacgatcctcgcttcctgcgtcttctggacctggcacaggaagggttgaaagaagagtcagggttcctgcgcgaagttctcaatgcagtgcctgtgctcctgcacatcccagcgctggcgggaaaagtgctgcgattccagaaagccttcctgacccagctggacgaactactgacagagcacaggatgacgtgggatccagcccagcctcctagggacctgacggaagcctttctggctgagatggagaaggctaagggaaatcccgaatcatcctttaatgatgagaatctctgtatagtggtagccgatctcttttcagctggcatggtcaccacgtccaccaccctggcgtggggactgttgctgatgatcctccatccggatgtacaaagacgcgtgcagcaagagatcgatgatgtcattggtcaggttaggcggcctgagatgggcgaccaggctcacatgccttatacaaccgctgtgatccatgaagtacagcggttcggagatattgtgccactgggagtcacacacatgacatcccgtgacatcgaagtgcaagggtttagaatcccgaagggcacgaccttgatcaccaatctctcatcagtgcttaaggacgaggcagtgtgggaaaagccttttcgattccacccggaacatttcctcgacgcacagggtcacttcgtgaaaccagaggctttcctgcctttttcggccggaaggcgcgcatgcctcggcgaaccactggccaggatggagctcttcctatttttcacctcactattgcagcatttttcgttctctgtgcctacaggtcagccccgtccttcgcaccacggggtgttcgccttcttggttaccccaagtccctatgaactctgtgccgttcccagatag

SEQ ID NO: 28641 - DNA, 1341 bp, Artificial Sequence
  derived and/or modified sequence
atgggtttggaagctctcgttcccttagccatgatcgtagccattttcttgctgctggtagatttaatgcatcggaggcagagatgggcagctcgctatcctccaggccctttgccactccccggactggggaacctactgcacgtggacttccaaaatacgccctactgtttcgaccagctgagaagacgtttcggggacgtctttagtctgcagctcgcttggacaccagtcgtcgtactgaatggcttggcagccgtgagagaggctctggtgacccacggcgaggataccgcagacagaccccctgtgcctattacccaaattctcggctttggtcctcggagtcagggtaggccttttcgaccaaacgggctactcgacaaggccgtctctaatgtgattgccagtctgacttgtggacgaaggttcgaatacgatgatcccagattcctgcgcttgctcgacctggcacaggaaggcctgaaggaggagtccggatttcttagagaggttttgaatgcagtcccagtgctgcttcatatccccgcactcgctggaaaggtccttaggttccagaaggctttcttgacccagcttgatgaactgctcacagaacatcggatgacctgggacccagcccagccacctcgcgatctcaccgaagcttttctggcggagatggagaaggctaagggaaacccggagtccagtttcaatgacgaaaatttgtgcatcgtagtggcggacctgttctccgccggaatggtaacaacctctacgaccctggcttgggggcttctgcttatgatactccaccctgatgtccagcgcagagtgcagcaagagatagacgacgtcatcggacaggttagaaggcccgaaatgggggaccaggcccacatgccgtataccactgccgttatccatgaggtccagcggttcggagacattgtacctctgggggttacccacatgacatcaagggatatagaggtacaggggtttcgcatcccaaaggggacaaccctgattaccaatctgtcaagcgttctcaaggacgaagctgtgtgggagaagcctttccgattccaccccgaacactttctggatgcgcaaggacacttcgtgaaacccgaagcctttcttcctttctctgcgggacggagggcatgtctgggtgagccactggccagaatggagcttttcctgttctttactagcctcctgcagcatttctcgttctccgtacccaccggccaacccagacccagtcatcatggcgtgttcgcgtttcttgttactccctccccctatgagctgtgtgcggtgcccaggtag

SEQ ID NO: 28642 - DNA, 1433 bp, Artificial Sequence
  derived and/or modified sequence
gcctggtcctctgtgcctggtggggtgggggtgccaggtgtgtccagaggagcccatttggtagtgaggcaggtatggggctagaagcactggtgcccctggccgtgatagtggccatcttcctgctcctggtggacctgatgcaccggcgccaacgctgggctgcacgctacccaccaggccccctgccactgcccgggctgggcaacctgctgcatgtggacttccagaacacaccatactgcttcgaccagttgcggcgccgcttcggggacgtgttcagcctgcagctggcctggacgccggtggtcgtgctcaatgggctggcggccgtgcgcgaggcgctggtgacccacggcgaggacaccgccgaccgcccgcctgtgcccatcacccagatcctgggtttcgggccgcgttcccaaggacgcccctttcgccccaacggtctcttggacaaagccgtgagcaacgtgatcgcctccctcacctgcgggcgccgcttcgagtacgacgaccctcgcttcctcaggctgctggacctagctcaggagggactgaaggaggagtcgggctttctgcgcgaggtgctgaatgctgtccccgtcctcctgcatatcccagcgctggctggcaaggtcctacgcttccaaaaggctttcctgacccagctggatgagctgctaactgagcacaggatgacctgggacccagcccagcccccccgagacctgactgaggccttcctggcagagatggagaaggccaaggggaaccctgagagcagcttcaatgatgagaacctgtgcatagtggtggctgacctgttctctgccgggatggtgaccacctcgaccacgctggcctggggcctcctgctcatgatcctacatccggatgtgcagcgccgtgtccaacaggagatcgacgacgtgatagggcaggtgcggcgaccagagatgggtgaccaggctcacatgccctacaccactgccgtgattcatgaggtgcagcgctttggggacatcgtccccctgggtgtgacccatatgacatcccgtgacatcgaagtacagggcttccgcatccctaagggaacgacactcatcaccaacctgtcatcggtgctgaaggatgaggccgtctgggagaagcccttccgcttccaccccgaacacttcctggatgcccagggccactttgtgaagccggaggccttcctgcctttctcagcaggccgccgtgcatgcctcggggagcccctggcccgcatggagctcttcctcttcttcacctccctgctgcagcacttcagcttctcggtgcccactggacagccccggcccagccaccatggtgtctttgctttcctggtgaccccatccccctatgagctttgtgctgtgccccgctagaatggggtacctagtccc

SEQ ID NO: 28643 - DNA, 1348 bp, Artificial Sequence
  derived and/or modified sequence
ggcagccatggggctagaagcactggtgcccctggccatgatagtggccatcttcctgctcctggtggacctgatgcaccggcgccaacgctgggctgcacgctacccaccaggccccctgccactgcccgggctgggcaacctgctgcatgtggacttccagaacacaccatactgcttcgaccagttgcggcgccgcttcggggacgtgttcagcctgcagctggcctggacgccggtggtcgtgctcaatgggctggcggccgtgcgcgaggcgctggtgacccacggcgaggacaccgccgaccgcccgcctgtgcccatcacccagatcctgggtttcgggccgcgttcccaaggacgcccctttcgccccaacggtctcttggacaaagccgtgagcaacgtgatcgcctccctcacctgcgggcgccgcttcgagtacgacgaccctcgcttcctcaggctgctggacctagctcaggagggactgaaggaggagtcgggctttctgcgcgaggtgctgaatgctgtccccgtcctcctgcatatcccagcgctggctggcaaggtcctacgcttccaaaaggctttcctgacccagctggatgagctgctaactgagcacaggatgacctgggacccagcccagcccccccgagacctgactgaggccttcctggcagagatggagaaggccaaggggaaccctgagagcagcttcaatgatgagaacctgtgcatagtggtggctgacctgttctctgccgggatggtgaccacctcgaccacgctggcctggggcctcctgctcatgatcctacatccggatgtgcagcgccgtgtccaacaggagatcgacgacgtgatagggcaggtgcggcgaccagagatgggtgaccaggctcacatgccctacaccactgccgtgattcatgaggtgcagcgctttggggacatcgtccccctgggtgtgacccatatgacatcccgtgacatcgaagtacagggcttccgcatccctaagggaacgacactcatcaccaacctgtcatcggtgctgaaggatgaggccgtctgggagaagcccttccgcttccaccccgaacacttcctggatgcccagggccactttgtgaagccggaggccttcctgcctttctcagcaggccgccgtgcatgcctcggggagcccctggcccgcatggagctcttcctcttcttcacctccctgctgcagcacttcagcttctcggtgcccactggacagccccggcccagccaccatggtgtctttgctttcctggtgaccccatccccctatgagctttgtgctgtgccccgctag

SEQ ID NO: 28644 - DNA, 1341 bp, Artificial Sequence
  derived and/or modified sequence
atgggcctggaggccctggtgcccctggccgtgatcgtggccatcttcctgctgctggtggacctgatgcacagaagacagagatgggccgccagatacccccccggccccctgcccctgcccggcctgggcaacctgctgcacgtggacttccagaacaccccctactgcttcgaccagctgagaagaagattcggcgacgtgttcagcctgcagctggcctggacccccgtggtggtgctgaacggcctggccgccgtgagagaggccctggtgacccacggcgaggacaccgccgacagaccccccgtgcccatcacccagatcctgggcttcggccccagaagccagggcagacccttcagacccaacggcctgctggacaaggccgtgagcaacgtgatcgccagcctgacctgcggcagaagattcgagtacgacgaccccagattcctgagactgctggacctggcccaggagggcctgaaggaggagagcggcttcctgagagaggtgctgaacgccgtgcccgtgctgctgcacatccccgccctggccggcaaggtgctgagattccagaaggccttcctgacccagctggacgagctgctgaccgagcacagaatgacctgggaccccgcccagccccccagagacctgaccgaggccttcctggccgagatggagaaggccaagggcaaccccgagagcagcttcaacgacgagaacctgtgcatcgtggtggccgacctgttcagcgccggcatggtgaccaccagcaccaccctggcctggggcctgctgctgatgatcctgcaccccgacgtgcagagaagagtgcagcaggagatcgacgacgtgatcggccaggtgagaagacccgagatgggcgaccaggcccacatgccctacaccaccgccgtgatccacgaggtgcagagattcggcgacatcgtgcccctgggcgtgacccacatgaccagcagagacatcgaggtgcagggcttcagaatccccaagggcaccaccctgatcaccaacctgagcagcgtgctgaaggacgaggccgtgtgggagaagcccttcagattccaccccgagcacttcctggacgcccagggccacttcgtgaagcccgaggccttcctgcccttcagcgccggcagaagagcctgcctgggcgagcccctggccagaatggagctgttcctgttcttcaccagcctgctgcagcacttcagcttcagcgtgcccaccggccagcccagacccagccaccacggcgtgttcgccttcctggtgacccccagcccctacgagctgtgcgccgtgcccagatag

SEQ ID NO: 28645 - DNA, 1341 bp, Artificial Sequence
  derived and/or modified sequence
atgggcctggaggccctggtgcccctggccatgatcgtggccatcttcctgctgctggtggacctgatgcacagaagacagagatgggccgccagatacccccccggccccctgcccctgcccggcctgggcaacctgctgcacgtggacttccagaacaccccctactgcttcgaccagctgagaagaagattcggcgacgtgttcagcctgcagctggcctggacccccgtggtggtgctgaacggcctggccgccgtgagagaggccctggtgacccacggcgaggacaccgccgacagaccccccgtgcccatcacccagatcctgggcttcggccccagaagccagggcagacccttcagacccaacggcctgctggacaaggccgtgagcaacgtgatcgccagcctgacctgcggcagaagattcgagtacgacgaccccagattcctgagactgctggacctggcccaggagggcctgaaggaggagagcggcttcctgagagaggtgctgaacgccgtgcccgtgctgctgcacatccccgccctggccggcaaggtgctgagattccagaaggccttcctgacccagctggacgagctgctgaccgagcacagaatgacctgggaccccgcccagccccccagagacctgaccgaggccttcctggccgagatggagaaggccaagggcaaccccgagagcagcttcaacgacgagaacctgtgcatcgtggtggccgacctgttcagcgccggcatggtgaccaccagcaccaccctggcctggggcctgctgctgatgatcctgcaccccgacgtgcagagaagagtgcagcaggagatcgacgacgtgatcggccaggtgagaagacccgagatgggcgaccaggcccacatgccctacaccaccgccgtgatccacgaggtgcagagattcggcgacatcgtgcccctgggcgtgacccacatgaccagcagagacatcgaggtgcagggcttcagaatccccaagggcaccaccctgatcaccaacctgagcagcgtgctgaaggacgaggccgtgtgggagaagcccttcagattccaccccgagcacttcctggacgcccagggccacttcgtgaagcccgaggccttcctgcccttcagcgccggcagaagagcctgcctgggcgagcccctggccagaatggagctgttcctgttcttcaccagcctgctgcagcacttcagcttcagcgtgcccaccggccagcccagacccagccaccacggcgtgttcgccttcctggtgacccccagcccctacgagctgtgcgccgtgcccagatag

SEQ ID NO: 28646 - protein, 567 aa, Artificial Sequence
  derived and/or modified sequence
MWLRAFILATLSASAAWGHPSSPPVVDTVHGKVLGKFVSLEGFAQPVAIFLGIPFAKPPLGPLRFTPPQPAEPWSFVKNATSYPPMCTQDPKAGQLLSELFTNRKENIPLKLSEDCLYLNIYTPADLTKKNRLPVMVWIHGGGLMVGAASTYDGLALAAHENVVVVTIQYRLGIWGFFSTGDEHSRGNWGHLDQVAALRWVQDNIASFGGNPGSVTIFGESAGGESVSVLVLSPLAKNLFHRAISESGVALTSVLVKKGDVKPLAEQIAITAGCKTTTSAVMVHCLRQKTEEELLETTLKMKFLSLDLQGDPRESQPLLGTVIDGMLLLKTPEELQAERNFHTVPYMVGINKQEFGWLIPMQLMSYPLSEGQLDQKTAMSLLWKSYPLVCIAKELIPEATEKYLGGTDDTVKKKDLFLDLIADVMFGVPSVIVARNHRDAGAPTYMYEFQYRPSFSSDMKPKTVIGDHGDELFSVFGAPFLKEGASEEEIRLSKMVMKFWANFARNGNPNGEGLPHWPEYNQKEGYLQIGANTQAAQKLKDKEVAFWTNLFAKKAVEKPPQTEHIEL

SEQ ID NO: 28647 - protein, 432 aa, Artificial Sequence
  derived and/or modified sequence
MVWIHGGGLMVGAASTYDGLALAAHENVVVVTIQYRLGIWGFFSTGDEHSRGNWGHLDQVAALRWVQDNIASFGGNPGSVTIFGESAGGESVSVLVLSPLAKNLFHRAISESGVALTSVLVKKGDVKPLAEQIAITAGCKTTTSAVMVHCLRQKTEEELLETTLKMKFLSLDLQGDPRESQPLLGTVIDGMLLLKTPEELQAERNFHTVPYMVGINKQEFGWLIPMQLMSYPLSEGQLDQKTAMSLLWKSYPLVCIAKELIPEATEKYLGGTDDTVKKKDLFLDLIADVMFGVPSVIVARNHRDAGAPTYMYEFQYRPSFSSDMKPKTVIGDHGDELFSVFGAPFLKEGASEEEIRLSKMVMKFWANFARNGNPNGEGLPHWPEYNQKEGYLQIGANTQAAQKLKDKEVAFWTNLFAKKAVEKPPQTEHIEL

SEQ ID NO: 28648 - DNA, 1704 bp, Artificial Sequence
  derived and/or modified sequence
atgtggctcagggccttcatcctggctacattgtctgcttccgctgcttggggccacccaagttctccaccggttgtcgataccgtacacggcaaagtgctgggtaagttcgtcagcctggagggatttgcccagcctgtggcaatatttctcggcattccattcgcaaagccccctttgggtcctctacggtttacacctccccaacccgccgaaccctggtccttcgttaaaaacgcgacgagctaccctccaatgtgtacccaggatcctaaggcaggccagctgctttctgagctgttcacgaaccgtaaagagaatatccccctcaaactgagtgaagattgtttgtaccttaacatctacacacctgccgatcttactaagaaaaatcgtctgccggtcatggtgtggatccacgggggaggcttaatggtgggagctgccagtacttacgacggcctggctcttgccgctcacgaaaatgtggtggtagtcacaattcagtatagactgggaatatggggatttttctctacaggagatgaacattccagggggaactgggggcacctggaccaggttgccgctctgcggtgggtgcaggataacatcgcatcctttgggggaaatcccggatccgtgacaatctttggcgaaagcgccgggggggagtccgtctcagttctagtactgtccccactggccaaaaatctgttccaccgagctatatccgaaagtggagtggccctgacaagtgtgctcgtaaagaagggtgatgtgaagcccctcgcagagcagatcgcaatcaccgcaggatgcaagacaactactagcgccgtcatggtgcactgtcttcgacagaagactgaggaagagctgctcgagaccacgctaaagatgaagtttctgtccctggatctgcagggcgaccctcgcgagtcacagcctctgctgggaacagtgattgacgggatgttgctgctgaaaactcccgaagagctgcaggctgaacgcaatttccatacagtcccgtacatggtcggtatcaataagcaggaattcgggtggcttataccgatgcagcttatgtcatacccattgtccgagggccagctggaccaaaaaacagccatgtccctcttgtggaaatcctatcctctagtgtgcatcgccaaggagttaatacccgaggccaccgaaaagtacctggggggcaccgacgacacagtaaaaaagaaggacctcttcttggacttaattgctgatgtgatgttcggggtgccttcagttatcgtcgcgcggaatcacagagatgccggggcacctacctacatgtatgagttccagtatcgccctagtttttccagcgatatgaaacccaaaaccgtgatcggggatcacggtgatgaactgttttcggtgtttggggcaccttttctaaaggagggcgccagtgaggaagaaattcgcctaagtaagatggtgatgaagttctgggctaatttcgctaggaacggtaaccccaatggtgaagggcttccacactggccggagtataatcagaaagagggctatttacaaatcggggctaacacacaagcagctcagaagctaaaggataaggaggtcgccttttggaccaatctctttgccaaaaaagcagtcgaaaagcctccccagaccgagcatatcgaattatag

SEQ ID NO: 28649 - DNA, 1299 bp, Artificial Sequence
  derived and/or modified sequence
atggtgtggatccatggcggcggtcttatggtcggggcggcaagcacttacgacggactggccctcgctgcccacgaaaatgtcgtagtcgtcacaattcagtatcgcttaggcatttggggctttttctccactggcgatgagcattctcgcggaaactgggggcaccttgaccaggtcgccgcacttcgatgggtgcaggataacattgcaagtttcggagggaatccagggtcggtgaccatttttggcgagtctgccggcggcgaatccgttagcgtattggtcctgtcccctctggccaagaatctgttccaccgcgcaatcagcgagtccggggtggccctgacatccgttctggtgaaaaagggggatgtgaaaccgcttgccgaacaaattgctatcacggcgggatgcaagacaacaacttccgcagttatggtgcattgccttcgccagaaaacagaggaagagctgctcgagaccaccctcaaaatgaagtttttatcgctggatcttcagggagatccacgggaaagccagcctctgctgggcactgtcatcgatggcatgctgctactgaaaacccccgaggagctacaggccgaaagaaactttcacactgtgccctacatggtgggcattaataagcaggaattcggatggttaattcctatgcagcttatgtcttatccattgtctgaaggacagctcgatcaaaaaacagcaatgtctctgctctggaagtcctacccgcttgtgtgtatcgccaaagaacttatacctgaggctaccgagaaatacctcggcgggacagacgataccgtgaagaagaaggacctgttcttggatctcattgccgatgtaatgttcggcgtcccttcagtgattgtagcgaggaatcacagagatgctggagccccaacctatatgtacgagtttcagtatagaccatctttttccagtgacatgaagcccaaaactgttatcggcgatcacggagatgagctgttctccgtcttcggtgccccattcttgaaggaaggggccagtgaagaggaaattagactctccaagatggtgatgaagttttgggccaacttcgcccgtaacggcaacccaaatggcgaaggcctgcctcactggcctgaatataatcagaaggagggttatctgcagatcggagcgaacacgcaggcagcccaaaagcttaaggacaaggaggttgccttttggacgaatctcttcgccaaaaaggccgtcgaaaaaccccctcagactgagcacattgagctctag

SEQ ID NO: 28650 - DNA, 1704 bp, Artificial Sequence
  derived and/or modified sequence
atgtggctgcgggccttcatcctggccaccctgagcgccagcgctgcctggggccaccccagcagcccccctgtggtggacacagtgcacggcaaggtgctgggcaagtttgtgtccctggagggctttgcccagcctgtggccatcttcctgggcatcccctttgccaagccacccctgggccccctgcgcttcaccccaccccagcctgctgagccctggagctttgtgaagaatgccaccagctacccacccatgtgcacccaggaccccaaggccggccagctgctgtctgagctgttcaccaacaggaaggagaacatccccctgaagctgtctgaggactgcctgtacctgaacatctacaccccagctgacctgaccaagaagaaccggctgcctgtgatggtgtggatccacggcggcggcctgatggtgggcgccgccagcacctatgatggcctggccctggccgcccatgaaaatgtggtggtggtgaccatccagtaccgcctgggcatctggggcttcttcagcactggagatgagcacagccggggcaactggggccacctggaccaggtggccgccctgcgctgggtgcaggacaacatcgccagctttggaggcaaccctggctctgtgaccatctttggagagagcgctggaggagagagcgtgtctgtgctggtgctgagccccctggccaagaacctcttccaccgggccatcagcgagagcggcgtggccctgacctctgtgctggtgaagaagggagatgtgaagcccctggccgagcagatcgccatcacagctggctgcaagaccaccaccagcgctgtgatggtgcactgcctgcggcagaagacagaggaggagctgctggagaccaccctgaagatgaagttcctgagcctggacctgcagggcgacccccgggagagccagcccctgctgggcaccgtgattgatggcatgctgctgctgaagaccccagaggagctgcaggccgagaggaacttccacacagtgccctacatggtgggcatcaacaagcaggagtttggctggctgatccccatgcagctgatgagctaccccctgtctgagggccagctggaccagaagacagccatgagcctgctgtggaagagctaccccctggtgtgcatcgccaaggagctgatccctgaggccacagagaagtacctgggcggcacagatgacacagtgaagaagaaggacctcttcctggacctgattgctgatgtgatgtttggagtgcccagcgtcatcgtggccaggaaccacagagatgctggggcccccacctacatgtatgagttccagtaccggcccagcttcagcagtgacatgaagcccaagacagtgattggagaccatggagatgagctgttctctgtgtttggagcccccttcctgaaggagggcgccagcgaggaggagatccggctgagcaagatggtgatgaagttctgggccaactttgccagaaatggaaaccccaacggggagggcctgccccactggccagagtacaaccagaaggagggctacctgcagattggagccaacacccaggccgcccagaagctgaaggacaaggaggtggccttctggaccaacctgtttgccaagaaggctgtggagaagccaccccagacagagcacatcgagctgtag

SEQ ID NO: 28651 - DNA, 1299 bp, Artificial Sequence
  derived and/or modified sequence
atggtgtggattcatggaggcggcctgatggtgggcgccgccagcacctatgatggcctggccctggccgcccatgaaaatgtggtggtggtgaccatccagtaccgcctgggcatctggggcttcttcagcactggagatgagcacagccggggcaactggggccacctggaccaggtggccgccctgcgctgggtgcaggacaacatcgccagctttggaggcaaccctggctctgtgaccatctttggagagagcgctggaggagagagcgtgtctgtgctggtgctgagccccctggccaagaacctcttccaccgggccatcagcgagagcggcgtggccctgacctctgtgctggtgaagaagggagatgtgaagcccctggccgagcagatcgccatcacagctggctgcaagaccaccaccagcgctgtgatggtgcactgcctgcggcagaagacagaggaggagctgctggagaccaccctgaagatgaagttcctgagcctggacctgcagggcgacccccgggagagccagcccctgctgggcaccgtgattgatggcatgctgctgctgaagaccccagaggagctgcaggccgagaggaacttccacacagtgccctacatggtgggcatcaacaagcaggagtttggctggctgatccccatgcagctgatgagctaccccctgtctgagggccagctggaccagaagacagccatgagcctgctgtggaagagctaccccctggtgtgcatcgccaaggagctgatccctgaggccacagagaagtacctgggcggcacagatgacacagtgaagaagaaggacctcttcctggacctgattgctgatgtgatgtttggagtgcccagcgtgattgtggccaggaaccacagagatgctggggcccccacctacatgtatgagttccagtaccggcccagcttcagcagtgacatgaagcccaagacagtcatcggggaccatggagatgagctgttctctgtgtttggagcccccttcctgaaggagggcgccagcgaggaggagatccggctgagcaagatggtgatgaagttctgggccaactttgccagaaatggaaaccccaatggagagggcctgccccactggccagagtacaaccagaaggagggctacctgcagatcggggccaacacccaggccgcccagaagctgaaggacaaggaggtggccttctggaccaacctgtttgccaagaaggctgtggagaagccaccccagacagagcacatcgagctgtag

SEQ ID NO: 28652 - DNA, 1704 bp, Artificial Sequence
  derived and/or modified sequence
atgtggctgcgggccttcatcctggccaccctgagcgccagcgccgcgtgggggcacccttcctcaccccctgtcgttgacacagtgcatggtaaggtcctgggcaaatttgttagtttagagggattcgcccagccagtcgccatcttcttgggtattcccttcgcaaaacctccactcggccctctgcgatttacccccccccagcccgcagagccctggtccttcgtgaagaatgccactagttatcctcctatgtgtacccaagatcccaaggccggccaactgttatccgagctcttcaccaataggaaagagaatattcctctgaagcttagtgaagactgcctgtacctcaatatttacacgccagcagatttaacaaagaagaaccgccttcccgtgatggtttggatccatgggggtggccttatggtaggggccgcaagtacttacgacggcctggctctggccgcccatgagaacgtcgttgtggtcaccatccagtatcggttgggcatctggggcttcttttcaaccggcgatgagcattccagaggcaattggggccatctcgatcaagtagctgccctgcggtgggtacaagacaatattgcaagctttgggggaaatcccggttcggtcacaattttcggtgagtcagccgggggagagtctgtctcagttctggtcctttccccgttagctaagaacctgttccatcgggccattagcgagtctggggtggctctgacaagcgtgctcgtcaagaagggggatgttaagcccctggctgaacagattgctattacagccggttgcaagaccacaacctctgccgtgatggtccactgtctccgccagaagaccgaggaagagcttcttgagacaactctcaagatgaaatttttatcattggatttgcagggcgatcctagagagtctcaaccgctattggggaccgtgatcgacgggatgctgttgctaaaaacgcccgaggaactccaggctgagagaaactttcatacagtgccatatatggtggggattaacaaacaggaattcggttggctgatccccatgcaattgatgagctaccccctgtctgagggccagcttgaccagaagaccgctatgtccctgctctggaaatcttaccctctggtttgtattgctaaggagctgatccccgaggctaccgaaaagtacttgggcggtaccgacgatacggtgaaaaagaaagatctgttcctggacctgattgctgatgtgatgtttggcgttccgtcggttatcgtggcaaggaatcatagggacgccggggccccaacatacatgtacgagtttcagtatcgcccgagcttttcgagcgacatgaaaccaaagacagttatcggagatcatggggacgaactcttttctgtctttggggcccctttcctgaaggaaggcgcttctgaagaggagataagattgtcaaaaatggtgatgaaattttgggcaaatttcgccaggaacggcaatcccaacggagaaggtctgccccactggcccgagtataaccagaaggaggggtatctgcagattggagctaatacacaggccgcccagaaactcaaggataaggaagttgccttctggaccaacttgttcgctaagaaggctgtcgagaaacctcctcagacagagcacatagaattgtag

SEQ ID NO: 28653 - DNA, 1299 bp, Artificial Sequence
  derived and/or modified sequence
atggtgtggatccacggcggcggcctgatggtgggcgccgccagcacctatgatggcctcgcactcgccgcccacgagaacgtcgtcgtggtgacaattcaataccgactgggtatttggggatttttttccacgggtgacgagcattcgcgcgggaactggggccaccttgatcaggtggctgcccttcggtgggtgcaggataatatagcaagttttggcgggaatcctgggagcgtgacaatttttggcgagtccgccggcggtgagtccgtgtcagtgttggtgctgtctcctcttgcaaaaaatttgtttcatagagctatctcagaatcaggcgttgccctgaccagtgtgctcgtgaagaaaggcgacgtaaagccactagcggagcagatcgccatcaccgctggatgcaagacaactacaagcgccgtcatggtgcattgcctgcgccagaaaaccgaggaagagctgctcgagacgaccttgaaaatgaaatttctatcactggacctccagggtgatccccgggagtcacaacctcttttgggtacggtgatcgacggaatgctactgttaaaaacaccagaggaactgcaagcggagcggaattttcatacagtaccatacatggtggggattaataaacaggaattcggctggctgatccccatgcagttaatgtcctatccccttagcgagggccaactcgaccagaaaacagcgatgtctttgttgtggaagagctacccccttgtgtgcatcgcaaaagagctaatacccgaggctaccgagaaatatctcggcggcactgacgacacggtgaagaaaaaggatctcttcctcgacttgattgccgatgtgatgttcggcgtaccctccgtgatagtggcgcggaaccatagagatgctggcgcccctacttacatgtatgagtttcagtaccggcctagtttcagttccgacatgaagccaaagaccgtcattggtgatcatggcgacgagctgttttccgtgtttggagccccatttctgaaggagggcgcatcagaagaagagattcgcttatcaaaaatggtgatgaaattctgggccaatttcgcccggaacggcaatcctaatggcgagggtctcccccactggcccgagtacaaccagaaggagggctacttgcagatcggggccaacactcaggctgcacaaaagcttaaagataaggaggtggccttttggacaaatctgtttgccaagaaggccgttgaaaaacctccccagaccgaacatatagaactgtag

SEQ ID NO: 28654 - DNA, 1704 bp, Artificial Sequence
  derived and/or modified sequence
atgtggttgagagcatttattctggccactctcagtgcttctgctgcatggggccaccctagcagccccccagtggtggacacagtccatgggaaggtactcggaaaattcgtaagcctggaaggcttcgcacaaccagtcgccatctttcttggcattcctttcgccaaaccacctctcggtcctctgcggtttacccctccccagccagctgagccttggtcctttgttaaaaatgcgacgtcctatccccctatgtgtacccaagatccaaaagcgggtcagctgctcagcgaactctttaccaaccgcaaagaaaacattcctctcaagctgagcgaagattgcttgtatctgaatatctatacccctgccgacctgactaagaagaaccggctccccgtaatggtgtggatccacggtggaggactaatggtcggggcagcaagtacctacgacgggttagcactggccgctcacgaaaatgtggtcgtggtgactatccagtataggctcgggatttggggatttttcagcacaggcgacgagcattcaaggggtaactggggacatttagatcaggtggccgcactgagatgggtgcaggacaacattgcctccttcggtgggaatcccggtagtgtgacaatttttggagagtctgctggcggtgaaagcgtttccgtcctggtactcagtccccttgctaaaaacttgttccatagagctatcagcgaatccggagtagctctaacatccgtgctcgtgaagaaaggcgatgtcaaaccattagccgagcagatagctatcacggctggatgtaagacaaccacgtcagccgtaatggtccactgccttcggcaaaagacagaggaggaacttctcgaaaccacgctaaaaatgaaatttttgtccctagatctccagggcgaccctcgcgagagtcagccccttttgggaactgtcatcgatggcatgctgctgctgaagacacccgaggaactccaggcagaaaggaattttcacaccgttccctacatggtgggaattaataagcaggaatttgggtggctgatccccatgcaactgatgtcataccctttgtctgagggacagctcgaccagaagacagctatgtctctcctgtggaagagttatccactggtgtgcatagctaaagagctcatccccgaggccaccgagaaatacctggggggaaccgacgataccgttaaaaagaaagacttgttcctggacctgatagcagatgtgatgtttggagtcccatctgtcatagtggctagaaatcacagagacgccggtgcgcctacttatatgtatgaatttcaataccgcccaagcttcagctcagacatgaaacccaaaacagtcattggcgatcatggggacgagctttttagcgtgttcggagcgccttttcttaaagaaggagcttccgaagaggagatcaggttgagtaagatggtaatgaagttctgggcaaacttcgccaggaacggcaacccgaacggagagggcctgccccattggcctgagtataatcagaaggagggctatctgcagataggggcaaacacacaggctgctcagaaacttaaggataaggaggtggcattctggactaacttgttcgccaaaaaggccgtcgaaaaaccaccccagacggagcacattgaactttag

SEQ ID NO: 28655 - DNA, 1299 bp, Artificial Sequence
  derived and/or modified sequence
atggtttggattcatgggggagggctgatggttggcgcagcctctacatatgacggcctcgctttggctgcacatgagaacgtggtcgtcgtcacaattcagtatcgactgggcatctggggatttttctctacaggagatgagcactcccgcggaaattggggccatctagaccaggtcgcggctctgaggtgggtccaggataacatcgccagtttcgggggaaaccccggatctgtcacaatcttcggagagagcgcaggaggggaaagtgtgagcgtcctggtgctgagcccgctcgcgaagaacttgttccatcgcgcaatctctgagagcggcgttgcccttacctccgttctggtgaaaaaaggcgatgtgaagccgctcgccgaacagattgctatcactgcgggatgcaaaaccactacctctgcggttatggtacactgtctccgccagaaaactgaggaggaactacttgaaacaacactgaagatgaaattcctgagcttggacttgcagggcgacccaagggaatcacagccactgctggggacggtgattgatggaatgttgctactcaaaaccccagaagagttgcaagccgagcgcaactttcacacagtgccatacatggttgggatcaacaagcaggagttcgggtggctgatcccaatgcagctcatgagctacccgctatccgagggccagctcgaccaaaagacagcaatgtccctcctgtggaaaagctatccactcgtttgtatcgccaaggaactcatccctgaagccactgagaaataccttggaggaaccgacgacacagttaaaaaaaaagatttgttcttggaccttattgcagatgtaatgtttggagtcccatccgttattgtggcgagaaaccaccgcgacgcaggagccccaacctacatgtacgaattccaatacaggccttctttcagcagcgacatgaagccaaaaacagttattggcgaccacggcgacgagctgttcagtgtgttcggcgcaccttttctcaaggagggagcatctgaggaggaaatccggttgagcaagatggtcatgaagttttgggccaactttgctagaaatggaaatcctaatggcgaggggctgccgcactggccagagtacaatcagaaggaaggttatcttcagattggtgctaatacgcaggccgctcagaaactgaaagacaaggaagtggctttctggactaaccttttcgccaagaaagccgtggaaaagccacctcagaccgagcacatagagctttag

SEQ ID NO: 28656 - DNA, 2007 bp, Artificial Sequence
  derived and/or modified sequence
agcgcagggcggtaactctgggcggggctgggctccagggctggacagcacagtccctctgaactgcacagagacctcgcaggccccgagaactgtcgcccttccacgatgtggctccgtgcctttatcctggccactctctctgcttccgcggcttgggggcatccgtcctcgccacctgtggtggacaccgtgcatggcaaagtgctggggaagttcgtcagcttagaaggatttgcacagcctgtggccattttcctgggaatcccttttgccaagccgcctcttggacccctgaggtttactccaccgcagcctgcagaaccatggagctttgtgaagaatgccacctcgtaccctcctatgtgcacccaagatcccaaggcggggcagttactctcagagctatttacaaaccgaaaggagaacattcctctcaagctttctgaagactgtctttacctcaatatttacactcctgctgacttgaccaagaaaaacaggctgccggtgatggtgtggatccacggaggggggctgatggtgggtgcggcatcaacctatgatgggctggcccttgctgcccatgaaaacgtggtggtggtgaccattcaatatcgcctgggcatctggggattcttcagcacaggggatgaacacagccgggggaactggggtcacctggaccaggtggctgccctgcgctgggtccaggacaacattgccagctttggagggaacccaggctctgtgaccatctttggagagtcagcgggaggagaaagtgtctctgttcttgttttgtctccattggccaagaacctcttccaccgggccatttctgagagtggcgtggccctcacttctgttctggtgaagaaaggtgatgtcaagcccttggctgagcaaattgctatcactgctgggtgcaaaaccaccacctctgctgtcatggttcactgcctgcgacagaagacggaagaggagctcttggagacgacattgaaaatgaaattcttatctctggacttacagggagaccccagagagagtcaaccccttctgggcactgtgattgatgggatgctgctgctgaaaacacctgaagagcttcaagctgaaaggaatttccacactgtcccctacatggtcggaattaacaagcaggagtttggctggttgattccaatgcagttgatgagctatccactctccgaagggcaactggaccagaagacagccatgtcactcctgtggaagtcctatccccttgtttgcattgctaaggaactgattccagaagccactgagaaatacttaggaggaacagacgacactgtcaaaaagaaagacctgttcctggacttgatagcagatgtgatgtttggtgtcccatctgtgattgtggcccggaaccacagagatgctggagcacccacctacatgtatgagtttcagtaccgtccaagcttctcatcagacatgaaacccaagacggtgataggagaccacggggatgagctcttctccgtctttggggccccatttttaaaagagggtgcctcagaagaggagatcagacttagcaagatggtgatgaaattctgggccaactttgctcgcaatggaaaccccaatggggaagggctgccccactggccagagtacaaccagaaggaagggtatctgcagattggtgccaacacccaggcggcccagaagctgaaggacaaagaagtagctttctggaccaacctctttgccaagaaggcagtggagaagccaccccagacagaacacatagagctgtgaatgaagatccagccggccttgggagcctggaggagcaaagactggggtcttttgcgaaagggattgcaggttcagaaggcatcttaccatggctggggaattgtctggtggtggggggcaggggacagaggccatgaaggagcaagttttgtatttgtgacctcagctttgggaataaaggatcttttgaaggcc

SEQ ID NO: 28657 - DNA, 1813 bp, Artificial Sequence
  derived and/or modified sequence
ttccacgatgtggctccgtgcctttatcctggccactctctctgcttccgcggcttgggggcatccgtcctcgccacctgtggtggacaccgtgcatggcaaagtgctggggaagttcgtcagcttagaaggatttgcacagcctgtggccattttcctgggaatcccttttgccaagccgcctcttggacccctgaggtttactccaccgcagcctgcagaaccatggagctttgtgaagaatgccacctcgtaccctcctatgtgcacccaagatcccaaggcggggcagttgaccaagaaaaacaggctgccggtgatggtgtggatccacggaggggggctgatggtgggtgcggcatcaacctatgatgggctggcccttgctgcccatgaaaacgtggtggtggtgaccattcaatatcgcctgggcatctggggattcttcagcacaggggatgaacacagccgggggaactggggtcacctggaccaggtggctgccctgcgctgggtccaggacaacattgccagctttggagggaacccaggctctgtgaccatctttggagagtcagcgggaggagaaagtgtctctgttcttgttttgtctccattggccaagaacctcttccaccgggccatttctgagagtggcgtggccctcacttctgttctggtgaagaaaggtgatgtcaagcccttggctgagcaaattgctatcactgctgggtgcaaaaccaccacctctgctgtcatggttcactgcctgcgacagaagacggaagaggagctcttggagacgacattgaaaatgaaattcttatctctggacttacagggagaccccagagagagtcaaccccttctgggcactgtgattgatgggatgctgctgctgaaaacacctgaagagcttcaagctgaaaggaatttccacactgtcccctacatggtcggaattaacaagcaggagtttggctggttgattccaatgcagttgatgagctatccactctccgaagggcaactggaccagaagacagccatgtcactcctgtggaagtcctatccccttgtttgcattgctaaggaactgattccagaagccactgagaaatacttaggaggaacagacgacactgtcaaaaagaaagacctgttcctggacttgatagcagatgtgatgtttggtgtcccatctgtgattgtggcccggaaccacagagatgctggagcacccacctacatgtatgagtttcagtaccgtccaagcttctcatcagacatgaaacccaagacggtgataggagaccacggggatgagctcttctccgtctttggggccccatttttaaaagagggtgcctcagaagaggagatcagacttagcaagatggtgatgaaattctgggccaactttgctcgcaatggaaaccccaatggggaagggctgccccactggccagagtacaaccagaaggaagggtatctgcagattggtgccaacacccaggcggcccagaagctgaaggacaaagaagtagctttctggaccaacctctttgccaagaaggcagtggagaagccaccccagacagaacacatagagctgtgaatgaagatccagccggccttgggagcctggaggagcaaagactggggtcttttgcgaaagggattgcaggttcagaaggcatcttaccatggctggggaattgtctggtggtggggggcaggggacagaggccatgaaggagcaagttttgtatttgtgacctcagctttgggaataaaggatcttttgaaggcc

SEQ ID NO: 28658 - DNA, 1704 bp, Artificial Sequence
  derived and/or modified sequence
atgtggctgagagccttcatcctggccaccctgagcgccagcgccgcctggggccaccccagcagcccccccgtggtggacaccgtgcacggcaaggtgctgggcaagttcgtgagcctggagggcttcgcccagcccgtggccatcttcctgggcatccccttcgccaagccccccctgggccccctgagattcacccccccccagcccgccgagccctggagcttcgtgaagaacgccaccagctacccccccatgtgcacccaggaccccaaggccggccagctgctgagcgagctgttcaccaacagaaaggagaacatccccctgaagctgagcgaggactgcctgtacctgaacatctacacccccgccgacctgaccaagaagaacagactgcccgtgatggtgtggatccacggcggcggcctgatggtgggcgccgccagcacctacgacggcctggccctggccgcccacgagaacgtggtggtggtgaccatccagtacagactgggcatctggggcttcttcagcaccggcgacgagcacagcagaggcaactggggccacctggaccaggtggccgccctgagatgggtgcaggacaacatcgccagcttcggcggcaaccccggcagcgtgaccatcttcggcgagagcgccggcggcgagagcgtgagcgtgctggtgctgagccccctggccaagaacctgttccacagagccatcagcgagagcggcgtggccctgaccagcgtgctggtgaagaagggcgacgtgaagcccctggccgagcagatcgccatcaccgccggctgcaagaccaccaccagcgccgtgatggtgcactgcctgagacagaagaccgaggaggagctgctggagaccaccctgaagatgaagttcctgagcctggacctgcagggcgaccccagagagagccagcccctgctgggcaccgtgatcgacggcatgctgctgctgaagacccccgaggagctgcaggccgagagaaacttccacaccgtgccctacatggtgggcatcaacaagcaggagttcggctggctgatccccatgcagctgatgagctaccccctgagcgagggccagctggaccagaagaccgccatgagcctgctgtggaagagctaccccctggtgtgcatcgccaaggagctgatccccgaggccaccgagaagtacctgggcggcaccgacgacaccgtgaagaagaaggacctgttcctggacctgatcgccgacgtgatgttcggcgtgcccagcgtgatcgtggccagaaaccacagagacgccggcgcccccacctacatgtacgagttccagtacagacccagcttcagcagcgacatgaagcccaagaccgtgatcggcgaccacggcgacgagctgttcagcgtgttcggcgcccccttcctgaaggagggcgccagcgaggaggagatcagactgagcaagatggtgatgaagttctgggccaacttcgccagaaacggcaaccccaacggcgagggcctgccccactggcccgagtacaaccagaaggagggctacctgcagatcggcgccaacacccaggccgcccagaagctgaaggacaaggaggtggccttctggaccaacctgttcgccaagaaggccgtggagaagcccccccagaccgagcacatcgagctgtag

SEQ ID NO: 28659 - DNA, 1299 bp, Artificial Sequence
  derived and/or modified sequence
atggtgtggatccacggcggcggcctgatggtgggcgccgccagcacctacgacggcctggccctggccgcccacgagaacgtggtggtggtgaccatccagtacagactgggcatctggggcttcttcagcaccggcgacgagcacagcagaggcaactggggccacctggaccaggtggccgccctgagatgggtgcaggacaacatcgccagcttcggcggcaaccccggcagcgtgaccatcttcggcgagagcgccggcggcgagagcgtgagcgtgctggtgctgagccccctggccaagaacctgttccacagagccatcagcgagagcggcgtggccctgaccagcgtgctggtgaagaagggcgacgtgaagcccctggccgagcagatcgccatcaccgccggctgcaagaccaccaccagcgccgtgatggtgcactgcctgagacagaagaccgaggaggagctgctggagaccaccctgaagatgaagttcctgagcctggacctgcagggcgaccccagagagagccagcccctgctgggcaccgtgatcgacggcatgctgctgctgaagacccccgaggagctgcaggccgagagaaacttccacaccgtgccctacatggtgggcatcaacaagcaggagttcggctggctgatccccatgcagctgatgagctaccccctgagcgagggccagctggaccagaagaccgccatgagcctgctgtggaagagctaccccctggtgtgcatcgccaaggagctgatccccgaggccaccgagaagtacctgggcggcaccgacgacaccgtgaagaagaaggacctgttcctggacctgatcgccgacgtgatgttcggcgtgcccagcgtgatcgtggccagaaaccacagagacgccggcgcccccacctacatgtacgagttccagtacagacccagcttcagcagcgacatgaagcccaagaccgtgatcggcgaccacggcgacgagctgttcagcgtgttcggcgcccccttcctgaaggagggcgccagcgaggaggagatcagactgagcaagatggtgatgaagttctgggccaacttcgccagaaacggcaaccccaacggcgagggcctgccccactggcccgagtacaaccagaaggagggctacctgcagatcggcgccaacacccaggccgcccagaagctgaaggacaaggaggtggccttctggaccaacctgttcgccaagaaggccgtggagaagcccccccagaccgagcacatcgagctgtag

SEQ ID NO: 28660 - protein, 568 aa, Artificial Sequence
  derived and/or modified sequence
MWLRAFILATLSASAAWAGHPSSPPVVDTVHGKVLGKFVSLEGFAQPVAIFLGIPFAKPPLGPLRFTPPQPAEPWSFVKNATSYPPMCTQDPKAGQLLSELFTNRKENIPLKLSEDCLYLNIYTPADLTKKNRLPVMVWIHGGGLMVGAASTYDGLALAAHENVVVVTIQYRLGIWGFFSTGDEHSRGNWGHLDQVAALRWVQDNIASFGGNPGSVTIFGESAGGESVSVLVLSPLAKNLFHRAISESGVALTSVLVKKGDVKPLAEQIAITAGCKTTTSAVMVHCLRQKTEEELLETTLKMKFLSLDLQGDPRESQPLLGTVIDGMLLLKTPEELQAERNFHTVPYMVGINKQEFGWLIPMQLMSYPLSEGQLDQKTAMSLLWKSYPLVCIAKELIPEATEKYLGGTDDTVKKKDLFLDLIADVMFGVPSVIVARNHRDAGAPTYMYEFQYRPSFSSDMKPKTVIGDHGDELFSVFGAPFLKEGASEEEIRLSKMVMKFWANFARNGNPNGEGLPHWPEYNQKEGYLQIGANTQAAQKLKDKEVAFWTNLFAKKAVEKPPQTEHIEL

SEQ ID NO: 28661 - DNA, 1707 bp, Artificial Sequence
  derived and/or modified sequence
atgtggttaagagcattcattctggccacgctgagcgcatccgcagcttgggccggtcacccctcatcacctcctgtggtagatactgttcacggcaaggtcctgggaaaatttgtgtccctcgaaggttttgctcaacccgtggccattttcctcggtatcccctttgcaaaaccgccattgggaccactgcgctttaccccacctcaacctgctgagccttggtcgtttgttaagaacgccacctcttatccacccatgtgtactcaggaccctaaagcaggacagctcctcagtgagctgtttacaaaccgcaaggagaatattccgttaaagttgtcggaggattgtctgtatcttaatatctacacacctgccgaccttactaagaaaaaccgccttcctgtgatggtgtggattcacggtggaggtctgatggtgggagctgcctctacgtatgacggcctagctttggcagcccatgagaatgtggtcgtggttaccatacagtacagactggggatttggggctttttctctactggggacgagcactcgcggggcaattggggccacctcgatcaagtggccgcactgagatgggtgcaagataatatcgccagctttgggggcaatccaggctcggtgaccatttttggggagtctgctggcggggagtccgtgagcgtcctggtgttgagccctttagcgaaaaatctctttcatcgcgccattagcgaaagtggcgtagctttgacatctgtactggtgaaaaaaggcgacgttaagcccctcgcagagcagatcgctatcaccgccggatgtaaaaccactacttccgccgtgatggtccactgcctgaggcagaagaccgaagaggaattattggaaacaaccttaaaaatgaagttcctgtctctggatctgcagggagacccacgggagagccagcctctactgggcactgtaatcgatggaatgctcttgttaaagaccccagaggaactgcaagctgagagaaatttccacacagttccttatatggtaggtataaacaaacaggagttcggatggcttatcccaatgcagctgatgagttatcccctcagtgagggccagctcgatcaaaaaaccgctatgtcactactgtggaagtcctaccccctcgtctgtatcgccaaggagcttattcctgaagcaacagaaaagtatcttggcgggaccgatgacaccgttaagaagaaggatttatttctggatctcatcgcagacgtcatgtttggcgtgccatccgtgatcgtcgccaggaatcatagagacgccggcgcccccacctatatgtacgagttccagtatcgccctagcttctctagcgatatgaaaccaaaaaccgtgataggagatcacggtgacgagttgttctcagtgttcggcgctccatttctgaaggagggcgcctctgaggaagagattcgcctctctaaaatggtgatgaagttctgggccaactttgctcggaacggcaacccaaacggtgagggccttcctcactggcccgaatataatcagaaggagggatatctgcagattggcgccaacacgcaggcagctcagaaacttaaagacaaggaggtagctttctggactaatttatttgccaagaaggctgtggaaaagcccccacagaccgagcacatcgaactatag

SEQ ID NO: 28662 - DNA, 1707 bp, Artificial Sequence
  derived and/or modified sequence
atgtggctgcgggccttcatcctggccaccctgagcgccagcgctgcctgggccggccaccccagcagcccccctgtggtggacacagtgcacggcaaggtgctgggcaagtttgtgtccctggagggctttgcccagcctgtggccatcttcctgggcatcccctttgccaagccacccctgggccccctgcgcttcaccccaccccagcctgctgagccctggagctttgtgaagaatgccaccagctacccacccatgtgcacccaggaccccaaggccggccagctgctgtctgagctgttcaccaacagaaaagaaaacatccccctgaagctgtctgaggactgcctgtacctgaacatctacaccccagctgacctgaccaagaagaaccggctgcctgtgatggtgtggattcatggaggcggcctgatggtgggcgccgccagcacctatgatggcctggccctggccgcccatgaaaatgtggtggtggtgaccatccagtaccgcctgggcatctggggcttcttcagcactggagatgagcacagccggggcaactggggccacctggaccaggtggccgccctgcgctgggtgcaggacaacatcgccagctttggaggcaaccctggctctgtgaccatctttggagagagcgctggaggagagagcgtgtctgtgctggtgctgagccccctggccaagaacctcttccaccgggccatcagcgagagcggcgtggccctgacctctgtgctggtgaagaagggagatgtgaagcccctggccgagcagatcgccatcacagctggctgcaagaccaccaccagcgctgtgatggtgcactgcctgcggcagaagacagaggaggagctgctggagaccaccctgaagatgaagttcctgagcctggacctgcagggcgacccccgggagagccagcccctgctgggcaccgtgattgatggcatgctgctgctgaagaccccagaggagctgcaggccgagaggaacttccacacagtgccctacatggtgggcatcaacaagcaggagtttggctggctgatccccatgcagctgatgagctaccccctgtctgagggccagctggaccagaagacagccatgagcctgctgtggaagagctaccccctggtgtgcatcgccaaggagctgatccctgaggccacagagaagtacctgggcggcacagatgacacagtgaagaagaaggacctcttcctggacctgattgctgatgtgatgtttggagtgcccagcgtgattgtggccaggaaccacagagatgctggggcccccacctacatgtatgagttccagtaccggcccagcttcagcagtgacatgaagcccaagacagtcatcggggaccatggagatgagctgttctctgtgtttggagcccccttcctgaaggagggcgccagcgaggaggagatccggctgagcaagatggtgatgaagttctgggccaactttgccagaaatggaaaccccaatggagagggcctgccccactggccagagtacaaccagaaggagggctacctgcagatcggggccaacacccaggccgcccagaagctgaaggacaaggaggtggccttctggaccaacctgtttgccaagaaggctgtggagaagccaccccagacagagcacatcgagctgtag

SEQ ID NO: 28663 - DNA, 1707 bp, Artificial Sequence
  derived and/or modified sequence
atgtggctgcgggccttcatcctggccaccctgagcgccagcgccgcgtgggcagggcaccctagttctcctcctgttgttgataccgtccatggaaaggtcctgggaaaattcgtatcactggaaggattcgctcagcccgtcgcaatcttcctggggataccttttgctaagcccccccttggccctttgaggtttacgccaccccaacccgctgagccatggagtttcgtgaagaacgctacatcgtaccccccaatgtgtacccaagatcctaaagccgggcagctcctctctgagctttttaccaaccgaaaggaaaacatcccattgaaactaagcgaggactgcctgtacctgaacatctatacccccgctgacctgaccaagaagaacagactgcccgtaatggtatggattcacggcggggggctcatggtgggtgctgcatctacttatgatgggctggccctggccgcccatgaaaatgttgtcgtggttactatacagtatcggctcggcatatggggcttcttcagcacgggggatgagcactccagaggaaactgggggcatctggaccaggtagcagcgctgcgctgggttcaggacaacattgcaagttttggcggtaatcccgggtctgtgacaatttttggcgaatccgctggtggtgaaagtgtgagcgtacttgttctgtcaccactggcgaagaacttgtttcatcgggccattagtgaatctggcgtggctctgacgtccgtgctcgtcaagaagggggacgtcaagcctcttgcagaacagatcgctatcaccgccgggtgtaagaccaccacttccgccgtaatggtccattgcttgcgccagaaaacagaggaagaattactggaaaccacgctgaagatgaaattcttatcactagacctgcagggagatccaagggaatcccagcccttactaggtacagtcatcgacggaatgttgctgctgaagacccctgaggagttgcaggccgaaagaaactttcacaccgtgccttacatggtggggattaataagcaagagtttggatggcttatccctatgcagttgatgagttaccctctgagcgaaggacagctggaccagaagaccgcgatgtccctcctgtggaaaagctatccccttgtatgcattgccaaggagctaatcccagaagccaccgagaaataccttggggggacagatgacactgtcaaaaagaaagacctgttccttgacctcattgccgacgtcatgttcggagttcccagtgtaattgtcgccagaaaccatagagacgcaggagcccctacttacatgtacgagtttcagtacaggccatctttctcctcagacatgaaacccaagacggtgattggtgaccacggcgatgaactgttttcagtgtttggggcaccgttcctcaaggagggggctagcgaggaagagatccgattgtctaagatggtcatgaaattttgggccaatttcgctcggaacgggaaccccaatggagaagggctcccccattggccagagtacaaccagaaagagggttatctgcaaatcggagctaacacccaagccgcccagaaactcaaggataaggaggtggcattctggaccaatctatttgccaagaaggcagtggaaaagcctccacaaactgagcacatcgaattatag

SEQ ID NO: 28664 - DNA, 1707 bp, Artificial Sequence
  derived and/or modified sequence
atgtggctcagagccttcatcctggctacgctgagcgccagcgcagcctgggcgggacacccgtcctccccgccagttgttgacacggttcatggaaaggtgcttggtaagttcgtgtccctggagggcttcgcccaaccggtcgctatatttctcggaatcccgttcgcaaaacctccgctaggccctcttagatttactcccccacagcccgctgaaccttggtcgtttgtcaagaatgctacaagctaccctcccatgtgcacgcaggaccccaaagcaggccagctactctcagagctgttcacaaacagaaaggagaatatccccttaaagctctctgaagattgcttgtacctaaacatttatacacctgccgatctcaccaagaagaaccgccttccggtgatggtctggattcacggcggaggcctgatggttggagccgctagcacttacgacggcctggctctagcggctcacgaaaacgtcgtggtagtgaccatccaataccgtctcggcatctggggatttttttcaaccggcgacgagcattctcgcggaaattgggggcacttagaccaggtggccgctctccggtgggtacaagacaacatcgcatctttcggcggaaatccaggctctgtgacaatctttggcgaatcggcgggaggcgaatcagtatctgtgctggtcctttcaccactggcaaagaatttattccatagagcgatctcagagagcggcgtggcactgacatccgtgctggtcaagaagggtgatgtgaagccgctggccgagcagatcgccatcacagcagggtgcaagaccaccacatccgctgttatggtgcactgcttgcgccagaaaacagaagaagagctgcttgagaccactctgaaaatgaaattccttagtttggatctgcagggcgatcctcgtgagagccaaccattgctcgggacggttatcgatggaatgctgcttctcaaaactcccgaagagcttcaagccgagcgcaattttcacacagtcccttatatggttgggattaataagcaggagtttggatggctgatccctatgcagctgatgagctatccactgagtgaaggacagttagatcagaaaacagctatgagcctgctgtggaaaagctacccactagtgtgtatcgcaaaggaactgataccagaggcgaccgagaagtatttagggggaactgacgacaccgtcaagaagaaggacctgtttctggaccttatcgccgatgtcatgttcggcgtcccgtccgtgatagtggccagaaaccatcgggacgccggtgccccaacctacatgtacgagttccagtacaggccatcatttagctccgacatgaagccaaagacagtgatcggcgaccatggcgatgagctgttttcagttttcggggcacccttcttgaaggaaggagcttcagaagaggagattaggttaagcaaaatggtgatgaagttttgggccaactttgcccgaaatgggaatcctaatggcgaaggactgccccattggcctgagtacaatcagaaagagggttatctgcagattggcgcaaacactcaggcagcacagaaattaaaagataaagaagtcgctttctggactaatctctttgctaaaaaagccgtggagaagcctcctcagaccgagcacatcgaactatag

SEQ ID NO: 28665 - DNA, 2010 bp, Artificial Sequence
  derived and/or modified sequence
agcgcagggcggtaactctgggcggggctgggctccagggctggacagcacagtccctctgaactgcacagagacctcgcaggccccgagaactgtcgcccttccacgatgtggctccgtgcctttatcctggccactctctctgcttccgcggcttgggcagggcatccgtcctcgccacctgtggtggacaccgtgcatggcaaagtgctggggaagttcgtcagcttagaaggatttgcacagcctgtggccattttcctgggaatcccttttgccaagccgcctcttggacccctgaggtttactccaccgcagcctgcagaaccatggagctttgtgaagaatgccacctcgtaccctcctatgtgcacccaagatcccaaggcggggcagttactctcagagctatttacaaaccgaaaggagaacattcctctcaagctttctgaagactgtctttacctcaatatttacactcctgctgacttgaccaagaaaaacaggctgccggtgatggtgtggatccacggaggggggctgatggtgggtgcggcatcaacctatgatgggctggcccttgctgcccatgaaaacgtggtggtggtgaccattcaatatcgcctgggcatctggggattcttcagcacaggggatgaacacagccgggggaactggggtcacctggaccaggtggctgccctgcgctgggtccaggacaacattgccagctttggagggaacccaggctctgtgaccatctttggagagtcagcgggaggagaaagtgtctctgttcttgttttgtctccattggccaagaacctcttccaccgggccatttctgagagtggcgtggccctcacttctgttctggtgaagaaaggtgatgtcaagcccttggctgagcaaattgctatcactgctgggtgcaaaaccaccacctctgctgtcatggttcactgcctgcgacagaagacggaagaggagctcttggagacgacattgaaaatgaaattcttatctctggacttacagggagaccccagagagagtcaaccccttctgggcactgtgattgatgggatgctgctgctgaaaacacctgaagagcttcaagctgaaaggaatttccacactgtcccctacatggtcggaattaacaagcaggagtttggctggttgattccaatgcagttgatgagctatccactctccgaagggcaactggaccagaagacagccatgtcactcctgtggaagtcctatccccttgtttgcattgctaaggaactgattccagaagccactgagaaatacttaggaggaacagacgacactgtcaaaaagaaagacctgttcctggacttgatagcagatgtgatgtttggtgtcccatctgtgattgtggcccggaaccacagagatgctggagcacccacctacatgtatgagtttcagtaccgtccaagcttctcatcagacatgaaacccaagacggtgataggagaccacggggatgagctcttctccgtctttggggccccatttttaaaagagggtgcctcagaagaggagatcagacttagcaagatggtgatgaaattctgggccaactttgctcgcaatggaaaccccaatggggaagggctgccccactggccagagtacaaccagaaggaagggtatctgcagattggtgccaacacccaggcggcccagaagctgaaggacaaagaagtagctttctggaccaacctctttgccaagaaggcagtggagaagccaccccagacagaacacatagagctgtgaatgaagatccagccggccttgggagcctggaggagcaaagactggggtcttttgcgaaagggattgcaggttcagaaggcatcttaccatggctggggaattgtctggtggtggggggcaggggacagaggccatgaaggagcaagttttgtatttgtgacctcagctttgggaataaaggatcttttgaaggcc

SEQ ID NO: 28666 - DNA, 1707 bp, Artificial Sequence
  derived and/or modified sequence
atgtggctgagagccttcatcctggccaccctgagcgccagcgccgcctgggccggccaccccagcagcccccccgtggtggacaccgtgcacggcaaggtgctgggcaagttcgtgagcctggagggcttcgcccagcccgtggccatcttcctgggcatccccttcgccaagccccccctgggccccctgagattcacccccccccagcccgccgagccctggagcttcgtgaagaacgccaccagctacccccccatgtgcacccaggaccccaaggccggccagctgctgagcgagctgttcaccaacagaaaggagaacatccccctgaagctgagcgaggactgcctgtacctgaacatctacacccccgccgacctgaccaagaagaacagactgcccgtgatggtgtggatccacggcggcggcctgatggtgggcgccgccagcacctacgacggcctggccctggccgcccacgagaacgtggtggtggtgaccatccagtacagactgggcatctggggcttcttcagcaccggcgacgagcacagcagaggcaactggggccacctggaccaggtggccgccctgagatgggtgcaggacaacatcgccagcttcggcggcaaccccggcagcgtgaccatcttcggcgagagcgccggcggcgagagcgtgagcgtgctggtgctgagccccctggccaagaacctgttccacagagccatcagcgagagcggcgtggccctgaccagcgtgctggtgaagaagggcgacgtgaagcccctggccgagcagatcgccatcaccgccggctgcaagaccaccaccagcgccgtgatggtgcactgcctgagacagaagaccgaggaggagctgctggagaccaccctgaagatgaagttcctgagcctggacctgcagggcgaccccagagagagccagcccctgctgggcaccgtgatcgacggcatgctgctgctgaagacccccgaggagctgcaggccgagagaaacttccacaccgtgccctacatggtgggcatcaacaagcaggagttcggctggctgatccccatgcagctgatgagctaccccctgagcgagggccagctggaccagaagaccgccatgagcctgctgtggaagagctaccccctggtgtgcatcgccaaggagctgatccccgaggccaccgagaagtacctgggcggcaccgacgacaccgtgaagaagaaggacctgttcctggacctgatcgccgacgtgatgttcggcgtgcccagcgtgatcgtggccagaaaccacagagacgccggcgcccccacctacatgtacgagttccagtacagacccagcttcagcagcgacatgaagcccaagaccgtgatcggcgaccacggcgacgagctgttcagcgtgttcggcgcccccttcctgaaggagggcgccagcgaggaggagatcagactgagcaagatggtgatgaagttctgggccaacttcgccagaaacggcaaccccaacggcgagggcctgccccactggcccgagtacaaccagaaggagggctacctgcagatcggcgccaacacccaggccgcccagaagctgaaggacaaggaggtggccttctggaccaacctgttcgccaagaaggccgtggagaagcccccccagaccgagcacatcgagctgtag

SEQ ID NO: 28667 - protein, 263 aa, Artificial Sequence
  derived and/or modified sequence
MAFLWLLSCWALLGTTFGCGVPAIHPVLSGLSRIVNGEDAVPGSWPWQVSLQDKTGFHFCGGSLISEDWVVTAAHCGVRTSDVVVAGEFDQGSDEENIQVLKIAKVFKNPKFSILTVNNDITLLKLATPARFSQTVSAVCLPSADDDFPAGTLCATTGWGKTKYNANKTPDKLQQAALPLLSNAECKKSWGRRITDVMICAGASGVSSCMGDSGGPLVCQKDGAWTLVGIVSWGSRTCSTTTPAVYARVAKLIPWVQKILAAN

SEQ ID NO: 28668 - DNA, 792 bp, Artificial Sequence
  derived and/or modified sequence
atggcttttctttggctgctgagctgctgggcattactcggcactactttcggctgtggtgtgcctgctatccatcctgtactatccggcctgtcccgaatcgtgaatggcgaggacgccgtgccaggttcctggccctggcaggtgtctcttcaagacaagactggatttcatttttgtgggggatccttgatcagcgaggactgggttgtgacagccgcacattgcggcgtgaggacaagcgatgtcgtggtagccggagagtttgaccagggttcagacgaggagaacattcaggtcctgaagatcgccaaagtctttaagaacccaaaatttagcattctgacagtcaacaatgacattaccctgttgaaacttgctacacccgctcgattctctcagaccgtatcagctgtttgtctgccgtctgcagatgacgacttccctgctgggactctgtgcgccacaactgggtggggtaaaaccaagtacaacgctaacaagacccctgataaattgcaacaggcggctctgccccttctgtcaaacgcggaatgcaagaaatcctggggaaggaggattacagatgtgatgatttgtgcgggtgcgtccggcgtttccagttgcatgggagattctgggggtcccctcgtttgccagaaggacggcgcttggacattagttggtatcgtgagctggggttcccgcacatgctccaccactacccctgccgtgtatgcccgagttgccaagcttattccttgggtgcagaaaatactcgccgcaaactag

SEQ ID NO: 28669 - DNA, 792 bp, Artificial Sequence
  derived and/or modified sequence
atggcattcttatggcttctgtcctgttgggctctgctgggtacaacattcggctgcggagtgcctgccatccatccagtactctccggcttgtcccgtatcgtgaacggagaagacgctgtgccaggatcttggccatggcaggttagcctccaggacaaaacagggtttcacttctgcggcgggtcactaatcagcgaggattgggtggtgacagcagcacattgcggagttagaactagcgatgtggtcgtcgccggcgagttcgaccagggttccgatgaagaaaatatacaggtgctcaagatcgccaaagtctttaaaaatccaaagttctctatactcactgtgaataacgacatcactctactcaagttagcaactcccgcacgattctctcagaccgtatccgccgtgtgtctgcccagtgctgatgatgacttccctgctggaactttatgtgctacaaccggatggggaaaaacaaagtacaatgccaacaaaacacccgacaagctccaacaagcggctctacccctcctgagtaatgccgaatgcaagaaatcgtggggtaggcgcataactgacgtgatgatttgcgccggagcttcaggggtatcttcgtgtatgggcgacagtggcggcccattagtgtgtcagaaagacggggcatggacactcgtcggcattgtgtcttggggttctaggacttgcagtacaactacaccggctgtgtatgcccgcgtggcaaagctgatcccatgggtgcagaagatcttagcagcaaattag

SEQ ID NO: 28670 - DNA, 792 bp, Artificial Sequence
  derived and/or modified sequence
atggcattcttatggcttctgtcctgttgggctctgctgggtacaacattcggctgcggagtgcctgccatccatccagtactctccggcttgtcccgtatcgtgaacggagaagacgctgtgccaggatcttggccatggcaggttagcctccaggacaaaacagggtttcacttctgcggcgggtcactaatcagcgaggattgggtggtgacagcagcacattgcggagttagaactagcgatgtggtcgtcgccggcgagttcgaccagggttccgatgaagaaaatatacaggtgttaaaaattgcaaaggtctttaagaatcccaaattctccatattaactgttaacaatgacattaccttattgaagttagccacgcccgcaagattttctcaaacagtttctgccgtgtgcctcccaagcgcagacgatgactttcctgcaggcacactgtgcgccactaccggatgggggaaaacaaaatacaatgccaataagacacccgacaagttacagcaagccgctctgcctttgttgagtaacgccgagtgcaagaaatcatggggcagacgaataacagatgtgatgatctgcgccggcgcatctggtgtgtcttcttgtatgggcgattcaggtggtccactggtgtgtcagaaagacggcgcttggacacttgttggcatcgtgtcatggggcagtagaacatgcagtaccactactccagctgtgtacgcccgggtcgccaaattgattccatgggtgcaaaaaatattggcagctaattag

SEQ ID NO: 28671 - DNA, 792 bp, Artificial Sequence
  derived and/or modified sequence
atggccttcctgtggctgctgagctgctgggccctgctgggcaccaccttcggctgcggcgtgcccgccatccaccccgtgctgagcggcctgagcagaatcgtgaacggcgaggacgccgtgcccggcagctggccctggcaggtgagcctgcaggacaagaccggcttccacttctgcggcggcagcctgatcagcgaggactgggtggtgaccgccgcccactgcggcgtgagaaccagcgacgtggtggtggccggcgagttcgaccagggcagcgacgaggagaacatccaggtgctgaagatcgccaaggtgttcaagaaccccaagttcagcatcctgaccgtgaacaacgacatcaccctgctgaagctggccacccccgccagattcagccagaccgtgagcgccgtgtgcctgcccagcgccgacgacgacttccccgccggcaccctgtgcgccaccaccggctggggcaagaccaagtacaacgccaacaagacccccgacaagctgcagcaggccgccctgcccctgctgagcaacgccgagtgcaagaagagctggggcagaagaatcaccgacgtgatgatctgcgccggcgccagcggcgtgagcagctgcatgggcgacagcggcggccccctggtgtgccagaaggacggcgcctggaccctggtgggcatcgtgagctggggcagcagaacctgcagcaccaccacccccgccgtgtacgccagagtggccaagctgatcccctgggtgcagaagatcctggccgccaactag

SEQ ID NO: 28672 - DNA, 875 bp, Artificial Sequence
  derived and/or modified sequence
acccctgccagcggcaccatggctttcctctggctcctctcctgctgggccctcctgggtaccaccttcggctgcggggtccccgccatccaccctgtgctcagcggcctgtccaggatcgtgaatggggaggacgccgtccccggctcctggccctggcaggtgtccctgcaggacaaaaccggcttccacttctgcgggggctccctcatcagcgaggactgggtggtcaccgctgcccactgcggggtcaggacctccgacgtggtcgtggctggggagtttgaccagggctctgacgaggagaacatccaggtcctgaagatcgccaaggtcttcaagaaccccaagttcagcattctgaccgtgaacaatgacatcaccctgctgaagctggccacacctgcccgcttctcccagacagtgtccgccgtgtgcctgcccagcgccgacgacgacttccccgcggggacactgtgtgccaccacaggctggggcaagaccaagtacaacgccaacaagacccctgacaagctgcagcaggcagccctgcccctcctgtccaatgccgaatgcaagaagtcctggggcaggaggatcaccgacgtgatgatctgtgccggggccagtggcgtctcctcctgcatgggtgactctggaggccccctggtctgccagaaggacggagcctggaccctggtgggcattgtgtcctggggcagccgcacctgctctaccaccacgcccgctgtgtacgcccgtgtcgccaagctcataccctgggtgcagaagatcctggccgccaactgagcccgcagctcctgccacccctgccttaagatttcccattaaatgcatctgtttagaagccctga

SEQ ID NO: 28673 - DNA, 792 bp, Artificial Sequence
  derived and/or modified sequence
atggcattcctgtggctgttgagctgctgggccctgctgggtacaaccttcggatgtggtgtgccagctatccatcccgtgctgagcggcctgtcccgaattgtgaatggagaggacgccgtccctgggtcatggccatggcaggtttcgctgcaggataaaacaggattccatttttgcggagggagtcttatttctgaagactgggtcgtgactgcagcgcactgcggcgtccgaacctctgacgtggttgtcgctggggagtttgaccagggctctgatgaggagaatatacaagttctgaaaattgcgaaggttttcaaaaatcccaagtttagcatcctgaccgttaacaatgatattacactgctgaaactcgctactccagcgagatttagccaaactgtgagtgcagtctgcctgccatcagccgacgacgactttccagccgggacactctgcgcaacgaccgggtgggggaagacgaaatacaatgctaataaaaccccggacaaactgcagcaggccgctcttccccttttgtctaacgcagagtgcaaaaagagttggggaagacggataacagacgtgatgatctgcgccggagccagcggggtgtcctcttgcatgggtgactctggtgggccactcgtgtgccagaaggatggagcttggacgctggtggggattgtatcttggggttctaggacgtgcagtacaactacaccagcggtgtacgcacgggtggcgaagttaattccctgggttcagaagattctcgcagccaactag

SEQ ID NO: 28674 - DNA, 792 bp, Artificial Sequence
  derived and/or modified sequence
atggccttcctgtggctgctgagctgctgggccctgctgggcaccaccttcggctgcggcgtgcctgccatccaccctgtgctgagcggcctgagccgcatcgtgaatggagaagatgctgtgcccggctcctggccctggcaggtgtccctgcaggacaagacaggcttccacttctgtggcggcagcctcatcagcgaggactgggtggtgacagctgcccactgcggcgtgaggaccagtgatgtggtggtggccggggagtttgaccagggcagtgatgaggagaacatccaggtgctgaagatcgccaaggtgttcaagaaccccaagttcagcatcctgactgtgaacaatgacatcaccctgctgaagctggccaccccagcccgcttcagccagacagtgtctgctgtgtgcctgcccagcgcagatgatgacttccctgctggcaccctgtgtgccaccaccggctggggcaagaccaagtacaatgccaacaagaccccagacaagctgcagcaggccgccctgcccctgctgagcaatgctgagtgcaagaagtcctggggccgccgcatcacagatgtgatgatctgtgccggggccagcggcgtgagcagctgcatgggagacagcggcggccccctggtgtgccagaaggatggagcctggaccctggtgggcatcgtgtcctggggcagcaggacctgcagcaccaccaccccagctgtgtatgcccgggtggccaagctgatcccctgggtgcagaagatcctggccgccaactag

SEQ ID NO: 28675 - DNA, 792 bp, Artificial Sequence
  derived and/or modified sequence
atggccttcctgtggctgctgagctgctgggccctgctgggcaccacttttggctgcggagtcccagccatccaccccgtcctgtcgggacttagtcggattgtcaatggcgaagacgcagtgccggggtcctggccctggcaagtgtccctgcaggataaaaccggattccatttctgcggggggtccctgatttctgaagattgggtggttacagcggctcattgcggcgtccggacttccgacgtggtggtggcaggggagttcgaccagggcagcgacgaagaaaacatccaagtgctcaagatcgcaaaggtgtttaagaatcctaaattttctattttgacagtgaacaatgacattacactgctaaaacttgctacacctgcacgcttttcccaaacggtcagcgcagtgtgcctgcccagtgcagatgacgattttccagccggcaccctgtgtgccacaactggctggggcaaaacaaagtacaacgcaaataagactcctgacaagttgcagcaggccgctctgcccctactgagtaatgccgagtgcaagaagagttggggaagaagaattaccgacgtcatgatttgtgcgggcgcgagtggagtgtcctcttgcatgggagactctggagggcctctggtgtgtcaaaaagacggggcctggaccctcgtgggaatcgtaagttgggggagccggacctgctcaactacgactccggccgtgtatgcccgcgtggccaagcttattccgtgggttcagaaaatcctggccgccaactag

SEQ ID NO: 28676 - RNA, 792 nt, Artificial Sequence
  derived and/or modified sequence
auggcauucuuauggcuucuguccuguugggcucugcuggguacaacauucggcugcggagugccugccauccauccaguacucuccggcuugucccguaucgugaacggagaagacgcugugccaggaucuuggccauggcagguuagccuccaggacaaaacaggguuucacuucugcggcgggucacuaaucagcgaggauuggguggugacagcagcacauugcggaguuagaacuagcgauguggucgucgccggcgaguucgaccaggguuccgaugaagaaaauauacaggugcucaagaucgccaaagucuuuaaaaauccaaaguucucuauacucacugugaauaacgacaucacucuacucaaguuagcaacucccgcacgauucucucagaccguauccgccgugugucugcccagugcugaugaugacuucccugcuggaacuuuaugugcuacaaccggauggggaaaaacaaaguacaaugccaacaaaacacccgacaagcuccaacaagcggcucuaccccuccugaguaaugccgaaugcaagaaaucgugggguaggcgcauaacugacgugaugauuugcgccggagcuucagggguaucuucguguaugggcgacaguggcggcccauuagugugucagaaagacggggcauggacacucgucggcauugugucuugggguucuaggacuugcaguacaacuacaccggcuguguaugcccgcguggcaaagcugaucccaugggugcagaagaucuuagcagcaaauuag

SEQ ID NO: 28677 - RNA, 792 nt, Artificial Sequence
  derived and/or modified sequence
auggcauucuuauggcuucuguccuguugggcucugcuggguacaacauucggcugcggagugccugccauccauccaguacucuccggcuugucccguaucgugaacggagaagacgcugugccaggaucuuggccauggcagguuagccuccaggacaaaacaggguuucacuucugcggcgggucacuaaucagcgaggauuggguggugacagcagcacauugcggaguuagaacuagcgauguggucgucgccggcgaguucgaccaggguuccgaugaagaaaauauacagguguuaaaaauugcaaaggucuuuaagaaucccaaauucuccauauuaacuguuaacaaugacauuaccuuauugaaguuagccacgcccgcaagauuuucucaaacaguuucugccgugugccucccaagcgcagacgaugacuuuccugcaggcacacugugcgccacuaccggaugggggaaaacaaaauacaaugccaauaagacacccgacaaguuacagcaagccgcucugccuuuguugaguaacgccgagugcaagaaaucauggggcagacgaauaacagaugugaugaucugcgccggcgcaucuggugugucuucuuguaugggcgauucaggugguccacuggugugucagaaagacggcgcuuggacacuuguuggcaucgugucauggggcaguagaacaugcaguaccacuacuccagcuguguacgcccgggucgccaaauugauuccaugggugcaaaaaauauuggcagcuaauuag

SEQ ID NO: 28678 - protein, 433 aa, Artificial Sequence
  derived and/or modified sequence
MALTLFDTDEYRPPVWKSYLYQLQQEAPHPRRITCTCEVENRPKYYGREFHGMISREAADQLLIVAEGSYLIRESQRQPGTYTLALRFGSQTRNFRLYYDGKHFVGEKRFESIHDLVTDGLITLYIETKAAEYIAKMTINPIYEHVGYTTLNREPAYKKHMPVLKETHDERDSTGQDGVSEKRVHTFRGPHWCEYCANFMWGLIAQGVKCADCGLNVHKQCSKMVPNDCKPDLKHVKKVYSCDLTTLVKAHTTKRPMVVDMCIREIESRGLNSEGLYRVSGFSDLIEDVKMAFDRDGEKADISVNMYEDINIITGALKLYFRDLPIPLITYDAYPKFIESAKIMDPDEQLETLHEALKLLPPAHCETLRYLMAHLKRVTLHEKENLMNAENLGIVFGPTLMRSPELDAMAALNDIRYQRLVVELLIKNEDILF

SEQ ID NO: 28679 - DNA, 1302 bp, Artificial Sequence
  derived and/or modified sequence
atggcactgactctgtttgatacagatgaatacaggccccctgtctggaaatcctacctctaccagctccaacaagaggctcctcacccaaggcggattacgtgtacctgcgaggtggaaaataggccgaaatactacggcagggagtttcatggcatgatttcgcgcgaggctgccgaccagctgcttatagttgcagaaggctcctatctaattcgcgagagtcagcgacaacctgggacctacacattggctctgcgattcggttctcaaactcggaacttccgtctctattacgatggcaaacacttcgtaggcgaaaagcggttcgagtcaatccacgatttggtaacagacggtctgataactttgtatattgagaccaaagccgctgaatatatcgcaaagatgacaatcaatcccatatacgagcacgttgggtatacgactctcaaccgcgaaccagcctataagaaacacatgcccgtactcaaggaaacccacgacgagcgcgatagcacaggtcaagacggtgtgtcagaaaaaagagtgcacactttcaggggaccccattggtgtgagtattgtgccaatttcatgtggggcttaatcgcacagggcgtgaagtgcgccgattgcgggctgaacgtccacaagcagtgttcaaaaatggtgccaaacgactgtaagcccgaccttaagcatgtgaaaaaggtctattcttgcgaccttacaacactggtcaaagcacacacaaccaagaggcccatggttgttgacatgtgtatcagagaaattgagtcacgcggcctgaattcagagggattgtacagggtctcaggtttctccgatctgatcgaggacgtaaagatggccttcgatcgcgacggggaaaaagcagacattagtgtcaacatgtacgaggacattaatatcataaccggagccctgaaactatactttagggacctgcccatccccctgatcacatatgacgcgtacccaaagttcatcgaaagcgccaagatcatggatcccgacgaacagttagagaccctgcacgaggctttaaaattgctgccccccgctcactgcgagacattacggtatttgatggcacacttgaagcgcgttaccctccacgaaaaggaaaacctgatgaacgctgagaacctggggattgtgtttggaccaacactcatgagaagtccagagctggacgccatggcggctttgaatgacattagataccagcgcctcgtcgtcgagctcctgattaagaatgaagacatcctgttctag

SEQ ID NO: 28680 - DNA, 1302 bp, Artificial Sequence
  derived and/or modified sequence
atggccctgaccctgtttgacacagatgagtacagacctcctgtgtggaagagctacctgtaccagctgcagcaggaggccccccacccccggcgcatcacctgcacctgtgaggtggagaaccggcccaagtactacggccgggagttccacggcatgatcagccgggaggccgctgaccagctgctgattgtggccgagggcagctacctgatccgggagagccagaggcagcccggcacctacaccctggccctgcgcttcggcagccagaccaggaacttccggctgtactatgatggcaagcactttgtgggggagaagagatttgagagcatccatgacctggtgacagatggcctcatcaccctgtacatcgagaccaaggctgctgagtacatcgccaagatgaccatcaaccccatctatgaacatgtgggctacaccaccctgaaccgggagcccgcctacaagaagcacatgcctgtgctgaaggagacccatgatgagcgggacagcacaggccaggatggagtgtctgagaagagggtgcacaccttccggggcccccactggtgtgagtactgtgccaacttcatgtggggcctcatcgcccagggcgtgaagtgtgccgactgtggcctgaatgtgcacaagcagtgcagcaagatggtgcccaatgactgcaagccagacctgaagcacgtgaagaaggtgtacagctgtgacctgaccaccctggtgaaggcccacaccaccaagaggcccatggtggtggacatgtgcatccgggagattgagagccggggcctgaacagcgagggcctgtacagagtgtctggcttcagtgacctgattgaagatgtgaagatggcctttgacagagatggagagaaggctgacatctctgtgaacatgtatgaggacatcaacatcatcaccggggccctgaagctgtacttccgggacctgcccatccccctcatcacctatgatgcctaccccaagttcatcgagagcgccaagatcatggaccctgatgagcagctggagaccctgcacgaggccctgaagctgctgcccccagcccactgtgagaccctgcgctacctgatggcccacctgaagagggtgaccctgcacgagaaggagaacctgatgaatgctgagaacctgggcatcgtgtttggccccaccctgatgaggagccctgagctggatgccatggccgccctgaatgacatccgctaccagaggctggtggtggagctgctgatcaagaatgaagacatcctcttctag

SEQ ID NO: 28681 - DNA, 1302 bp, Artificial Sequence
  derived and/or modified sequence
atggccctgaccctgttcgacaccgacgagtaccggccccccgtgtggaaaagctatctttatcagcttcagcaggaggctccccacccccggcgcataacctgtacatgcgaagttgagaatcgaccaaagtattacggacgcgagttccacggaatgatctctagggaagctgctgaccagctgctgatagttgcagaagggtcttatctaatccgtgagagtcagagacaacccggcacttatactctggctctcaggttcgggtcccaaacccggaactttcggctctactatgatgggaagcatttcgttggggaaaagaggtttgaatcgattcatgacctggtgaccgatgggctgatcaccctgtacattgaaaccaaagctgcggagtacatcgccaagatgacgatcaatccaatatacgaacacgttgggtatacaacattgaatcgcgagcctgcttacaaaaagcatatgcccgtcctaaaggagacgcatgatgagagggactctacgggtcaggacggggtgtctgagaagagggtccacacctttcgcgggcctcattggtgtgagtattgtgccaactttatgtggggactgatcgcccagggtgtaaaatgtgccgactgcggattaaatgtccacaaacagtgttctaagatggttccgaacgattgcaagcctgacttgaagcacgtaaagaaagtgtactcttgtgatctgaccacattggttaaggctcatacaactaagcgccccatggtcgtagacatgtgtatcagagagatcgagtcaagggggctaaattccgaaggcttgtaccgagttagtgggttctctgacctaatcgaagatgtgaagatggccttcgacagggatggtgaaaaggccgatatctctgtcaacatgtatgaggatatcaatatcattaccggcgccctcaagttgtacttcagggatttgccaatacctctgatcacctacgacgcttacccaaagtttatagagtctgcaaaaataatggatcccgacgagcagcttgagactttgcacgaggcgcttaaacttctcccccccgctcactgtgaaaccctgagatatctgatggcccacctcaagagagtcactttacacgaaaaagaaaacctgatgaacgcagaaaatttgggaatcgtattcgggccgactctcatgcggtctccagagctggatgccatggcagcactgaacgatatacgttaccagaggttggtagtggaactgctcatcaagaatgaggatatcctgttctag

SEQ ID NO: 28682 - DNA, 1302 bp, Artificial Sequence
  derived and/or modified sequence
atggcattaaccctttttgataccgacgaatatcgccctccagtgtggaagagttacctgtaccagctgcaacaggaggctcctcatcctcggagaataacgtgcacctgcgaagtcgagaacagaccgaagtattatggcagagagtttcatgggatgatatctcgtgaagcagcagaccaacttctgatcgtggccgaagggtcatatctcattagagaatcacagaggcagcccggtacttataccctggctctgcgtttcggcagccagacgaggaattttcgcctctattatgatggcaagcacttcgtgggcgaaaagaggtttgagtctatccacgatctcgtgactgatggcctaattaccctctatatagagacaaaggcagccgaatacatcgctaagatgactatcaaccccatttatgaacatgtgggctacactaccttgaacagagagcccgcatataagaagcacatgcctgtgctcaaagagactcacgacgaaagggacagtaccgggcaggacggcgtatcagagaaacgggtgcataccttcagaggccctcactggtgcgagtactgcgccaatttcatgtgggggctgatcgcccaaggcgttaaatgcgcagactgtggcctcaacgtgcacaagcagtgtagcaagatggtgcctaacgattgtaagcctgacctgaaacatgtgaagaaagtgtactcttgcgatttgacaaccctggtgaaagcccacactacgaagcgacctatggtggtcgatatgtgtataagagaaattgagtctaggggactcaatagtgagggactgtaccgcgtttctggcttttctgatttgatcgaagatgtcaagatggcatttgatagagatggcgaaaaggcagatatttcggtgaacatgtatgaagacatcaacatcatcaccggcgcactgaaactctacttcagagaccttccaattcccctgattacatacgacgcctatcctaagttcatagagagtgccaaaatcatggatcccgacgaacagctggagaccctgcacgaagcattgaagcttttacctcctgcccattgtgagacactgcgctatctaatggcccacctcaagagagtcaccttacacgagaaggagaatttgatgaacgccgagaacctcggcattgttttcggcccaacgctaatgagaagccctgagcttgacgcgatggccgcactaaacgacatcaggtatcaaaggctggtggtcgaactgttgatcaagaacgaggacattctgttttag

SEQ ID NO: 28683 - DNA, 1761 bp, Artificial Sequence
  derived and/or modified sequence
atcgcaagatggcgtctgcgaggccgcgggatgcggagtgagcgcgccccgccgggggctgtgcgaggctgctgctgctctccccgtcgccgccgccgccgccgccagtgcggcgccgcctctccgccagccactgcgccgcggccaagcctcctgcctcgcagcggtcccccgcgtcccggcctgcagcctccccgggcgccggcgcccccagcacgccccatcgggcaccccactctctccgaggtgtgggtgcggcgggctgatgaggtgatccctagcccgcctgggaggagcgcctggactcgcgggcggcggcgagcgcctttacaatggccctgaccctgtttgatacagatgaatatagacctcctgtttggaaatcttacttatatcagctacaacaggaagcccctcatcctcgaagaattacctgtacttgcgaggtggaaaacagaccaaagtattatggaagagagtttcatggcatgatctccagagaagcagccgaccagctcttgattgtggctgaggggagctacctcatccgggagagccagcggcagccagggacctacactttggctttaagatttggaagtcaaaccagaaacttcaggctctactacgatggcaagcactttgttggggagaaacgctttgagtccatccacgatctggtgactgatggcttgattactctctatattgaaaccaaggcagcagaatacattgccaagatgacgataaacccaatttatgagcacgtaggatacacaaccttaaacagagagccagcatacaaaaaacatatgccagtcctgaaagagacacatgatgagagagattctacaggccaggatggggtgtcagagaaaagggtgcatacattcagagggccacactggtgtgaatactgtgccaactttatgtggggtctcattgctcagggagtgaaatgtgcagattgtggtttgaatgttcataagcagtgttccaagatggtcccaaatgactgtaagccagacttgaagcatgtcaaaaaggtgtacagctgtgaccttacgacgctcgtgaaagcacataccactaagcggccaatggtggtagacatgtgcatcagggagattgagtctagaggtcttaattctgaaggactataccgagtatcaggatttagtgacctaattgaagatgtcaagatggctttcgacagagatggtgagaaggcagatatttctgtgaacatgtatgaagatatcaacattatcactggtgcacttaaactgtacttcagggatttgccaattccactcattacatatgatgcctaccctaagtttatagaatctgccaaaattatggatccggatgagcaattggaaacccttcatgaagcactgaaactactgccacctgctcactgcgaaaccctccggtacctcatggcacatctaaagagagtgaccctccacgaaaaggagaatcttatgaatgcagagaaccttggaatcgtctttggacccacccttatgagatctccagaactagacgccatggctgcattgaatgatatacggtatcagagactggtggtggagctgcttatcaaaaacgaagacattttattttaaatttttaatttgaggggaaaagaaatgttttacagatgaaggaatgttttatagtaatttaatttgctcctgtagctgcattatttcttgattagaggtttgggcatataaccagattaaagtgaag

SEQ ID NO: 28684 - DNA, 1302 bp, Artificial Sequence
  derived and/or modified sequence
atggccctgaccctgttcgacaccgacgagtacagaccccccgtgtggaagagctacctgtaccagctgcagcaggaggccccccaccccagaagaatcacctgcacctgcgaggtggagaacagacccaagtactacggcagagagttccacggcatgatcagcagagaggccgccgaccagctgctgatcgtggccgagggcagctacctgatcagagagagccagagacagcccggcacctacaccctggccctgagattcggcagccagaccagaaacttcagactgtactacgacggcaagcacttcgtgggcgagaagagattcgagagcatccacgacctggtgaccgacggcctgatcaccctgtacatcgagaccaaggccgccgagtacatcgccaagatgaccatcaaccccatctacgagcacgtgggctacaccaccctgaacagagagcccgcctacaagaagcacatgcccgtgctgaaggagacccacgacgagagagacagcaccggccaggacggcgtgagcgagaagagagtgcacaccttcagaggcccccactggtgcgagtactgcgccaacttcatgtggggcctgatcgcccagggcgtgaagtgcgccgactgcggcctgaacgtgcacaagcagtgcagcaagatggtgcccaacgactgcaagcccgacctgaagcacgtgaagaaggtgtacagctgcgacctgaccaccctggtgaaggcccacaccaccaagagacccatggtggtggacatgtgcatcagagagatcgagagcagaggcctgaacagcgagggcctgtacagagtgagcggcttcagcgacctgatcgaggacgtgaagatggccttcgacagagacggcgagaaggccgacatcagcgtgaacatgtacgaggacatcaacatcatcaccggcgccctgaagctgtacttcagagacctgcccatccccctgatcacctacgacgcctaccccaagttcatcgagagcgccaagatcatggaccccgacgagcagctggagaccctgcacgaggccctgaagctgctgccccccgcccactgcgagaccctgagatacctgatggcccacctgaagagagtgaccctgcacgagaaggagaacctgatgaacgccgagaacctgggcatcgtgttcggccccaccctgatgagaagccccgagctggacgccatggccgccctgaacgacatcagataccagagactggtggtggagctgctgatcaagaacgaggacatcctgttctag

SEQ ID NO: 28685 - DNA, 504 bp, Artificial Sequence
  derived and/or modified sequence
atgcaggagcactacgacgagttcttcgaggaggtgttcaccgagatggaggagaagtacggcgaggtggaggagatgaacgtgtgcgacaacctgggcgaccacctggtgggcaacgtgtacgtgaagttcagaagagaggaggacgccgagaaggccgtgatcgacctgaacaacagatggttcaacggccagcccatccacgccgagctgagccccgtgaccgacttcagagaggcctgctgcagacagtacgagatgggcgagtgcaccagaggcggcttctgcaacttcatgcacctgaagcccatcagcagagagctgagaagagagctgtacggcagaagaagaaagaagcacagaagcagaagcagaagcagagagagaagaagcagaagcagagacagaggcagaggcggcggcggcggcggcggcggcggcggcggcggcagagagagagacagaagaagaagcagagacagagagagaagcggcagattctag

SEQ ID NO: 28686 - DNA, 504 bp, Artificial Sequence
  derived and/or modified sequence
atgcaggagcactacgatgagttcttcgaggaggtcttcactgagatggaggagaagtatggcgaagttgaggaaatgaacgtatgcgacaacttaggtgaccatcttgtaggaaacgtgtatgtcaagttcaggagagaagaggacgcagagaaggcggtgattgatctgaacaacaggtggttcaatggccagcccatccacgccgagctctctcctgttaccgattttcgggaagcctgctgcagacagtacgagatgggtgaatgcaccagaggcggattctgcaactttatgcacctaaagcctatctctcgtgagttacggcgagagctgtatggacggaggagaaagaaacatcggagtaggtcgaggagcagggaaaggcgcagcagaagcagagacagagggcgcgggggcggcggtggaggcgggggaggcggaggcggaagagagcgcgatcggaggaggtcaagagatagggaacgttcaggtaggttttag

SEQ ID NO: 28687 - DNA, 504 bp, Artificial Sequence
  derived and/or modified sequence
atgcaggaacattatgacgagttttttgaggaagtcttcacagagatggaggagaaatatggagaggtcgaggagatgaacgtctgtgataatttgggggatcacctggtgggcaacgtgtacgtcaagttccgcagggaggaggatgcggaaaaggcagtgatcgacctgaataatcgctggttcaatggccagcccatccacgcggagctcagtccagtgacagatttccgcgaggcatgctgtcggcaatatgaaatgggggaatgcacacgcggcggtttctgcaactttatgcatctgaaacccatttcgcgggaactcaggcgtgagctctacgggagaaggaggaagaaacatagatcccgttcccggtccagggagcggaggtcccggtcccgtgatagaggtcgcggcggcggaggcggcgggggcggtgggggaggagggagagaacgagaccgccggcgctcccgagatcgcgaacgatctggcagattctag

SEQ ID NO: 28688 - DNA, 504 bp, Artificial Sequence
  derived and/or modified sequence
atgcaggagcactatgatgagttctttgaggaggtgttcacagagatggaggagaagtacggggaggtggaggagatgaatgtgtgtgacaacctgggggaccacctggtgggcaatgtgtatgtgaagttcagaagagaggaggatgctgagaaggctgtgattgacctgaacaaccgctggttcaacggccagcccatccatgctgagctgagccctgtgacagacttccgggaggcctgctgccggcagtatgagatgggagaatgtacccggggcggcttctgcaacttcatgcacctgaagcccatcagccgggagctgcggcgggagctgtatggaagaagaaggaagaagcacaggagccgcagccgcagccgggagaggaggagccgcagccgggaccggggccggggcggcggcggcggcggcggcggcggcggcggcggccgggagcgggacagaagaagaagccgggaccgggagaggagcggccgcttctag

SEQ ID NO: 28689 - DNA, 504 bp, Artificial Sequence
  derived and/or modified sequence
atgcaggagcactacgacgagttcttcgaggaggtgttcaccgagatggaagaaaaatatggcgaggtggaagaaatgaacgtctgtgacaaccttggcgatcatctggtgggtaacgtgtatgtgaaattcagacgggaagaagatgcggagaaggccgtgatagatctgaataatagatggtttaacggccagccaatacacgctgaactgtctcctgttactgattttagagaggcttgctgcagacagtatgaaatgggggagtgcacacgtggcggcttctgtaacttcatgcatctgaaacccatttcccgcgagctgcgcagggagctctacgggcggcgccggaagaagcatcggtccagaagtcggtcgcgggaaaggagaagcaggagtcgggatcggggtaggggcgggggcgggggcgggggcggaggaggcggaggtcgcgagcgggacaggcgcagaagtcgcgacagagagcgctccggccgtttctag

SEQ ID NO: 28690 - DNA, 504 bp, Artificial Sequence
  derived and/or modified sequence
atgcaggagcactacgacgagttcttcgaggaggtgttcaccgagatggaagagaagtacggtgaggtggaggaaatgaacgtgtgcgacaatctaggggaccacctcgtcgggaacgtatatgtgaagttccgacgggaggaagatgctgaaaaggccgtgatcgacctgaataatcggtggtttaatgggcagcccattcatgccgaactctcccctgtgaccgacttccgcgaggcttgctgtcgtcagtatgaaatgggagagtgtactcgagggggattttgcaatttcatgcacctgaaacctatatcaagggagctacggcgcgagttgtacggaagaaggcgcaaaaagcatagaagtcgatctagaagcagggagagacggagcaggagcagggacagggggcgcggtggcggggggggaggcggggggggcggcggcgggagagagcgagaccggagacggtcccgggacagggagcggtcaggtagattctag

SEQ ID NO: 28691 - DNA, 504 bp, Artificial Sequence
  derived and/or modified sequence
atgcaggagcattacgacgaattctttgaggaggtctttacagaaatggaggaaaagtatggggaagttgaagagatgaatgtatgcgataatctgggcgaccatctagtgggcaatgtgtatgtaaagtttcggagagaggaggatgctgaaaaggctgtgattgatttaaacaatcgctggttcaacggccagccaattcacgctgaactgtcaccagttactgacttccgcgaggcatgttgccggcagtatgagatgggagaatgtactcggggtggcttctgtaacttcatgcacttgaaaccaatttctagggagttaaggagagaactgtatggccgacggcgtaagaaacatcgatccagaagtcggtctcgagagcgcagaagcaggagcagagaccggggaaggggcggtggaggaggtggcggaggcggaggtgggggacgtgagcgggaccggagaaggtcacgcgaccgcgagcgatcaggccgattctag

SEQ ID NO: 28692 - DNA, 504 bp, Artificial Sequence
  derived and/or modified sequence
atgcaagaacactatgacgaattcttcgaggaggtgttcacagagatggaagagaaatacggtgaagtggaggagatgaacgtttgtgacaacctgggggatcatctggtcggtaacgtgtacgttaagttcaggcgcgaagaggacgctgagaaagccgtcatcgacttaaacaaccggtggtttaatggccaaccaatccacgccgagcttagccctgtcactgatttcagagaggcatgctgtaggcagtatgaaatgggggaatgtactagagggggattttgcaacttcatgcatctcaagccaatctccagggaattaagacgcgagctgtatggcaggagaaggaaaaagcaccgctcacgctcccggtcccgcgagagaagatcccggtctagagatagaggacgtggcggtgggggtggaggtggcggaggaggcggaggacgcgaacgagatagacggcgatcaagagaccgagaaagatcaggccgtttctag

SEQ ID NO: 28693 - protein, 433 aa, Artificial Sequence
  derived and/or modified sequence
MIGGLFIYNHKGEVLISRVYRDDIGRNAVDAFRVNVIHARQQVRSPVTNIARTSFFHVKRSNIWLAAVTKQNVNAAMVFEFLYKMCDVMAAYFGKISEENIKNNFVLIYELLDEILDFGYPQNSETGALKTFITQQGIKSQTKEEQSQITSQVTGQIGWRREGIKYRRNELFLDVLESVNLLMSPQGQVLSAHVSGRVVMKSYLSGMPECKFGMNDKIVIEKQGKGTADETSKSGKQSIAIDDCTFHQCVRLSKFDSERSISFIPPDGEFELMRYRTTKDIILPFRVIPLVREVGRTKLEVKVVIKSNFKPSLLAQKIEVRIPTPLNTSGVQVICMKGKAKYKASENAIVWKIKRMAGMKESQISAEIELLPTNDKKKWARPPISMNFEVPFAPSGLKVRYLKVFEPKLNYSDHDVIKWVRYIGRSGIYETRC

SEQ ID NO: 28694 - protein, 420 aa, Artificial Sequence
  derived and/or modified sequence
MIGGLFIYNHKGEVLISRVYRDDIGRNAVDAFRVNVIHARQQVRSPVTNIWLAAVTKQNVNAAMVFEFLYKMCDVMAAYFGKISEENIKNNFVLIYELLDEILDFGYPQNSETGALKTFITQQGIKSQTKEEQSQITSQVTGQIGWRREGIKYRRNELFLDVLESVNLLMSPQGQVLSAHVSGRVVMKSYLSGMPECKFGMNDKIVIEKQGKGTADETSKSGKQSIAIDDCTFHQCVRLSKFDSERSISFIPPDGEFELMRYRTTKDIILPFRVIPLVREVGRTKLEVKVVIKSNFKPSLLAQKIEVRIPTPLNTSGVQVICMKGKAKYKASENAIVWKIKRMAGMKESQISAEIELLPTNDKKKWARPPISMNFEVPFAPSGLKVRYLKVFEPKLNYSDHDVIKWVRYIGRSGIYETRC

SEQ ID NO: 28695 - DNA, 1302 bp, Artificial Sequence
  derived and/or modified sequence
atgatcggcggcttgttcatctacaatcacaaaggtgaagttctgatttcccgggtatacagggacgatatcgggcgaaacgccgttgacgcttttcgagtcaatgttatccacgctaggcaacaggtgagaagcccggttacaaacatagcccggacctccttcttccacgtcaaacgtagcaatatctggctcgccgcagtaaccaagcagaacgtcaacgctgccatggtgtttgaattcttgtataagatgtgcgacgttatggccgcttacttcgggaagatatccgaagagaacatcaaaaataattttgttctgatctatgaactgctggacgagatccttgactttggctacccccaaaactccgaaactggcgcccttaagacattcattacccagcagggcatcaagagccagaccaaggaagagcaatcacagatcacctcgcaggtgaccgggcagatcggctggaggagggaaggaataaagtacagacggaatgagctgttcctggacgtgctggagtctgtgaacttgttaatgtctccacaaggacaagttctgtccgcccacgtgtccgggagggttgtaatgaaaagctatctatcaggtatgccagagtgtaaattcggcatgaacgacaagatagtcatagagaagcaaggtaagggcaccgctgatgagactagcaaatctggcaagcagtcaatcgccattgacgactgcacgttccatcagtgcgtgaggctgtccaagttcgactccgaacgctcgatatcctttatccctccagacggggaattcgagttgatgcgctaccgcacaaccaaagacatcattctccctttcagggtgattccacttgtacgggaagttgggcggaccaagctcgaggtgaaagttgtgattaaaagcaattttaaacccagtttgcttgctcagaaaattgaggtccggattccaaccccgttaaacaccagcggtgtgcaggtcatctgtatgaaaggaaaggccaagtacaaggccagtgaaaacgctattgtatggaagatcaagcgcatggcaggcatgaaagagtcccaaatatcagcggaaatcgagttgctccccacgaatgacaagaaaaagtgggcaaggcctcccattagcatgaattttgaggtgccatttgctccctctggactgaaagtgcgctacctgaaggtgttcgagccgaagctgaattattccgaccacgacgttattaagtgggtgcgctatattgggaggagcggaatttacgagacccgttgctag

SEQ ID NO: 28696 - DNA, 1302 bp, Artificial Sequence
  derived and/or modified sequence
atgatcggggggctgttcatctacaatcacaaaggcgaagtgctgatctctagggtctaccgcgacgacattgggcgcaacgccgtggatgctttccgcgtcaatgtaattcatgctaggcagcaggtgcgttcccctgtgaccaatattgcccggacttctttctttcacgtgaagaggagcaacatctggctcgcagccgtgacaaagcagaatgtaaatgccgctatggtgtttgaattcttgtataaaatgtgcgatgtgatggctgcatactttggaaagatctccgaggagaatataaagaacaactttgttttgatctacgaacttttagatgaaattctggactttggctacccgcagaattctgaaaccggagccctcaaaacattcatcactcagcaaggtatcaaatcacaaaccaaagaagagcagtcccaaatcacctctcaggtcactggtcagattggttggcggcgggagggcatcaaatataggagaaacgagttattcctggatgttctagagtccgtcaatttactgatgtctccccaagggcaagtcctgagtgcccatgtctcaggccgagttgtaatgaagagctatctgagcggaatgcccgagtgtaagtttggcatgaacgacaagatagtgatagagaaacaaggtaaaggcactgctgatgagactagcaaatcaggcaagcagtctattgccatcgacgactgcaccttccaccaatgtgttagattgtctaaatttgactcggaacgctccattagctttattccccccgacggtgaatttgagctgatgaggtacaggacgacaaaagatatcatcctaccctttcgggtgattcctctggtgagggaagtgggtcgcacaaagctggaggtgaaggttgtgattaagagcaattttaagccttccttgctcgcgcagaagatagaggtccggatacccactccgctcaatacttccggagtacaggttatttgtatgaagggcaaggcgaaatataaagcaagtgaaaatgcaatagtctggaagatcaagaggatggcagggatgaaagagtctcagatcagcgccgagattgagcttcttcccaccaatgacaagaaaaagtgggccagaccaccaatcagcatgaactttgaggtgccttttgcccctagcgggctgaaggtgcggtacctcaaagtcttcgaaccaaagttgaattacagtgatcacgacgtgatcaaatgggtgcgctatattggaagatccggaatctatgagacgcgatgctag

SEQ ID NO: 28697 - DNA, 342 bp, Artificial Sequence
  derived and/or modified sequence
atgataggcggcctgttcatctacaatcataagggggaggttctgatcagtagagtgtaccgcgacgatattgggcggaacgccgtggacgcgttcagagtgaatgtgatccacgccagacagcaagtgaggtctcccgttacaaatatagcaagaacgagctttttccacgttaagagatcaaatatatggctcgccgcagtgactaaacagaacgtcaacgcagcaatggtgttcgaattcctctacaagatgtgcgacgtgatggcagcttatttcggtaagatctctgaggagaacatcaagaacaactttgtcctgatatatgagcttctcgactag

SEQ ID NO: 28698 - DNA, 1263 bp, Artificial Sequence
  derived and/or modified sequence
atgataggtggactttttatatataatcataaaggcgaggtcctcattagtcgtgtctacagagatgatatcgggcgaaacgctgtggacgctttcagggttaacgtgatccacgcccggcagcaggtcagatcaccagtgacaaacatctggctagccgctgtcaccaaacaaaatgtgaacgccgcaatggtgttcgagttcctttataaaatgtgtgatgtgatggcagcctatttcggcaagataagcgaagagaatatcaagaacaatttcgtgctaatttacgagttactggacgagattttggattttgggtacccccagaactctgaaacaggcgcgttgaaaacctttattacccaacagggaattaagtcccagaccaaggaggagcagtctcagatcacttcccaggtgaccggccagattggctggcggagggagggaatcaaatacaggagaaatgagctcttcctcgatgtcctcgagtcagtgaacctgctcatgtctcctcagggccaggtgctaagcgcccatgttagcggccgcgtggtgatgaagtcttatctcagcggaatgcccgagtgcaagttcgggatgaacgacaaaatcgtgattgagaagcaagggaagggcaccgccgacgagactagcaagtccgggaaacagtctattgctattgatgattgtacattccaccagtgcgtgcgcctgagcaaattcgactcagagcggtcgatctcattcattccccctgatggcgaatttgaactaatgcggtatagaaccacgaaagatattatcttaccttttcgtgtgataccgcttgtccgagaagtcggccggactaagctcgaagttaaagttgtgatcaaaagtaacttcaaaccatctcttctcgcacagaaaattgaggtcaggatcccaacacctcttaacacgagcggggtccaagtcatctgcatgaaagggaaggctaaatacaaggcgtccgaaaatgccatagtgtggaaaatcaagcggatggcagggatgaaggaatcgcaaatcagcgctgaaatagaactgctcccaacaaatgacaagaagaaatgggcccggcctcctatcagcatgaactttgaagtacctttcgctcccagcggactcaaggttaggtatctcaaagtgttcgagccgaaactaaattactctgatcacgacgttatcaaatgggtaagatatatcggacggagcgggatatatgaaactcgatgctag

SEQ ID NO: 28699 - DNA, 2091 bp, Artificial Sequence
  derived and/or modified sequence
cttcctgaggcgggggcggtttctcgaaggcagtcggtagttgtagttttgctaaacctagagcgcttcaaattgcaagcaaggaggccgcgaggcctgacgggatttgtagtcggcgctagacgccggcgcgcacgcgcagccggggccggggcggggcggcggcactgcggtgaaagccgaggcagcgggcagacgagcagggggcgggcggacatcttgggatccggagagtggccgggccggcagagcagggggccgaggacaccaggtctgttctcagagcgatgggccgcggagactgatctgccgccatgattggaggcttattcatctataatcacaagggggaggtgctcatctcccgagtctaccgagatgacatcgggaggaacgcagtggatgcctttcgggtcaatgttatccatgcccggcagcaggtgcgcagccccgtcaccaacattgctcgcaccagcttcttccacgttaagcggtccaacatttggctggcagcagtcaccaagcagaatgtcaacgctgccatggtcttcgaattcctctataagatgtgtgacgtgatggctgcctactttggcaagatcagcgaggaaaacatcaagaacaattttgtgctcatatatgagctgctggatgagattctagactttggctacccacagaattccgagacaggcgcgctgaaaaccttcatcacgcagcagggcatcaagagtcagacaaaagaagagcagtcacagatcaccagccaggtaactgggcagattggctggcggcgagagggtatcaagtatcgtcggaatgagctcttcctggatgtgctggagagtgtgaacctgctcatgtccccacaagggcaggtgctgagtgcccatgtgtcgggccgggtggtgatgaagagctacctgagtggcatgcctgaatgcaagtttgggatgaatgacaagattgttattgaaaagcagggcaaaggcacagctgatgaaacaagcaagagcgggaagcaatcaattgccattgatgactgcaccttccaccagtgtgtgcgactcagcaagtttgactctgaacgcagcatcagctttatcccgccagatggagagtttgagcttatgaggtatcgcacaaccaaggacatcatccttcccttccgggtgatcccgctagtgcgagaagtgggacgcaccaaactggaggtcaaggtggtcatcaagtccaactttaaaccctcactgctggctcagaagatcgaggtgaggatcccaaccccactgaacacaagcggggtgcaggtgatctgcatgaaggggaaggccaagtacaaggccagcgagaatgccatcgtgtggaagatcaagcgcatggcaggcatgaaggaatcgcagatcagcgcagagattgagcttctgcctaccaacgacaagaagaaatgggctcgaccccccatttccatgaactttgaggtgccattcgcgccctctggcctcaaggtgcgctacttgaaggtgtttgaaccgaagctgaactacagcgaccatgatgtcatcaaatgggtgcgctacattggccgcagtggcatttatgaaactcgctgctagctgccactaggcagctagcccacctccccagccaccctcctccacaggtccaggtgccgctccctcccccaccacacatcagtgtctcctccctcctgctttgctgccttccctttgcaccagcccgagtctaggtctgggccaagcacattacaagtgggaccggtggagcagcccctgggctccctgggcaggggagttctgaggctcctgctctcccatccacctgtctgtcctggcctaatgccaggctctgagttctgtgaccaaagccaggtgggttccctttccttcccacccctgtggccacagctctggagtgggagggttggttgcccctcacctcagagctcccccaaaggccagtaatggatccccggcctcagtccctactctgctttgggatagtgtgagcttcattttgtacacgtgtgacttcgtccagttacaaacccaataaactctgtagagtgga

SEQ ID NO: 28700 - DNA, 1950 bp, Artificial Sequence
  derived and/or modified sequence
ggaataaacaggaactggagcctggctgaggggaggggcatgtctgggagggctgcagggtcacttactaaagggttgagtcaggaaagaagctccagtgacctgcacagctccacaggggatgttggcagcgattctgaggtcttcttttaccctgcccccgcctgtcctaggtctgttctcagagcgatgggccgcggagactgatctgccgccatgattggaggcttattcatctataatcacaagggggaggtgctcatctcccgagtctaccgagatgacatcgggaggaacgcagtggatgcctttcgggtcaatgttatccatgcccggcagcaggtgcgcagccccgtcaccaacattgctcgcaccagcttcttccacgttaagcggtccaacatttggctggcagcagtcaccaagcagaatgtcaacgctgccatggtcttcgaattcctctataagatgtgtgacgtgatggctgcctactttggcaagatcagcgaggaaaacatcaagaacaattttgtgctcatatatgagctgctggatgagattctagactttggctacccacagaattccgagacaggcgcgctgaaaaccttcatcacgcagcagggcatcaagagtcagacaaaagaagagcagtcacagatcaccagccaggtaactgggcagattggctggcggcgagagggtatcaagtatcgtcggaatgagctcttcctggatgtgctggagagtgtgaacctgctcatgtccccacaagggcaggtgctgagtgcccatgtgtcgggccgggtggtgatgaagagctacctgagtggcatgcctgaatgcaagtttgggatgaatgacaagattgttattgaaaagcagggcaaaggcacagctgatgaaacaagcaagagcgggaagcaatcaattgccattgatgactgcaccttccaccagtgtgtgcgactcagcaagtttgactctgaacgcagcatcagctttatcccgccagatggagagtttgagcttatgaggtatcgcacaaccaaggacatcatccttcccttccgggtgatcccgctagtgcgagaagtgggacgcaccaaactggaggtcaaggtggtcatcaagtccaactttaaaccctcactgctggctcagaagatcgaggtgaggatcccaaccccactgaacacaagcggggtgcaggtgatctgcatgaaggggaaggccaagtacaaggccagcgagaatgccatcgtgtggaagatcaagcgcatggcaggcatgaaggaatcgcagatcagcgcagagattgagcttctgcctaccaacgacaagaagaaatgggctcgaccccccatttccatgaactttgaggtgccattcgcgccctctggcctcaaggtgcgctacttgaaggtgtttgaaccgaagctgaactacagcgaccatgatgtcatcaaatgggtgcgctacattggccgcagtggcatttatgaaactcgctgctagctgccactaggcagctagcccacctccccagccaccctcctccacaggtccaggtgccgctccctcccccaccacacatcagtgtctcctccctcctgctttgctgccttccctttgcaccagcccgagtctaggtctgggccaagcacattacaagtgggaccggtggagcagcccctgggctccctgggcaggggagttctgaggctcctgctctcccatccacctgtctgtcctggcctaatgccaggctctgagttctgtgaccaaagccaggtgggttccctttccttcccacccctgtggccacagctctggagtgggagggttggttgcccctcacctcagagctcccccaaaggccagtaatggatccccggcctcagtccctactctgctttgggatagtgtgagcttcattttgtacacgtg

SEQ ID NO: 28701 - DNA, 545 bp, Artificial Sequence
  derived and/or modified sequence
gaggacaccaggtgagccggggatctggccttatggcgtggaggaggacgctgcgggtcgtctgcctcgccgcgcagctttgtcctgccctgcactgagctggcggaaagctgcccacacccgggagtggcttcagccttcggacccgggagctagctgacggtctgttctcagagcgatgggccgcggagactgatctgccgccatgattggaggcttattcatctataatcacaagggggaggtgctcatctcccgagtctaccgagatgacatcgggaggaacgcagtggatgcctttcgggtcaatgttatccatgcccggcagcaggtgcgcagccccgtcaccaacattgctcgcaccagcttcttccacgttaagcggtccaacatttggctggcagcagtcaccaagcagaatgtcaacgctgccatggtcttcgaattcctctataagatgtgtgacgtgatggctgcctactttggcaagatcagcgaggaaaacatcaagaacaattttgtgctcatatatgagctgctggatg

SEQ ID NO: 28702 - DNA, 1720 bp, Artificial Sequence
  derived and/or modified sequence
agcgggcagacgagcagggggcgggcggacatcttgggatccggagagtggccgggccggcagagcagggggccgaggacaccaggtctgttctcagagcgatgggccgcggagactgatctgccgccatgattggaggcttattcatctataatcacaagggggaggtgctcatctcccgagtctaccgagatgacatcgggaggaacgcagtggatgcctttcgggtcaatgttatccatgcccggcagcaggtgcgcagccccgtcaccaacatttggctggcagcagtcaccaagcagaatgtcaacgctgccatggtcttcgaattcctctataagatgtgtgacgtgatggctgcctactttggcaagatcagcgaggaaaacatcaagaacaattttgtgctcatatatgagctgctggatgagattctagactttggctacccacagaattccgagacaggcgcgctgaaaaccttcatcacgcagcagggcatcaagagtcagacaaaagaagagcagtcacagatcaccagccaggtaactgggcagattggctggcggcgagagggtatcaagtatcgtcggaatgagctcttcctggatgtgctggagagtgtgaacctgctcatgtccccacaagggcaggtgctgagtgcccatgtgtcgggccgggtggtgatgaagagctacctgagtggcatgcctgaatgcaagtttgggatgaatgacaagattgttattgaaaagcagggcaaaggcacagctgatgaaacaagcaagagcgggaagcaatcaattgccattgatgactgcaccttccaccagtgtgtgcgactcagcaagtttgactctgaacgcagcatcagctttatcccgccagatggagagtttgagcttatgaggtatcgcacaaccaaggacatcatccttcccttccgggtgatcccgctagtgcgagaagtgggacgcaccaaactggaggtcaaggtggtcatcaagtccaactttaaaccctcactgctggctcagaagatcgaggtgaggatcccaaccccactgaacacaagcggggtgcaggtgatctgcatgaaggggaaggccaagtacaaggccagcgagaatgccatcgtgtggaagatcaagcgcatggcaggcatgaaggaatcgcagatcagcgcagagattgagcttctgcctaccaacgacaagaagaaatgggctcgaccccccatttccatgaactttgaggtgccattcgcgccctctggcctcaaggtgcgctacttgaaggtgtttgaaccgaagctgaactacagcgaccatgatgtcatcaaatgggtgcgctacattggccgcagtggcatttatgaaactcgctgctagctgccactaggcagctagcccacctccccagccaccctcctccacaggtccaggtgccgctccctcccccaccacacatcagtgtctcctccctcctgctttgctgccttccctttgcaccagcccgagtctaggtctgggccaagcacattacaagtgggaccggtggagcagcccctgggctccctgggcaggggagttctgaggctcctgctctcccatccacctgtctgtcctggcctaatgccaggctctgagttctgtgaccaaagccaggtgggttccctttccttcccacccctgtggccacagctctggagtgggagggt

SEQ ID NO: 28703 - DNA, 1302 bp, Artificial Sequence
  derived and/or modified sequence
atgattggaggcctcttcatctacaaccacaagggggaggtgctgatcagccgggtgtacagagatgacatcggcagaaatgctgtggatgccttccgggtgaatgtcatccacgcccggcagcaggtgcgcagccctgtgaccaacatcgcccggaccagcttcttccacgtgaagaggagcaacatctggctggccgctgtgaccaagcagaatgtgaatgctgccatggtgtttgagttcctgtacaagatgtgtgatgtgatggccgcctactttgggaagatcagcgaggagaacatcaagaacaactttgtgctgatctatgagctgctggatgagatcctggactttggctacccccagaacagcgagaccggggccctgaagaccttcatcacccagcagggcatcaagagccagaccaaggaggagcagagccagatcaccagccaggtgacaggccagatcggctggaggcgggagggcatcaagtacagaagaaatgaactcttcctggatgtgctggagagcgtgaacctgctgatgagcccccagggccaggtgctgagcgcccacgtgtctggccgggtggtgatgaagagctacctgagcggcatgcctgagtgcaagtttggcatgaatgacaagatcgtcatcgagaagcagggcaaaggaacagcagatgagaccagcaagagcggcaagcagagcatcgccattgatgactgcaccttccaccagtgtgtgcggctgagcaagtttgattctgagaggagcatctccttcatccccccagatggagaatttgagctgatgagataccgcaccaccaaggacatcatcctgcccttccgggtcatccccctggtgcgggaggtgggccgcaccaagctggaggtgaaggtggtgatcaagagcaacttcaagcccagcctgctggcccagaagattgaggtgcgcatccccacccccctgaacaccagcggcgtgcaggtgatctgcatgaagggcaaggccaagtacaaggcctctgaaaatgccatcgtgtggaagatcaagaggatggccggcatgaaggagagccagatctctgctgagattgagctgctgcccaccaatgacaagaagaagtgggcccggccccccatctccatgaactttgaggtgccctttgcccccagcggcctgaaggtgcgctacctgaaggtgtttgagcccaagctgaactacagcgaccatgatgtgatcaagtgggtgcgctacatcggccgcagcggcatctatgagacccgctgctag

SEQ ID NO: 28704 - DNA, 342 bp, Artificial Sequence
  derived and/or modified sequence
atgattggaggcctcttcatctacaaccacaagggggaggtgctgatcagccgggtgtacagagatgacatcggcagaaatgctgtggatgccttccgggtgaatgtcatccacgcccggcagcaggtgcgcagccctgtgaccaacatcgcccggaccagcttcttccacgtgaagaggagcaacatctggctggccgctgtgaccaagcagaatgtgaatgctgccatggtgtttgagttcctgtacaagatgtgtgatgtgatggccgcctactttgggaagatcagcgaggagaacatcaagaacaactttgtgctgatctatgagctgctggactag

SEQ ID NO: 28705 - DNA, 1263 bp, Artificial Sequence
  derived and/or modified sequence
atgattggaggcctcttcatctacaaccacaagggggaggtgctgatcagccgggtgtacagagatgacatcggcagaaatgctgtggatgccttccgggtgaatgtcatccacgcccggcagcaggtgcgcagccctgtgaccaacatctggctggccgctgtgaccaagcagaatgtgaatgctgccatggtgtttgagttcctgtacaagatgtgtgatgtgatggccgcctactttgggaagatcagcgaggagaacatcaagaacaactttgtgctgatctatgagctgctggatgagatcctggactttggctacccccagaacagcgagactggagccctgaagaccttcatcacccagcagggcatcaagagccagaccaaggaggagcagagccagatcaccagccaggtgacaggccagatcggctggaggcgggagggcatcaagtacagaagaaatgagctgttcctggatgtgctggagagcgtgaacctgctgatgagcccccagggccaggtgctgagcgcccacgtgtctggccgggtggtgatgaagagctacctgagcggcatgcctgagtgcaagtttggcatgaatgacaagatcgtgattgagaagcagggcaagggcacagcagatgagaccagcaagagcggcaagcagagcatcgccattgatgactgcaccttccaccagtgtgtgcggctgagcaagtttgacagcgagaggagcatctccttcatccccccagatggagaatttgagctgatgagataccgcaccaccaaggacatcatcctgcccttccgggtcatccccctggtgcgggaggtgggccgcaccaagctggaggtgaaggtggtgatcaagagcaacttcaagcccagcctgctggcccagaagattgaggtgcgcatccccacccccctgaacaccagcggcgtgcaggtgatctgcatgaagggcaaggccaagtacaaggcctctgaaaatgccatcgtgtggaagatcaagaggatggccggcatgaaggagagccagatctctgctgagattgagctgctgcccaccaatgacaagaagaagtgggcccggccccccatctccatgaactttgaggtgccctttgcccccagcggcctgaaggtgcgctacctgaaggtgtttgagcccaagctgaactacagcgaccatgatgtgatcaagtgggtgcgctacatcggccgcagcggcatctatgagacccgctgctag

SEQ ID NO: 28706 - DNA, 1302 bp, Artificial Sequence
  derived and/or modified sequence
atgatcggcggcctgttcatctacaaccacaagggcgaggtgctgatctctcgtgtgtacagggatgacatcggaaggaatgcagtggatgcttttcgggttaacgtcattcatgccagacaacaagtgcgctctccggtaactaacatcgccaggacctcattttttcatgtcaaaaggtctaatatatggctggctgccgtcacgaagcagaatgtgaatgctgcgatggtgttcgagttcctgtacaagatgtgcgatgtaatggccgcctacttcggcaagatttctgaggagaatattaaaaataattttgtattaatatacgagctgcttgacgagatcctggatttcgggtacccacagaattccgagacaggcgcgttgaagacctttatcacacagcaaggcatcaaatcccagacaaaggaggaacagtcacagattacctcccaggtgacaggtcaaatcgggtggaggcgtgaagggattaaatatcgacggaacgagctgtttctcgacgtgctggaatctgtgaatttactcatgagtcctcaagggcaagtcctgagcgcccatgtctccggccgagtggtgatgaaaagttatttgagtggcatgcccgagtgtaagtttggcatgaacgacaagatcgttattgagaaacagggaaaggggacagccgacgaaacgtctaaatccgggaagcagtctatcgctatcgatgactgtacttttcaccagtgtgtgcgccttagcaaattcgacagcgaacgctccataagtttcatccccccggatggcgagtttgagttaatgcgttaccgcaccactaaggacatcatcctgcccttcagagttattccactagtgcgggaggtgggcagaaccaagctggaggtgaaggttgtcattaagtccaatttcaagccttccctgttagcccagaagatcgaggtccgtatccccacccccctcaacacctccggagttcaagtcatatgcatgaagggcaaggccaagtacaaagcctccgaaaacgcgattgtctggaagatcaagcggatggccgggatgaaggagtcacagattagtgcggagatcgagcttctgcccactaatgataaaaagaagtgggctaggccgcccattagtatgaacttcgaggtgccatttgccccaagtggacttaaggtgcggtacttaaaagtctttgagcccaagctcaactacagcgatcacgatgtgattaaatgggttcggtacatcggtagaagcggaatctatgagacacgctgttag

SEQ ID NO: 28707 - DNA, 1302 bp, Artificial Sequence
  derived and/or modified sequence
atgatcggcggcctgttcatctacaaccacaagggcgaggtgctgatcagccgagtgtacagagacgacatcggcagaaatgctgtcgacgcttttcgtgtcaacgtgatacacgcacgacagcaggtcagaagcccagtgacgaatatagcacggacctctttcttccacgtgaaaaggtccaacatctggctggcagcggtaaccaagcagaacgttaatgcagccatggttttcgagttcttgtataaaatgtgtgatgtaatggcagcctacttcggaaagatatccgaggaaaatataaaaaataatttcgtcctcatctacgaattactcgatgaaatcctcgatttcggttacccgcagaatagtgaaactggagcgctgaaaactttcatcacacagcagggcataaagtcacagacgaaagaagagcagtcgcagatcacctcccaggtgaccgggcagattgggtggaggcgcgaagggattaaatataggcgcaacgaattgttcctggacgtcctggagagcgttaacttgttgatgtccccgcagggacaggtcctgagtgcccatgtgagcggccgggtcgtcatgaagtcatacctgtccggtatgccagagtgcaagttcggcatgaacgataagattgtgattgaaaaacaggggaaggggaccgccgatgagacaagtaaaagtggcaaacagtcgatcgccattgatgattgcacattccaccaatgcgttagactttccaaatttgattctgaacgcagtatttccttcattcctcccgacggggagtttgagcttatgaggtacagaaccacaaaggacattatcctgccattccgggttatacccctggtcagagaggtgggcagaacaaaactggaggtgaaggtcgtgatcaagagcaacttcaagccatcgctactcgctcagaagatagaggtgagaatcccgaccccgctgaatacctctggcgtgcaggtgatctgcatgaaagggaaggcaaagtataaggcctccgaaaatgccattgtatggaagattaaaagaatggctggaatgaaagaaagtcagatcagtgcagaaatcgaactgctcccgacaaatgataaaaaaaaatgggcgcggcctcccatctctatgaatttcgaggtaccattcgctccgtcaggacttaaggttcgctaccttaaggtcttcgagcctaaactgaactacagcgatcacgatgtaatcaaatgggtgcgttatattggaaggagcggcatttacgaaacccgctgctag

SEQ ID NO: 28708 - DNA, 342 bp, Artificial Sequence
  derived and/or modified sequence
atgatcggcggcctgttcatctacaaccacaagggcgaggtgctgatcagccgagtgtatcgggacgacattggaaggaatgccgtggacgcatttagggtgaatgtcatacacgcccggcagcaggtgaggtcccccgtcactaacatcgccaggactagcttcttccacgtgaagaggtccaacatctggctggccgctgtgactaagcagaacgtgaatgcagctatggtctttgaattcttatacaagatgtgcgatgttatggccgcctactttggaaagatttccgaggaaaatatcaaaaataacttcgtgctgatctatgaacttctggattag

SEQ ID NO: 28709 - DNA, 1263 bp, Artificial Sequence
  derived and/or modified sequence
atgatcggcggcctgttcatctacaaccacaagggcgaggtgctgatcagtcgtgtttatcgagacgatatcggacgtaacgcggttgatgccttccgcgtcaacgtgattcacgcgagacaacaagtccggagccctgtgactaatatatggctagcagcagtgacaaagcagaatgtcaacgcagccatggtatttgagttcctgtacaagatgtgcgacgtgatggcagcctacttcggaaagatctccgaagagaacatcaaaaataactttgttttaatttatgaactactcgatgagattcttgactttgggtaccctcaaaattctgagaccggcgccctgaaaacctttattactcagcaggggattaagagtcaaaccaaagaggagcaatcgcagattacatcccaagtaactggccagataggctggcgacgagaaggcatcaaatacaggagaaatgagctttttctggatgttcttgaatctgttaatctgctaatgtctccccagggtcaggtattgtccgcccatgtaagcgggagagtcgtgatgaaaagctacctatccgggatgcccgaatgcaagttcggcatgaacgacaagattgtcatcgaaaaacagggtaagggtacggcagatgaaacctcaaaatccggtaaacagtctatcgctatagacgattgtacttttcaccagtgcgttcgtctttctaaatttgacagcgaacgcagcataagcttcattcctcctgacggggaattcgaactcatgcgctatcgtacaacaaaggatatcattttgccctttcgggtgattcccctggtgcgggaagtgggacggaccaaattggaagtcaaagtagtgattaaaagcaacttcaaacctagtctgctggctcagaagatcgaagttagaataccaactcccctgaataccagcggagtgcaggtaatctgcatgaaaggtaaggctaaatataaagcgtccgagaacgctattgtgtggaagatcaaacggatggcggggatgaaggagtcccaaattagcgcagaaatcgagttactgccaactaacgacaagaagaaatgggctagaccccctatcagcatgaacttcgaggtaccctttgcacctagcggcctcaaggttaggtacctgaaagtgttcgaaccaaagctgaattatagcgaccatgacgtgattaaatgggtgaggtatatcgggcggtccggtatctatgagacccgatgttag

SEQ ID NO: 28710 - DNA, 1302 bp, Artificial Sequence
  derived and/or modified sequence
atgattggagggctgttcatttacaaccacaagggtgaggtccttatttcgcgcgtctatcgggacgacattggacggaacgctgtggatgcctttcgagtaaatgtgatccacgcccgtcagcaggtgcggagccccgttacgaatattgcccgtacatctttctttcatgtgaaaagatcaaatatctggctggcagctgttacaaagcagaacgtcaatgcagcaatggtgttcgagtttttgtataaaatgtgtgacgtaatggccgcatacttcggtaaaatcagcgaggaaaatattaaaaataactttgtgttaatctacgagctcctggacgaaatcttggacttcggctacccccagaattctgagaccggagcattgaagaccttcatcacacagcaagggatcaaaagccaaaccaaggaagagcagagccagatcacttcacaggtaacaggtcaaattggttggcgcagggaaggcattaagtaccgccgtaatgagttattcttggatgtgctcgaaagcgtgaacctgttgatgtcgcctcaggggcaggttttatctgcccacgtatcagggagagtcgtgatgaagtcctacctgtccggaatgcctgagtgtaagtttggaatgaacgacaaaatagtcattgaaaaacagggaaagggcacagcagacgagacttcgaagtcaggaaaacaatccatagccattgacgactgcaccttccaccagtgtgtgcggctttcaaaattcgactctgagaggagcatctcattcattcctccagacggcgagtttgaattaatgcggtacaggacaaccaaggatatcatcttacctttccgcgtgatcccgctggtaagggaagtaggcagaacaaagttggaagtgaaagtcgtcatcaagagcaactttaagccaagcctgctggctcaaaagattgaggtgcgaatccccacccccctgaacacctcaggggttcaagtgatctgcatgaaggggaaggcaaagtacaaggcttccgagaacgcaattgtgtggaaaattaagcgaatggccggtatgaaagagagccagatatcggcagagatcgagctgctccctaccaacgataagaaaaagtgggcccgacccccaatctctatgaactttgaggtgccattcgctccgtccgggttgaaggtccggtacctcaaggtgttcgagcctaaactgaattactcagatcacgacgtaattaagtgggttcgatacatcggtcgatccggcatctacgagactcgctgctag

SEQ ID NO: 28711 - DNA, 1302 bp, Artificial Sequence
  derived and/or modified sequence
atgattgggggactgttcatctacaatcataaaggagaagtactaatcagcagggtgtaccgagacgacattggaaggaacgcggtagatgccttcagagtcaacgtgatacatgccaggcaacaggttcgctcccccgtgacaaatatagcccgtacatcttttttccacgtgaagaggagcaacatatggctagccgcagtgacaaagcagaacgtgaacgctgccatggttttcgagtttctctataaaatgtgtgacgttatggctgcctatttcggaaagatctctgaggaaaatatcaaaaataatttcgtcctcatatacgagctgttggacgagatcctggacttcggatacccgcaaaactctgagaccggtgcactcaaaaccttcataacacagcaggggattaagagtcagactaaggaagagcagagtcagatcaccagccaggtcacgggacaaatcggttggcgtcgcgaagggatcaaatacagaaggaatgaactgtttctggatgtcctggaatcagtcaacctgctgatgtcaccacaggggcaggtgctgtcggctcacgtgtcggggagggtagtcatgaagtcgtatctaagcgggatgcccgagtgtaaatttggcatgaatgataaaattgtgatcgaaaagcagggaaaaggcacagctgacgaaacaagcaaaagtggtaaacagtccatcgccatcgacgactgtactttccaccagtgcgtcaggctctccaagttcgattccgagcgttcaatcagtttcataccccctgacggcgaatttgaactcatgagatatcggaccacaaaggacattatactcccgtttagggtcattcctctggttcgggaggtcggccgtaccaagttggaagtaaaggtggtgattaaatctaacttcaaaccaagtcttctggctcagaagatagaagttagaatcccaacacctttaaacacgtccggagtgcaagtgatctgcatgaagggcaaagccaagtataaagcgagcgagaatgccattgtctggaagattaagagaatggcgggtatgaaggaatcacagatctccgcagagatagaactacttccaacaaatgataaaaagaaatgggccaggccacctataagcatgaattttgaagtgccattcgcgccttctgggctcaaggtgaggtacctgaaggtgttcgagcccaagctgaactactcagaccatgacgtgattaaatgggttcgttacattggtcgtagcgggatttatgaaactagatgttag

SEQ ID NO: 28712 - DNA, 342 bp, Artificial Sequence
  derived and/or modified sequence
atgatagggggactatttatatacaaccacaagggcgaggtgcttatcagccgcgtttatcgagacgacatcggtcgcaacgctgttgatgcattccgagtgaatgtgatccacgccagacagcaagtgagatcccccgttacaaacattgccagaactagcttttttcatgtaaaacgctctaacatctggttggcagccgtaacaaaacagaacgtaaacgcagctatggtgtttgaattcttatataaaatgtgtgacgtgatggctgcgtattttggaaaaatcagtgaggagaatattaagaacaactttgtgttgatctacgagctgctcgattag

SEQ ID NO: 28713 - DNA, 1263 bp, Artificial Sequence
  derived and/or modified sequence
atgattgggggtctgtttatttacaaccataagggcgaggtgctgatctctcgcgtgtatcgggatgacattgggcgaaacgctgtggacgcgtttcgtgtgaatgtgatccatgccaggcagcaagtgcggtcgcctgtcaccaacatctggttggccgcagtgaccaagcagaatgtgaacgcagctatggtgttcgaattcctctataagatgtgcgatgtgatggctgcatattttggcaagatttctgaagagaatatcaagaataattttgtcctgatttacgagctgctcgacgaaatactggacttcggataccctcaaaactccgagaccggcgctttaaagacatttatcacgcagcaagggatcaaaagtcagacaaaagaggagcaatctcagataacctcacaggtgaccggtcaaattggttggcggcgagaaggaattaaataccggagaaacgaactgttcctggatgtcctggagtccgtaaatttgctgatgtctccccagggccaagtactaagcgcccacgtgtccggacgggtggtgatgaaatcttatctaagtggcatgcccgaatgcaagttcggtatgaacgacaaaattgttatcgaaaaacagggcaaaggtaccgccgatgaaacgagcaaatctgggaagcaaagcattgccatagacgactgcactttccaccaatgtgtgcgcctgtccaaatttgattcagaaagatctatcagtttcatacctcccgatggtgagttcgagcttatgcgctaccgcactactaaggatattatactgccatttagggtaatccccctcgtgagggaggtaggcaggacgaagctcgaagtgaaagtggtaattaagtcaaactttaaaccttccttgttagcgcagaaaatcgaggtcagaatccccacacctttgaacaccagcggtgtgcaggtcatctgtatgaagggcaaggctaagtacaaagcaagtgagaatgccatcgtgtggaaaatcaaacgtatggctggcatgaaagagtcccagatttcagcagagatcgagttgctgcccacgaacgacaaaaaaaaatgggccagacctcccatcagcatgaatttcgaagtaccattcgccccatcgggtctgaaagttaggtacctcaaagtgtttgagccaaaactaaattattccgatcatgacgtgatcaaatgggttcgctatataggcaggtccgggatttatgagacgcgctgctag

SEQ ID NO: 28714 - DNA, 1302 bp, Artificial Sequence
  derived and/or modified sequence
atgatcggcggcctgttcatctacaaccacaagggcgaggtgctgatcagcagagtgtacagagacgacatcggcagaaacgccgtggacgccttcagagtgaacgtgatccacgccagacagcaggtgagaagccccgtgaccaacatcgccagaaccagcttcttccacgtgaagagaagcaacatctggctggccgccgtgaccaagcagaacgtgaacgccgccatggtgttcgagttcctgtacaagatgtgcgacgtgatggccgcctacttcggcaagatcagcgaggagaacatcaagaacaacttcgtgctgatctacgagctgctggacgagatcctggacttcggctacccccagaacagcgagaccggcgccctgaagaccttcatcacccagcagggcatcaagagccagaccaaggaggagcagagccagatcaccagccaggtgaccggccagatcggctggagaagagagggcatcaagtacagaagaaacgagctgttcctggacgtgctggagagcgtgaacctgctgatgagcccccagggccaggtgctgagcgcccacgtgagcggcagagtggtgatgaagagctacctgagcggcatgcccgagtgcaagttcggcatgaacgacaagatcgtgatcgagaagcagggcaagggcaccgccgacgagaccagcaagagcggcaagcagagcatcgccatcgacgactgcaccttccaccagtgcgtgagactgagcaagttcgacagcgagagaagcatcagcttcatcccccccgacggcgagttcgagctgatgagatacagaaccaccaaggacatcatcctgcccttcagagtgatccccctggtgagagaggtgggcagaaccaagctggaggtgaaggtggtgatcaagagcaacttcaagcccagcctgctggcccagaagatcgaggtgagaatccccacccccctgaacaccagcggcgtgcaggtgatctgcatgaagggcaaggccaagtacaaggccagcgagaacgccatcgtgtggaagatcaagagaatggccggcatgaaggagagccagatcagcgccgagatcgagctgctgcccaccaacgacaagaagaagtgggccagaccccccatcagcatgaacttcgaggtgcccttcgcccccagcggcctgaaggtgagatacctgaaggtgttcgagcccaagctgaactacagcgaccacgacgtgatcaagtgggtgagatacatcggcagaagcggcatctacgagaccagatgctag

SEQ ID NO: 28715 - DNA, 342 bp, Artificial Sequence
  derived and/or modified sequence
atgatcggcggcctgttcatctacaaccacaagggcgaggtgctgatcagcagagtgtacagagacgacatcggcagaaacgccgtggacgccttcagagtgaacgtgatccacgccagacagcaggtgagaagccccgtgaccaacatcgccagaaccagcttcttccacgtgaagagaagcaacatctggctggccgccgtgaccaagcagaacgtgaacgccgccatggtgttcgagttcctgtacaagatgtgcgacgtgatggccgcctacttcggcaagatcagcgaggagaacatcaagaacaacttcgtgctgatctacgagctgctggactag

SEQ ID NO: 28716 - DNA, 1263 bp, Artificial Sequence
  derived and/or modified sequence
atgatcggcggcctgttcatctacaaccacaagggcgaggtgctgatcagcagagtgtacagagacgacatcggcagaaacgccgtggacgccttcagagtgaacgtgatccacgccagacagcaggtgagaagccccgtgaccaacatctggctggccgccgtgaccaagcagaacgtgaacgccgccatggtgttcgagttcctgtacaagatgtgcgacgtgatggccgcctacttcggcaagatcagcgaggagaacatcaagaacaacttcgtgctgatctacgagctgctggacgagatcctggacttcggctacccccagaacagcgagaccggcgccctgaagaccttcatcacccagcagggcatcaagagccagaccaaggaggagcagagccagatcaccagccaggtgaccggccagatcggctggagaagagagggcatcaagtacagaagaaacgagctgttcctggacgtgctggagagcgtgaacctgctgatgagcccccagggccaggtgctgagcgcccacgtgagcggcagagtggtgatgaagagctacctgagcggcatgcccgagtgcaagttcggcatgaacgacaagatcgtgatcgagaagcagggcaagggcaccgccgacgagaccagcaagagcggcaagcagagcatcgccatcgacgactgcaccttccaccagtgcgtgagactgagcaagttcgacagcgagagaagcatcagcttcatcccccccgacggcgagttcgagctgatgagatacagaaccaccaaggacatcatcctgcccttcagagtgatccccctggtgagagaggtgggcagaaccaagctggaggtgaaggtggtgatcaagagcaacttcaagcccagcctgctggcccagaagatcgaggtgagaatccccacccccctgaacaccagcggcgtgcaggtgatctgcatgaagggcaaggccaagtacaaggccagcgagaacgccatcgtgtggaagatcaagagaatggccggcatgaaggagagccagatcagcgccgagatcgagctgctgcccaccaacgacaagaagaagtgggccagaccccccatcagcatgaacttcgaggtgcccttcgcccccagcggcctgaaggtgagatacctgaaggtgttcgagcccaagctgaactacagcgaccacgacgtgatcaagtgggtgagatacatcggcagaagcggcatctacgagaccagatgctag

SEQ ID NO: 28717 - protein, 94 aa, Artificial Sequence
  derived and/or modified sequence
RRLRPRRPRLPRPRPRPRPRPRSLPLPRPKPRPIPRPLPLPRPRPKPIPRPLPLPRPRPRRIPRPLPLPRPRPRPIPRPLPLPQPQPSPIPRPL

SEQ ID NO: 28718 - protein, 55 aa, Artificial Sequence
  derived and/or modified sequence
RRIRPRPPRLPRPRPRPLPFPRPGPRPIPRPLPFPRPGPRPIPRPLPFPRPGPRP

SEQ ID NO: 28719 - protein, 579 aa, Artificial Sequence
  derived and/or modified sequence
MCDQQQIQCRLPLQQCCVKGPSFCSSQSPFAQSQVVVQAPCEMQIVDCPASCPVQVCQVSDQAPCQSQTTQVKCQSKTKQVKGQAQCQSKTTQVKGQAASQSQTSSVQSQAPCQSEVSYVQCEASQPVQTCFVECAPVCYTETCYVECPVQNYVPCPAPQPVQMYRGRPAVCQPQGRFSTQCQYQGSYSSCGPQFQSRATCNNYTPQFQLRPSYSSCFPQYRSRTSFSPCVPQCQTQGSYGSFTEQHRSRSTSRCLPPPRRLQLFPRSCSPPRRFEPCSSSYLPLRPSEGFPNYCTPPRRSEPIYNSRCPRRPISSCSQRRGPKCRIEISSPCCPRQVPPQRCPVEIPPIRRRSQSCGPQPSWGASCPELRPHVEPRPLPSFCPPRRLDQCPESPLQRCPPPAPRPRLRPEPCISLEPRPRPLPRQLSEPCLYPEPLPALRPTPRPVPLPRPGQCEIPEPRPCLQPCEHPEPCPRPEPIPLPAPCPSPEPCRETWRSPSPCWGPNPVPYPGDLGCHESSPHRLDTEAPYCGPSSYNQGQESGAGCGPGDVFPERRGQDGHGDQGNAFAGVKGEAKSAYF

SEQ ID NO: 28720 - DNA, 528 bp, Artificial Sequence
  derived and/or modified sequence
atgaccagacctttacccgagtcaatccgcttgttgaggcacactggcctagtgcctccaacaccggtcccactcggataccctcatcagagcttcgtgtcgcaaccacacccattctcaaagcagccgagtccgtgccctcgccagtcaccgcagggagatttcgggtgggtgtcccctggtgcatcacgaagcattactggcccctcttctccagcagcccccagccttatttcgctgggaagtctcggctcacatttacaaggcgcacgtccccacccaaggcagtcaagtcttggcgacttcggccttgtgactcctggaaccccatgctgtcggttgtgcccccctttattacttccacagggccggcccccctgggtcctgtgcgccggagtatccaaggaattgggccccaatcccgtcctgccatctcccatagtcgaacagcgactcggccacggggctgacatggtaccgccaccagatcaggaggagtggaacgtagtgatgtcccagtccacatag

SEQ ID NO: 28721 - DNA, 528 bp, Artificial Sequence
  derived and/or modified sequence
atgacccgtcccctgcctgaatccattaggctgctccgccacactggactggtcccgccaacgcctgtccccttagggtacccacatcaatcatttgtttctcagccgcaccccttctccaagcagcccagcccttgtcccagacagagccctcagggagactttgggtgggtgtctcccggggctagcaggtccatcacaggccccagttcgcccgccgccccatccctgattagtctgggcagtctagggtcccacctgcagggcgcaaggcctcacccgagacagtctagcctgggagactttggtctcgtcacaccgggcactccctgctgtcggctttgtcccccactgctgctgcctcaaggcaggcccccttgggttctctgcgctggggtctctaaggaactggggccaaatcccgtactgccatccccaattgtcgaacagcggctgggccacggcgcggatatggtgccccccccggatcaggaggaatggaatgtggtaatgagtcagtctacctag

SEQ ID NO: 28722 - DNA, 696 bp, Artificial Sequence
  derived and/or modified sequence
atggccaagtgggtgcctgccctgctgctgcggcgggtgcccctcttcagcctgcgcttccggcctgccagcagcaccttcctgcctgtgctggccgccacagagcctgctgtgtctgtgcccagcggggacctgtccatgcctgtgaagaccagggctgagggggaggatgatggctttggagaggccggggacccccggcggctgctggagcggccctggaggttccggggctgcctgcctggaaaaggaaacagagatgtgggctttgagggcacagagggccccaccagcaccaggcctgagtgggtgtggagctgccgctgctgcctgggctgccgggccagcacccgggagcgggtgaccagccctgtgcgggccgccggcccccagccccgcttcacagaccgggagacagaagctgctgctggcaccctggcccacatgggctttgccccacccaccagcttcagccacttcacagaccaggagctgcgggactgcagcagcctggagtgcctgggcgtggtggagggggacccccacgtgctgtgcagcaccctgagcctgagccggcccagccccagcgccaccctgaccctgctgctggccagcagctgcctgctggccccagcccctccttccttcatcctgctgctcttcaccctcatcgccccagacctgccccacagctag

SEQ ID NO: 28723 - DNA, 528 bp, Artificial Sequence
  derived and/or modified sequence
atgacccggcccctgcccgagagcatccggctgctgcggcacaccgggctggtccctccaacacctgtgcccctcggatatcctcaccagagttttgtttctcagccacacccattctccaaacaaccgtcaccctgtccccgccagtccccccagggagactttggctgggtgagtcctggagcctcccgatccattacaggcccatcaagtcctgccgcacccagtctgatatcactcggctccctgggtagccatttgcagggtgctaggcctcatccacgccagtcaagcctgggagatttcggactggttacaccaggcacaccatgttgcaggctctgtccaccactgttgctcccgcaaggacggcccccctgggtactatgcgcaggcgtctctaaggaattgggccccaatcctgtcctcccatccccaattgtagaacagagactgggtcacggcgctgacatggtacccccacccgaccaggaggagtggaacgtcgtgatgagccagtcaacatag

SEQ ID NO: 28724 - DNA, 528 bp, Artificial Sequence
  derived and/or modified sequence
atgacccggcccctgcccgagagcatccggctgctgcggcacaccgggcttgtcccccctactccagtgcctcttggctatccccaccagagtttcgtctcccagccccaccccttttcaaaacagccttccccctgtccccgtcagtccccgcaaggcgatttcgggtgggtgagccctggagcttctcgaagtatcaccggaccatcatctccagccgctccatcactgatctccctgggatctctgggctcgcacttacaaggagctagaccccacccccgccaatcctctctaggagacttcggactagttacccctgggactccttgctgccgactttgcccaccactgttgcttccacagggcagacctccctgggtgctctgcgctggcgtgtccaaggaactcggcccgaatccagttctgccctccccaatcgtcgagcagagattgggccatggcgccgacatggtaccaccccctgaccaggaagagtggaatgtggtgatgtctcagagtacatag

SEQ ID NO: 28725 - DNA, 528 bp, Artificial Sequence
  derived and/or modified sequence
atgaccagacccctacctgagtcaatcagactactgaggcacactggcctcgtcccaccaactcctgtcccactgggctacccccaccagagttttgtgagccagccccaccctttctcaaaacaaccgagtccttgtcccagacagtccccccaaggcgattttggttgggtgtcccctggggcttcacggtccatcaccggcccttcctcaccggcagctccatctctgatatccctgggttccctggggtcccacctacagggtgcaaggccccacccccgacagagctctctcggagacttcggtttggtgacaccaggtaccccatgctgccgtctctgccccccactgctcctcccccaaggcagacccccatgggtgttgtgtgctggggtcagtaaggaactgggccctaacccagtgctgccaagccccatcgttgaacagagacttggacacggtgccgacatggtgcccccacccgatcaagaggaatggaacgtcgtgatgtcacagagtacttag

SEQ ID NO: 28726 - DNA, 1740 bp, Artificial Sequence
  derived and/or modified sequence
atgtgcgatcagcagcagatccagtgccgattacctttgcagcagtgctgcgtcaaagggcccagcttctgctcgtcccagtccccctttgcccagtcccaggtggtggtacaggctccttgtgagatgcagatagttgactgtcccgcatcctgccctgtacaggtctgccaagtgtctgaccaagcgccctgccagagccagaccacccaggtgaaatgtcagtcaaaaacaaaacaggtaaagggtcaggcacaatgccagtccaagacaacgcaggttaagggtcaggcagcgagccagtctcagacatcgtccgtgcagtcacaggccccatgccagtctgaggtatcctacgtgcagtgcgaagccagtcaacctgtgcagacatgcttcgtggagtgcgcacccgtctgctatacagagacctgttacgtggaatgccccgtgcagaactatgtgccgtgcccggccccacagccagttcaaatgtatcgaggccgcccagcggtctgccagccacaaggcagattctctacacaatgtcagtatcaaggaagctactcatcgtgcggaccacagttccagtcaagggccacgtgcaataactacactccccagtttcagctgcgtccatcttatagcagttgcttcccccagtataggtcaaggacttcattctccccgtgtgttccacagtgtcagacacaaggatcatacggatccttcactgaacagcatcgcagtagatccacatcaagatgcctccctcccccacgtaggctgcagctgtttccccgaagttgctccccccctagaaggtttgagccatgtagttccagttacctgccgttaagaccctccgaaggctttcctaattactgcacaccacctaggcgtagcgagcccatatataatagccgctgtcctcgaagaccaatttccagttgctcccagcgtagaggaccaaagtgtcgcatagaaatcagctctccatgctgcccacgacaggtgcccccccagcgctgccctgtggaaatccctcctatcaggcggcgcagccagtcatgcggccctcaaccttcttggggcgcctcatgtcctgagcttcggccgcatgtggaaccacgacctctaccctcattctgtccacccaggaggctggatcagtgtcccgagagcccactgcaaagatgcccccctccagcaccacggccgcgattaagacccgagccatgcatatccttggaacctcgaccacgccccctgcctcgtcagctcagtgaaccctgcctctacccagaacccttgcctgcactcaggcccaccccaagacctgtgcccctgccacggccaggccagtgtgaaatccccgagccccggccctgtctgcagccttgtgagcaccccgaaccctgtcctcgcccagagcctatccccctgcccgcaccatgtcccagcccggaaccatgtcgagaaacctggcggagtcctagcccatgctggggcccaaatcctgtgccttacccgggggaccttggttgccacgagagctctcctcatagactcgatacagaagccccctactgcggcccaagtagctacaatcaagggcaggaatccggagccgggtgtggacctggcgacgtatttcccgagcggagagggcaggacggccacggcgatcaggggaatgcctttgccggggtaaaaggagaggccaagtcagcctatttctag

SEQ ID NO: 28727 - DNA, 2523 bp, Artificial Sequence
  derived and/or modified sequence
agcctgaaggactgcttgcctgtgaggagggtcactcttgactggctgcatcaggaccatgtgtgaccagcagcagatccagtgccgcctgccgctccaacagtgctgcgtcaagggtccctccttctgctcctctcaatccccctttgcccagagccaagtggtggttcaagccccttgtgagatgcaaattgtggactgccctgcatcatgcccagttcaagtttgccaggtgtcagaccaggctccatgccagtctcagaccacacaggtgaagtgccagtctaagaccaagcaggtgaagggccaggctcaatgtcagtctaagaccacccaggtgaagggccaggctgcatcccaatctcaaacttcctctgttcaaagccaggctccatgccaatctgaggtgtcctacgtgcagtgcgaagcgtcacaacctgttcagacttgcttcgtagaatgtgctccagtttgttatacagaaacttgttatgtagaatgcccagtccagaactatgtaccctgtccagctcctcagcctgtccagatgtatagagggcgtcctgcagtgtgccagcctcagggaagattctccacccagtgccagtatcaaggctcctatagcagttgtggcccccagtttcagtcaagggctacctgcaacaactacaccccccagttccagttgaggccttcctacagcagctgtttccctcagtatcggtcccggacttcatttagtccctgtgtgccccagtgccagacccagggctcctatgggagcttcactgaacagcaccgctctcggagcaccagcagatgccttcctcctcctcggcggctgcagcttttcccccgcagctgttccccaccaagacgttttgagccctgctccagcagctacctgccactaagaccctctgaaggtttccctaactactgcaccccaccccgccgctctgaacccatatataacagtcgctgtcctcgccgccccatttcaagctgctctcagagacgtggccccaagtgccgaatcgagatttcctccccgtgctgccccaggcaggttcccccacagaggtgtcctgttgagattcctcccatcagacgccgctcccagagctgtggcccgcagccctcctggggcgcctcctgccctgagctgaggccacacgtagagccacgtccactcccaagcttctgtccaccacggcgtcttgaccagtgtccagagtcaccactgcagcgatgtccacctcctgctccacgtccacgtctgcgcccagaaccatgcataagtctagaaccacgcccgcgtcctctaccacgacaactttcagaaccttgtttgtatccagaaccacttccagcactacgtccaacaccgcggccagttccccttcctcgcccagggcagtgtgagattccagagccacgtccatgcctgcagccctgtgagcacccagagccttgtccacgaccagagccaattcccctgccggcgccctgcccaagcccggagccctgcagggagacttggcgcagccccagcccatgctggggcccaaatccagttccatacccaggagacctaggctgtcatgagtctagtccacaccgcctagacaccgaagctccctactgtggcccatccagttacaaccaggggcaagagagtggtgctggctgtgggcctggtgatgtgtttccagagcggaggggtcaggatggccatggagaccaaggcaatgcctttgctggagtgaaaggggaagcaaagagtgcttatttttaaaggaaaggtgactgagataaccctctctcctgctctgaaaatgttgttcctcctattccacaatttccagtacgctcttgtttgaatctctccaaagatattcagagactccctattacgaaggtgatgtccaaactcctttgcctatcatccaaagatccacacctgggtctcagatgcctctccagcctcacgtgtcactcctcgcccgtacgcatcctcggctctagccagaccagtctggccactgggcacagcttgggtgttccccaggccatactttagatgtccctgcctccaagcctctgctcactcttccccactctgcctggaccacttctctcctcctccccagcttctgaaatccaccccatctttcagtgcctctcccttggagccttctttgcttgttcccactcacaagaacctgtgccgacttcctagaactcactgcatcccccgcactacttggtaactgcctggtgacatctcttgaattgttatttcactttgcaggcatgtcttccttatctgcccaactaggttgtaaactcccaactgagtggagtcggagaatctctaaatctcagtgtctatcctggggctggctgttgcttagcaaggcttgtgggttggcagcttgaaccatgttctgtcctgatgctcaactgcaggaactgaggtgagaggaggccatgtgacaataaagatcattatgtactcac

SEQ ID NO: 28728 - DNA, 1740 bp, Artificial Sequence
  derived and/or modified sequence
atgtgtgaccagcagcagatccagtgccgcctgcccctgcagcagtgctgcgtgaagggccccagcttctgcagcagccagagcccctttgcccagagccaggtggtggtgcaggccccctgtgagatgcagatcgtggactgcccagccagctgccctgtgcaggtgtgccaggtgtctgaccaggccccctgccagagccagaccacccaggtgaagtgccagagcaagaccaagcaggtgaagggccaggcccagtgccagagcaagaccacccaggtgaagggccaggccgccagccagagccagaccagctctgtgcagagccaggccccctgccagagcgaggtgtcctatgtgcagtgtgaggccagccagcctgtgcagacctgctttgtggagtgtgcccctgtgtgctacacagagacctgctacgtggagtgccctgtgcagaactacgtgccctgcccagccccccagcctgtgcagatgtaccggggccggcctgctgtgtgccagccccagggccgcttcagcacccagtgccagtaccagggcagctacagcagctgtggcccccagttccagagccgggccacctgcaacaactacaccccccagttccagctgcggcccagctacagcagctgcttcccccagtaccgcagcaggaccagcttcagcccctgtgtgccccagtgccagacccagggcagctatggcagcttcacagagcagcacaggagccgcagcaccagccgctgcctgcccccaccccggcggctgcagctgttccccaggagctgcagccccccaagaagatttgagccctgcagcagcagctacctgcccctgcggcccagcgagggcttccccaactactgcaccccaccaagaagaagtgagcccatctacaacagccgctgcccccggcggcccatcagcagctgcagccagaggcggggccccaagtgcagaattgagatcagcagcccctgctgcccccggcaggtgcccccccagcgctgccctgtggagatcccccccatcagaagaagaagccagagctgtggcccccagcccagctggggcgccagctgcccagagctgcggccccacgtggagccccggcccctgcccagcttctgccccccccggcggctggaccagtgcccagagagccccctgcagcgctgccccccaccagccccccggccccggctgcggcctgagccctgcatcagcctggagccccggccccggcccctgccccggcagctgtctgagccctgcctgtacccagagcccctgcctgccctgcggcccacccccaggcctgtgcccctgccccggcccggccagtgtgagatccctgagccccggccctgcctgcagccctgtgagcaccctgagccctgccccaggcctgagcccatccccctgcctgccccctgccccagccctgagccctgccgggagacctggaggagccccagcccctgctggggccccaaccctgtgccctacccaggggacctgggctgccacgagagcagcccccaccggctggacacagaggccccctactgcggccccagcagctacaaccagggccaggagagcggggccggctgcggccctggagatgtgtttcctgagcggcggggccaggacggccacggggaccagggcaatgcctttgctggggtgaagggggaggccaagagcgcctacttctag

SEQ ID NO: 28729 - DNA, 1740 bp, Artificial Sequence
  derived and/or modified sequence
atgtgcgaccagcagcagatccagtgccggctgcccctgcagcagtgctgcgtcaagggcccgtctttctgttccagtcaatccccttttgcccagtcgcaggtggtggtgcaggcaccttgtgagatgcagatcgtggactgtccggcaagctgtcccgtgcaggtgtgccaggtgagcgaccaagccccctgccagtctcaaactacacaggtcaaatgccagagcaagaccaagcaggtgaaaggtcaagctcaatgtcagagcaaaaccacgcaagtaaaaggacaggcggccagccagtcccagacctctagtgtgcaatctcaagccccttgccagtccgaagtgagttatgttcagtgcgaagcatcccaacctgtacagacctgttttgtggagtgtgctccagtctgttataccgaaacttgctacgtggaatgcccagtgcagaactacgttccctgtcccgccccacagccggtgcagatgtatcggggccggcctgccgtgtgtcaaccccagggccgattttcaacccagtgtcagtatcaagggagctacagcagctgcggcccccaatttcagagtagggccacttgcaataactatacgccacagttccagttgagacctagctacagctcatgttttcctcaatatcgctcccgcacctcattcagtccctgcgtcccacagtgtcagacccagggctcatacggcagcttcaccgagcagcaccgatcccggtctacctctaggtgcctgccacctcctcgccgattgcaactatttcctcggtcctgtagcccaccgcgtcgttttgagccatgttcttcctcctacttgccactgagaccatccgaaggcttcccaaactactgtacacctccccggagaagtgagcccatttacaattcgaggtgccccaggaggccaattagctcttgtagtcaaagaaggggccccaaatgccgtatagaaatctcatccccatgctgcccacggcaggtgcccccacagaggtgtcccgtggaaatcccccctattcgccgccgcagccagtcttgcgggcctcagccatcctggggcgcttcttgcccggaactaagaccccatgtcgagcctaggccattgccaagtttctgtccaccgcgccgactcgaccagtgtccggaaagtccgctccagcggtgccctccccccgccccacgaccgcggctgcggccggagccgtgcatcagtctcgagccaagacccaggcctctgcccaggcagctgagtgagccatgcttgtacccggagcctctgccggctctgcgaccaacacccaggccggtgcccctgcctcgaccagggcagtgcgaaatacccgaaccaaggccatgcctacagccctgcgagcacccggagccttgccctcggccggagcctattccgttgccagccccttgtccctcaccggagccgtgcagggagacctggagatctcccagcccctgttggggcccaaatccagtgccgtatcccggggatctaggatgccatgagtcttccccacaccggctggacactgaagctccatactgtggacctagctcctacaaccagggccaggagtctggagctggctgcgggcctggggatgtctttccggaacgcaggggacaggacggacacggagatcaaggcaatgcatttgccggagtaaagggcgaggctaagagtgcctatttttag

SEQ ID NO: 28730 - DNA, 1740 bp, Artificial Sequence
  derived and/or modified sequence
atgtgtgatcagcagcagattcagtgtaggctcccactgcagcagtgttgtgtgaagggaccgagcttctgttcctcccagtccccgttcgctcagtcccaagtcgtggtgcaggccccttgtgagatgcagatagtggattgccccgcttcttgcccggtgcaggtttgccaagtgagtgatcaggccccatgtcagtctcagaccacacaggttaagtgccagagcaagaccaaacaagtcaagggccaggctcagtgtcagagtaagacaactcaggtcaaaggtcaagctgcatcgcagtctcagacctcttctgtacagtcccaagctccctgtcaatccgaggtgtcctacgtgcagtgcgaggcttcgcagcctgttcagacttgcttcgtcgagtgcgccccagtctgttatactgaaacctgctatgtggagtgcccggtgcagaactatgtcccctgtccagctcctcagcctgtccagatgtataggggccgaccagccgtgtgccagccgcagggtcgcttttctactcaatgccagtaccagggctcctactctagttgcgggcctcagtttcagagccgcgcaacctgcaacaactatacccctcagttccagctcaggccatcttatagctcctgcttccctcagtaccgctctcggacaagttttagcccttgcgtgcctcagtgtcagacccaaggctcatatggttctttcaccgagcagcatcggtcccggagcacgagccggtgcctacccccaccccgacgcttgcagttgttccccagatcctgttctccgcctcgtaggtttgaaccctgttcgtcttcttacctgcctctgaggcctagcgagggcttccccaattattgcactccccctcgcaggagtgagccgatttataacagcaggtgcccacggagacccatctcctcttgcagccagcggagaggcccaaaatgtaggatcgaaattagctctccatgttgccctagacaggtgcccccacagagatgccccgtggagattccgccaatcaggcgccgttcgcagtcctgtgggccacagccttcgtggggagccagctgccccgaactgagaccacacgtggagccgaggcccctgccgagcttttgtcctccaaggagattagatcagtgccctgagtctccacttcaacgttgtccacctccagcccctcgccctcgcctgcggcctgagccctgtatcagtttggagcccaggcctcgccctctaccccgtcagctctcggagccctgcctctaccctgaacccctgcccgctctgagaccgaccccacgccctgtgccgttacctcgtcctgggcagtgtgagatccccgagcctcggccatgtctacagccatgtgagcaccccgaaccgtgtccacggcctgagccaatcccacttccggcaccttgcccttctcctgaaccctgtagggagacctggaggagccccagtccctgctgggggccaaatcctgtgccctacccaggtgatctggggtgtcacgaatcttcaccacataggctggatactgaggccccttattgcggaccttcctcatacaatcaagggcaggaatccggtgctgggtgtgggcctggcgacgtctttcccgaacgccgtgggcaggacgggcacggcgaccaggggaatgcctttgctggagtgaagggagaagcaaagtccgcctacttctag

SEQ ID NO: 28731 - DNA, 1740 bp, Artificial Sequence
  derived and/or modified sequence
atgtgcgaccagcagcagatccagtgcagactgcccctgcagcagtgctgcgtgaagggccccagcttctgcagcagccagagccccttcgcccagagccaggtggtggtgcaggccccctgcgagatgcagatcgtggactgccccgccagctgccccgtgcaggtgtgccaggtgagcgaccaggccccctgccagagccagaccacccaggtgaagtgccagagcaagaccaagcaggtgaagggccaggcccagtgccagagcaagaccacccaggtgaagggccaggccgccagccagagccagaccagcagcgtgcagagccaggccccctgccagagcgaggtgagctacgtgcagtgcgaggccagccagcccgtgcagacctgcttcgtggagtgcgcccccgtgtgctacaccgagacctgctacgtggagtgccccgtgcagaactacgtgccctgccccgccccccagcccgtgcagatgtacagaggcagacccgccgtgtgccagccccagggcagattcagcacccagtgccagtaccagggcagctacagcagctgcggcccccagttccagagcagagccacctgcaacaactacaccccccagttccagctgagacccagctacagcagctgcttcccccagtacagaagcagaaccagcttcagcccctgcgtgccccagtgccagacccagggcagctacggcagcttcaccgagcagcacagaagcagaagcaccagcagatgcctgcccccccccagaagactgcagctgttccccagaagctgcagcccccccagaagattcgagccctgcagcagcagctacctgcccctgagacccagcgagggcttccccaactactgcaccccccccagaagaagcgagcccatctacaacagcagatgccccagaagacccatcagcagctgcagccagagaagaggccccaagtgcagaatcgagatcagcagcccctgctgccccagacaggtgcccccccagagatgccccgtggagatcccccccatcagaagaagaagccagagctgcggcccccagcccagctggggcgccagctgccccgagctgagaccccacgtggagcccagacccctgcccagcttctgcccccccagaagactggaccagtgccccgagagccccctgcagagatgccccccccccgcccccagacccagactgagacccgagccctgcatcagcctggagcccagacccagacccctgcccagacagctgagcgagccctgcctgtaccccgagcccctgcccgccctgagacccacccccagacccgtgcccctgcccagacccggccagtgcgagatccccgagcccagaccctgcctgcagccctgcgagcaccccgagccctgccccagacccgagcccatccccctgcccgccccctgccccagccccgagccctgcagagagacctggagaagccccagcccctgctggggccccaaccccgtgccctaccccggcgacctgggctgccacgagagcagcccccacagactggacaccgaggccccctactgcggccccagcagctacaaccagggccaggagagcggcgccggctgcggccccggcgacgtgttccccgagagaagaggccaggacggccacggcgaccagggcaacgccttcgccggcgtgaagggcgaggccaagagcgcctacttctag

SEQ ID NO: 28732 - protein, 121 aa, Artificial Sequence
  derived and/or modified sequence
MFNKCSFHSSIYRPAADNSASSLCAIICFLNLVIECDLETNSEINKLIIYLFSQNNRIRFSKLLLKILFYISIFSYPELMCEQYVTFIKPGIHYGQVSKKHIIYSTFLSKNFKFQLLRVCW

SEQ ID NO: 28733 - DNA, 366 bp, Artificial Sequence
  derived and/or modified sequence
atgttcaacaagtgcagcttccacagcagcatctacagacccgccgccgacaacagcgccagcagcctgtgcgccatcatctgcttcctgaacctggtgatcgagtgcgacctggagaccaacagcgagatcaacaagctgatcatctacctgttcagccagaacaacagaatcagattcagcaagctgctgctgaagatcctgttctacatcagcatcttcagctaccccgagctgatgtgcgagcagtacgtgaccttcatcaagcccggcatccactacggccaggtgagcaagaagcacatcatctacagcaccttcctgagcaagaacttcaagttccagctgctgagagtgtgctggtag

SEQ ID NO: 28734 - DNA, 366 bp, Artificial Sequence
  derived and/or modified sequence
atgttcaacaagtgttcatttcactcttcaatctatcgtcctgccgcggataattctgctagtagcctctgcgcaatcatttgttttttgaaccttgtcattgaatgtgacctcgaaacaaactcggaaattaacaaactgattatatacctgttttcccagaataacaggattcggttcagtaagctgctgctgaaaattctcttctacatttcaatattcagttatccagaactcatgtgcgagcagtacgtgacatttatcaagccaggaatccactacggacaggttagtaagaagcatataatttatagcacattcctgtccaaaaactttaaattccagttgctcagggtctgttggtag

SEQ ID NO: 28735 - DNA, 366 bp, Artificial Sequence
  derived and/or modified sequence
atgttcaacaagtgcagcttccacagcagcatctacagacctgctgctgacaacagcgccagcagcctgtgtgccatcatctgcttcctgaacctggtgattgaatgtgacctggagaccaacagcgagatcaacaagctgatcatctacctgttcagccagaacaaccgcatccgcttcagcaagctgctgctgaagatcctcttctacatcagcatcttctcctacccagagctgatgtgtgagcagtatgtgaccttcatcaagccaggcatccactacggccaggtgtccaagaagcacatcatctacagcaccttcctgagcaagaacttcaagttccagctgctgcgggtgtgctggtag

SEQ ID NO: 28736 - DNA, 3897 bp, Artificial Sequence
  derived and/or modified sequence
gaaggtaaaaaaaagagggaggtctgagaaatagaaatatcagaggaaggaaataaaggagggtgagagtaaattctcttttagcattcagattccacagattccacaaatcacatttctttttttaccaactaaggaaaaataacacttgacctaacatttcattgcagttagctaaaggatgctagaaaaactatgttgcagtggtttgctctaatttcttcaggaatagagaaaagtgacaaaaagatcagagaagagaagaaaggaaactatcagaaaaatacagaattggagtaggatataacatatttgggttgaaggtaaaattttatattgtaatcttaagtatcttgctacttcagtttggtccctggaacagcagcatcagaatctgccgagggcttgttaaaaaggcagaatctcaggtcccatcccagactcactgaatcagaatataaatactgacaagatgccccgggattcatatgcacagtagagctggcgaagttccattgtagcctgtgattgttttctgcaacttagtatttctgagttttcccaaggaagaaaacccaggccttagcttctggcagacttgtgtttctcctttacttactagctgcatgactcatgagcaaggaaatcaaactttatgtgcctgagtttcctcatctataaaatggagactataataatcatctcctaggcttgttttgaggatgttcaacaaatgctcctttcattcctctatttacagacctgccgcagacaattctgctagcagcctttgtgctattatctgttttctaaacttagtaattgagtgtgatctggagactaactctgaaataaataagctgattatttatttattttctcaaaacaacagaatacgatttagcaaattacttcttaagatattattttacatttctatattctcctaccctgagttgatgtgtgagcaatatgtcactttcataaagccaggtatacattatggacaggtaagtaaaaaacatattatttattctacgtttttgtccaaaaattttaaatttcaactgttgcgcgtgtgttggtaatgtaaaacaaactcagtacagtagtattcagtacagtatttaagcccctgtacttaaacatattcctcgtaccaatgaagttacatgaaaagcaaatttgtgtgagatatcgtagatggaagtaaattagtctttatgttccccacaaattgaaatgcatttcaaaaactctgtgtgtgtatgtgtgtgtgtgacagagtgtgtgtgagagagagacagagagatacgctttggttgcctccataagctggctgctatgattaataagaccaagttttctaaagaaaatgagatcataacaaaagccctctttatgactatcttttatcaggggcaaaaaggaaagagacaaaacagcatgaaatgatgagaccaagtgatgaaaattcattcacaatgattgctttcaagagtaatttctcttgggtaattcagcagcctgttactatggctctctggagtgatagctaatgtaaatgaagcctctaaaagtggattatcctgacaagaatatactcagccaataatgcaacagaaatccattcaaagcattcgggaaaaattcaaaagaataaatattctttttttttttttaaagttaatgacctacgatccatttcttccctgactaacaagcagcaagcacttaaaaatatccagccaggatgaaatagaaacccacctgacttgttaatatttttgtttggtcccagggactcagattctaagccaaattctttgaatgatcttggcaaatgtctcgaattatttttgccaacttttctttatcttggaaaaaaagtttcatgaatgggtgtcaaaattgattagttttaaaaacctttcttgcagatacgtatggcaccctaaaactgtattagaaaaaaatttcatatctccaggcctttcattgggtcaggttggcatttcgctgccctttatgtgtgtgacaagtgaaaataaggaaagaaaaaaactcaagtgaagaaaatcagaatctgcgcagcagttcctgggcgtttcagctgcttcccacatcacctgcctcatcaagccccagcatccatctccttgctcatcttacaccctgtgtgcatgacaggcccaccattcatttatcagagcaaaggctctcccactattctggttcacccccctacttagccagatatacaagaatatctgcacggatgacctgcctcacctgggagctcagaggagctcagattccattactatcgcaccaaggacagatctcccagcaagaatgacagaaaagactaactgcccccaaaatctcccttccaaaacacagttctcttaattctcccaagaaaccagaatgtgactgctcacctctctaaggacctgaaaacaactggccatttcagctatttaaatcaactttaaaaaatccaaccgccaaaatattaaaccattttggttggaatgataacataactaacctgctgacagctgcttctgctaggtgcaaaaatggaaaaaaaaatacttctaatcaggtcaaatcactctacctttgggattctaaatttactcatattctcaaagaaatatattcagtcatagtggggaaaataggattattcctttagctcgataagcaaccagaagttcttccttcaaatcttgacatttaatcaatcagaaattgatttttggaaaactgtttcctatgaagctatctctgcctgaaggatttttcttttacaatccagactatagaaggaaattcacaacctggactttcacctccattggtcagagttttactgaccaattcccacctctgccttacacctaacggaagtttatgcctgttttctcttcacataccccaacagttacaaatggttgttattattaagcatcttttattttgtggcctctgattacatggtcccctaaattttgacctaatcacaaaagattggtaaaatttcttaacatattaataatattttgtttatgtgtcaatatcttagcatgtatcaattaagacagaggtcttaacgttctctttttgaaagagaatattaggattcagagatattaagagattctcccaggatcacagttaggtaacagagctggattttagtccaggtctgtctacagctctaacgtatatacaccctttgtataacatgtcacgaattcagcataaagggatcttcagtgatctaagtcaggggtcagcaaccttttctaaaaaggaccaaatagtaatatttcaggctttgtggaccctatggtctctatcataactgttcaaatcaccatgtagtgtaaaaggagccataagcaaaatataaactaacgaatgtggctgttttatgggatttttttttaactctttatttacaaaagcaggtggcagatcagaactcacttatgggccatagttctctgacccctgacctgagaaaatcttatatttatggacaacatttagactgtgacttgccaagtaagaacaagaagctctgtcaactgaaggtcaaggctggagttctgaaagcaaagagctgtctggtgttaatgataagtgaaatagttaaagttagaagatcccagttataagaagcacaaagaataatgaccatagactcctgaacaagaatgtctggacttctggcttaggcactcttgttgtatggtccaggccaagttacctaatctctccaggcctccattttcttatcattaaatgaagataataaaagtattttcctcagagagctgtaagaataaactgagctaacccatgtcaagcacatagaatagg

SEQ ID NO: 28737 - DNA, 366 bp, Artificial Sequence
  derived and/or modified sequence
atgttcaacaagtgcagcttccacagcagcatctaccggcccgccgcagacaacagtgcaagcagcttatgtgcgatcatctgtttcctgaatttggtgattgagtgtgatctggagaccaacagcgaaattaataaattgatcatttaccttttctcacaaaataatagaatacggttctctaaactgttgctgaagatcctgttttatatcagcatattctcatatcctgagctcatgtgcgaacagtatgtcacttttattaagcccggaatccactacggccaagtatctaagaagcacattatctactcgacattcctgagcaagaacttcaagtttcagctgctcagagtgtgctggtag

SEQ ID NO: 28738 - DNA, 366 bp, Artificial Sequence
  derived and/or modified sequence
atgtttaacaaatgctcttttcactccagcatttacagaccggctgctgataactcagcctcatccttatgtgcaattatctgttttttaaacctggtcatcgaatgcgatctggagaccaacagtgagataaataagcttatcatttaccttttctcccagaacaacaggataaggttctctaaactgctcctgaagatcctgttttatatcagcatttttagctatcctgagttgatgtgtgaacaatatgtcacgtttattaagcccggtattcattacggacaggtgtctaaaaagcatatcatctacagcacgtttctcagcaaaaatttcaagtttcagcttctccgcgtgtgctggtag

SEQ ID NO: 28739 - protein, 682 aa, Artificial Sequence
  derived and/or modified sequence
MAGGPGPGEPAAPGAQHFLYEVPPWVMCRFYKVMDALEPADWCQFAALIVRDQTELRLCERSGQRTASVLWPWINRNARVADLVHILTHLQLLRARDIITAWHPPAPLPSPGTTAPRPSSIPAPAEAEAWSPRKLPSSASTFLSPAFPGSQTHSGPELGLVPSPASLWPPPPSPAPSSTKPGPESSVSLLQGARPFPFCWPLCEISRGTHNFSEELKIGEGGFGCVYRAVMRNTVYAVKRLKENADLEWTAVKQSFLTEVEQLSRFRHPNIVDFAGYCAQNGFYCLVYGFLPNGSLEDRLHCQTQACPPLSWPQRLDILLGTARAIQFLHQDSPSLIHGDIKSSNVLLDERLTPKLGDFGLARFSRFAGSSPSQSSMVARTQTVRGTLAYLPEEYIKTGRLAVDTDTFSFGVVVLETLAGQRAVKTHGARTKYLKDLVEEEAEEAGVALRSTQSTLQAGLAADAWAAPIAMQIYKKHLDPRPGPCPPELGLGLGQLACCCLHRRAKRRPPMTQENSYVSSTGRAHSGAAPWQPLAAPSGASAQAAEQLQRGPNQPVESDESLGGLSAALRSWHLTPSCPLDPAPLREAGCPQGDTAGESSWGSGPGSRPTAVEGLALGSSASSSSEPPQIIINPARQKMVQKLALYEDGALDSLQLLSSSSLPGLGLEQDRQGPEESDEFQS

SEQ ID NO: 28740 - DNA, 2049 bp, Artificial Sequence
  derived and/or modified sequence
atggccggcggccccggccccggcgagcccgccgcccccggcgcccagcacttcctgtacgaggtgcccccctgggtgatgtgcagattctacaaggtgatggacgccctggagcccgccgactggtgccagttcgccgccctgatcgtgagagaccagaccgagctgagactgtgcgagagaagcggccagagaaccgccagcgtgctgtggccctggatcaacagaaacgccagagtggccgacctggtgcacatcctgacccacctgcagctgctgagagccagagacatcatcaccgcctggcacccccccgcccccctgcccagccccggcaccaccgcccccagacccagcagcatccccgcccccgccgaggccgaggcctggagccccagaaagctgcccagcagcgccagcaccttcctgagccccgccttccccggcagccagacccacagcggccccgagctgggcctggtgcccagccccgccagcctgtggccccccccccccagccccgcccccagcagcaccaagcccggccccgagagcagcgtgagcctgctgcagggcgccagacccttccccttctgctggcccctgtgcgagatcagcagaggcacccacaacttcagcgaggagctgaagatcggcgagggcggcttcggctgcgtgtacagagccgtgatgagaaacaccgtgtacgccgtgaagagactgaaggagaacgccgacctggagtggaccgccgtgaagcagagcttcctgaccgaggtggagcagctgagcagattcagacaccccaacatcgtggacttcgccggctactgcgcccagaacggcttctactgcctggtgtacggcttcctgcccaacggcagcctggaggacagactgcactgccagacccaggcctgcccccccctgagctggccccagagactggacatcctgctgggcaccgccagagccatccagttcctgcaccaggacagccccagcctgatccacggcgacatcaagagcagcaacgtgctgctggacgagagactgacccccaagctgggcgacttcggcctggccagattcagcagattcgccggcagcagccccagccagagcagcatggtggccagaacccagaccgtgagaggcaccctggcctacctgcccgaggagtacatcaagaccggcagactggccgtggacaccgacaccttcagcttcggcgtggtggtgctggagaccctggccggccagagagccgtgaagacccacggcgccagaaccaagtacctgaaggacctggtggaggaggaggccgaggaggccggcgtggccctgagaagcacccagagcaccctgcaggccggcctggccgccgacgcctgggccgcccccatcgccatgcagatctacaagaagcacctggaccccagacccggcccctgcccccccgagctgggcctgggcctgggccagctggcctgctgctgcctgcacagaagagccaagagaagaccccccatgacccaggagaacagctacgtgagcagcaccggcagagcccacagcggcgccgccccctggcagcccctggccgcccccagcggcgccagcgcccaggccgccgagcagctgcagagaggccccaaccagcccgtggagagcgacgagagcctgggcggcctgagcgccgccctgagaagctggcacctgacccccagctgccccctggaccccgcccccctgagagaggccggctgcccccagggcgacaccgccggcgagagcagctggggcagcggccccggcagcagacccaccgccgtggagggcctggccctgggcagcagcgccagcagcagcagcgagcccccccagatcatcatcaaccccgccagacagaagatggtgcagaagctggccctgtacgaggacggcgccctggacagcctgcagctgctgagcagcagcagcctgcccggcctgggcctggagcaggacagacagggccccgaggagagcgacgagttccagagctag

SEQ ID NO: 28741 - DNA, 2049 bp, Artificial Sequence
  derived and/or modified sequence
atggccgggggccccggccctggcgagccagcagccccaggtgctcagcactttctttacgaggtgcctccatgggtgatgtgtcgcttttacaaagtcatggatgccctggagcccgccgattggtgtcagtttgccgcactgattgtccgggaccaaaccgaactgcgactttgcgaaagaagtggacagcgcactgcctctgtgctttggccgtggattaacaggaacgccagagtggccgacctcgtccacatcttgacgcacttacagctgcttcgcgcccgcgacatcattacagcctggcacccacctgcaccactgccctcccctgggaccaccgcccccaggcccagctccatccctgctccagcagaggctgaggcctggagtccgcggaagctgccgagtagtgcctctactttcttgtcacccgctttccccgggtcccagacacattcaggaccagaactgggactggttccaagccctgcctccctgtggcctccaccccccagcccggccccctcatctactaagccgggccctgagtcaagcgtatccctactccaaggtgcccgccctttcccattctgttggcccctgtgcgagatctctagagggacccacaatttttcagaagaactgaagatcggagagggagggttcggctgcgtttatagagcagtaatgaggaatacagtttatgccgtcaagaggctcaaagagaacgctgatctagagtggactgccgttaaacagtccttccttacagaggttgagcagttatctcgttttaggcaccctaatatcgttgatttcgccgggtactgtgctcagaacgggttctattgtttggtgtacggattcctgccaaacggttctttagaggataggctgcactgccagactcaggcttgcccacccctgtcttggccacagcgtcttgatatcttgttaggaaccgccagagccattcagtttctgcaccaggactcgccctccctcatccacggtgacattaagtccagtaatgtgcttctcgacgagaggcttacccctaaactcggcgactttgggctggcccgcttctcacggtttgccgggtcctcaccatctcagagctctatggtggccagaactcagaccgtgagaggcacattagcatatttgccggaagaatacattaagacgggccgactggcagtggataccgacaccttttctttcggggtggtggttttagaaacattagccggacagcgagcagtgaagacccatggcgctcgtacaaaatatctaaaggacttggtggaggaggaagccgaggaggcgggggtggcgctgaggagcacccagtccacactgcaggctgggcttgcagcagacgcctgggccgcccccatcgctatgcagatatacaaaaaacacctggaccctcgccccgggccttgcccaccagaacttggcctaggcctgggacaattggcttgttgctgccttcatcgccgggcgaagcggaggccacccatgactcaggaaaactcttacgtctcctctacaggtcgcgcccactctggggctgccccgtggcagcccctcgccgccccatccggggccagcgcgcaagcagctgaacagctccagcgcgggcccaaccagccagttgaaagcgacgaatctcttggagggctctccgcagccctgcgcagctggcaccttacccccagctgtccattggatcctgctcctctgcgagaagccggttgtcctcagggcgatacagctggcgaaagctcatggggtagcggtccaggcagccgccccaccgctgtagaaggacttgccctggggtcctctgccagcagtagcagcgagcctcctcaaataataattaaccccgcccggcagaagatggtccagaagctggcactctatgaggacggagcactcgacagtctgcagctgctctcgtctagctctctcccaggtcttgggctggagcaagacaggcagggtccggaggaaagcgacgagttccagtcctag

SEQ ID NO: 28742 - DNA, 2049 bp, Artificial Sequence
  derived and/or modified sequence
atggccggcggccctggccctggagagcctgctgcccctggggcccagcacttcctgtatgaggtgcccccctgggtgatgtgccgcttctacaaggtgatggatgccctggagcctgctgactggtgccagtttgctgccctgattgtgcgggaccagacagagctgcggctgtgtgagaggagcggccagaggacagcctctgtgctgtggccctggatcaacagaaatgcccgggtggccgacctggtgcacatcctgacccacctgcagctgctgcgggcccgggacatcatcacagcctggcaccccccagcccccctgcccagccctggcaccacagccccccggcccagcagcatcccagccccagctgaggccgaggcctggagccccaggaagctgcccagcagcgccagcaccttcctgagccctgccttccctggcagccagacccacagcggccctgagctgggcctggtgcccagccctgccagcctgtggcccccaccacccagccctgcccccagcagcaccaagccaggccctgagagctctgtgtccctgctgcagggcgcccggcccttccccttctgctggcccctgtgtgagatcagccggggcacccacaacttcagcgaggagctgaagatcggggagggcggcttcggctgtgtgtacagagctgtgatgaggaacacagtgtatgctgtgaagaggctgaaggaaaatgctgacctggagtggacagctgtgaagcagagcttcctgacagaggtggagcagctgagccgcttccgccaccccaacatcgtggactttgctggctactgtgcccagaatggcttctactgcctggtgtatggcttcctgcccaacggcagcctggaggaccggctgcactgccagacccaggcctgcccccccctgtcctggccccagaggctggacatcctgctgggcacagcccgggccatccagttcctgcaccaggacagccccagcctcatccacggggacatcaagagcagcaatgtgctgctggatgagcggctgacccccaagctgggggactttggcctggcccgcttcagcagatttgctggcagcagccccagccagagctccatggtggcccggacccagacagtgcggggcaccctggcctacctgcctgaggagtacatcaagacaggccgcctggccgtggacacagacaccttctcctttggagtggtggtgctggagaccctggccggccagagagctgtgaagacccatggagcccggaccaagtacctgaaggacctggtggaggaggaggccgaggaggccggcgtggccctgcggagcacccagagcaccctgcaggccggcctggccgcagatgcctgggccgcccccatcgccatgcagatctacaagaagcacctggacccccggcccggcccctgccccccagagctgggcctgggcctgggccagctggcctgctgctgcctgcacagaagagccaagagaagaccacccatgacccaggagaacagctatgtgagcagcacaggccgggcccacagcggggccgccccctggcagcccctggccgcccccagcggggccagcgcccaggccgctgagcagctgcagaggggccccaaccagcctgtggagagtgatgagagcctgggcggcctgtctgctgccctgcgctcctggcacctgacccccagctgccccctggaccctgcccccctgcgggaggccggctgcccccagggcgacacagctggggagagctcctggggcagcggccctggcagccggcccacagctgtggagggcctggccctgggcagcagcgccagcagcagcagcgagcccccccagatcatcatcaacccagcccggcagaagatggtgcagaagctggccctgtatgaagatggagccctggacagcctgcagctgctgagcagcagcagcctgcccggcctgggcctggagcaggaccggcagggccctgaggagagtgatgagttccagagctag

SEQ ID NO: 28743 - DNA, 2049 bp, Artificial Sequence
  derived and/or modified sequence
atggccggggggccgggcccgggggagcccgcagcccccggcgcccagcacttcttgtacgaggtgccgccctgggtcatgtgccgcttctacaaagtgatggacgccctggagcccgccgactggtgccagttcgccgccctgatcgtgcgcgaccagaccgagctgcggctgtgcgagcgctccgggcagcgcacggccagcgtcctgtggccctggatcaaccgcaacgcccgtgtggccgacctcgtgcacatcctcacgcacctgcagctgctccgtgcgcgggacatcatcacagcctggcaccctcccgccccgcttccgtccccaggcaccactgccccgaggcccagcagcatccctgcacccgccgaggccgaggcctggagcccccggaagttgccatcctcagcctccaccttcctctccccagcttttccaggctcccagacccattcagggcctgagctcggcctggtcccaagccctgcttccctgtggcctccaccgccatctccagccccttcttctaccaagccaggcccagagagctcagtgtccctcctgcagggagcccgcccctttccgttttgctggcccctctgtgagatttcccggggcacccacaacttctcggaggagctcaagatcggggagggtggctttgggtgcgtgtaccgggcggtgatgaggaacacggtgtatgctgtgaagaggctgaaggagaacgctgacctggagtggactgcagtgaagcagagcttcctgaccgaggtggagcagctgtccaggtttcgtcacccaaacattgtggactttgctggctactgtgctcagaacggcttctactgcctggtgtacggcttcctgcccaacggctccctggaggaccgtctccactgccagacccaggcctgcccacctctctcctggcctcagcgactggacatccttctgggtacagcccgggcaattcagtttctacatcaggacagccccagcctcatccatggagacatcaagagttccaacgtccttctggatgagaggctgacacccaagctgggagactttggcctggcccggttcagccgctttgccgggtccagccccagccagagcagcatggtggcccggacacagacagtgcggggcaccctggcctacctgcccgaggagtacatcaagacgggaaggctggctgtggacacggacaccttcagctttggggtggtagtgctagagaccttggctggtcagagggctgtgaagacgcacggtgccaggaccaagtatctgaaagacctggtggaagaggaggctgaggaggctggagtggctttgagaagcacccagagcacactgcaagcaggtctggctgcagatgcctgggctgctcccatcgccatgcagatctacaagaagcacctggaccccaggcccgggccctgcccacctgagctgggcctgggcctgggccagctggcctgctgctgcctgcaccgccgggccaaaaggaggcctcctatgacccaggagaactcctacgtgtccagcactggcagagcccacagtggggctgctccatggcagcccctggcagcgccatcaggagccagtgcccaggcagcagagcagctgcagagaggccccaaccagcccgtggagagtgacgagagcctaggcggcctctctgctgccctgcgctcctggcacttgactccaagctgccctctggacccagcacccctcagggaggccggctgtcctcagggggacacggcaggagaatcgagctgggggagtggcccaggatcccggcccacagccgtggaaggactggcccttggcagctctgcatcatcgtcgtcagagccaccgcagattatcatcaaccctgcccgacagaagatggtccagaagctggccctgtacgaggatggggccctggacagcctgcagctgctgtcgtccagctccctcccaggcttgggcctggaacaggacaggcaggggcccgaagaaagtgatgaatttcagagctga

SEQ ID NO: 28744 - DNA, 2049 bp, Artificial Sequence
  derived and/or modified sequence
atggccggcggccccggccccggcgagcccgccgcccccggcgcccagcactttctctacgaggtgccaccttgggtcatgtgcaggttttacaaagtcatggacgcactagaaccggctgattggtgtcagtttgctgcactcatcgtgagagaccaaacagagctgaggctctgcgagcgatcgggacagaggactgcaagcgttctttggccctggattaataggaacgctagagtcgccgatcttgttcacattcttacacacctccaattgctcagagcccgtgacattatcactgcctggcatccccccgcacctctgccatctcccgggactaccgctccacggcctagctctatccctgctcctgctgaggcagaggcttggtctcctaggaagcttcccagctcagcctctacatttctttcccctgcctttcctggctctcagacacactcaggaccggagcttggcctcgtgcccagtccagctagtctttggcccccgccaccttctcccgccccgtcatctactaaacctggccccgagagttcagtgtccctgctacagggagcacggccctttccattttgttggccattatgtgagatcagccgaggcacacacaatttctctgaagagctaaaaattggggaagggggattcggctgtgtatatcgagccgtgatgaggaacaccgtatatgcagtgaagaggctcaaagagaacgctgatctcgaatggaccgctgttaaacaatccttcctgacagaggttgaacaactgtcaagattccgccaccccaatattgtggacttcgctggatattgtgcgcaaaacggcttctattgtctcgtgtacgggttccttccaaacgggagcctagaggaccggctgcattgtcagacacaagcctgccctcctctgagctggccacaaaggctggacattctcctcgggaccgctcgcgcgattcagttcctgcaccaggattccccatctctgatccatggcgatatcaagagttcaaacgtgctactggacgaacgactgacccccaagctcggagactttggactggccagattttcacgcttcgctggcagttcaccttcgcaatccagcatggtggcaagaacacagacagttcgaggaaccttagcttatttgccagaggaatacattaagaccggaaggctggcagttgatactgacaccttcagcttcggcgttgtggtgctggagactcttgctggccagagggccgtcaaaacccacggggccaggactaagtacttgaaagatctggtcgaagaggaggccgaggaggccggagtggctctgagatcaacgcaatccaccctgcaggctggactggctgccgacgcttgggctgcaccgatcgccatgcagatatataaaaagcacttggacccccggccaggcccctgccctcccgaactaggcctcggcttaggtcagctagcttgttgctgtctccaccggcgagccaagaggcggcccccaatgacccaggagaacagttacgtgagttcaacagggcgcgcgcattccggagctgccccctggcagcctctggctgccccatctggagcgtccgctcaggccgcggagcagcttcagcgagggccaaatcagcctgtggagtcagacgagagtctcggtggtctcagcgcagcgctgcgcagctggcacttaacaccctcttgtcctcttgatcccgcacctctgagggaggccggctgtccacagggggacacagccggcgagtcatcttggggctccggccccggaagccgcccgactgccgtagaaggtctggctctgggaagctccgcttcctcgtcgagtgagccgccgcagatcatcataaacccagctcgacaaaaaatggtacaaaaacttgccctgtatgaggacggcgccttggactcgctgcaactgctaagcagcagctccttgcctgggcttgggctcgaacaagatcgccaggggccagaagagtccgatgagtttcagtcctag

SEQ ID NO: 28745 - DNA, 2049 bp, Artificial Sequence
  derived and/or modified sequence
atggcgggagggccaggcccaggggagcccgctgcccctggggcacagcacttcctgtatgaagtgccaccttgggtcatgtgccgcttttacaaagtcatggatgccctcgagcctgctgattggtgccagttcgccgcactaattgttcgtgaccagaccgaactgcgcttgtgcgagcgcagcggacagagaacagcttccgtgctgtggccttggataaacaggaacgccagagtggccgatcttgtgcatatcctgacacacctacagttgctgagggccagggatatcatcaccgcctggcatccccctgcaccacttccttcccccggtactactgcaccacgtccgagttccattccagcccctgctgaggccgaggcatggtctccacggaagctgccctcatccgccagcacatttctgtctcccgcattccccggttctcagacacattccggacctgagcttggactagtgccctcgcctgctagcctatggcctcctccaccttctcctgcgccatccagtacaaagcctggccctgaatcctcggtgagtttactgcaaggtgccagaccctttccgttttgttggccactgtgcgaaatctcacgcggtacccataatttcagcgaggagctgaagattggtgagggcggttttggctgcgtttatagagccgtcatgcgcaacacggtgtacgcagtgaagaggctgaaagaaaacgccgacctcgaatggaccgcggtgaaacaaagcttccttacagaggtggaacaattatcccgctttaggcaccctaacatcgtggattttgccggatactgcgcgcagaatggcttctattgtctggtttatgggtttcttcctaacggcagtctcgaggatcgtttacactgtcagacgcaggcttgtcccccattgagctggcctcagcgcttagatatcctgctcggcaccgcaagagcaattcagttccttcaccaggacagcccgtcacttatccacggcgatatcaagtcgagcaatgtacttcttgacgagcggctgactcccaagttgggggactttggtctggccaggtttagccgctttgcagggtcgagcccgagccagagcagcatggtcgctcgtacccagacagtgagaggcacactggcttacttgcctgaagaatacattaagactgggagactcgcggttgacacggacaccttcagtttcggtgttgtggtactagagaccctggccggtcagagggccgtgaagacacacggagcgaggaccaaatatcttaaagaccttgtcgaagaggaagccgaagaagccggagtggcacttagaagcacccaaagcaccttacaagcgggactggcagctgatgcatgggcagcacccatcgctatgcagatttacaagaagcatctcgacccccgacccggaccctgtccacccgagctcggcctgggcttgggccaacttgcatgttgttgcctacacaggcgtgccaaaaggcgtccaccaatgacacaagaaaactcgtacgtatcttccacggggagggcccactcaggtgccgctccatggcaacccttagctgcgccatcaggtgcttcagcccaggccgcagagcaactgcagagggggcctaaccagcctgtggagagtgacgaaagtctcggaggcttgagcgcggcactccgctcatggcatctgaccccctcatgtcccctggaccccgctcctttacgcgaggcaggctgcccacagggcgatacagccggagaaagctcttggggtagcggccctggctcccgtccgacagcagtggagggcctggcactagggagttccgcctcctctagcagcgagcccccacagatcataataaaccccgctcgccagaagatggtccagaagttggcactgtatgaggacggcgctctggattcactgcagctcttaagttcctccagcctgccaggcctcggacttgagcaagatcggcaggggccagaggagtccgatgagtttcagagttag

SEQ ID NO: 28746 - protein, 633 aa, Artificial Sequence
  derived and/or modified sequence
MAGGPGPGEPAAPGAQHFLYEVPPWVMCRFYKVMDALEPADWCQFAALIVRDQTELRLCERSGQRTASVLWPWINRNARVADLVHILTHLQLLRARDIITAWHPPAPLPSPGTTAPRPSSIPAPAEAEAWSPRKLPSSASTFLSPAFPGSQTHSGPELGLVPSPASLWPPPPSPAPSSTKPGPESSVSLLQGARPFPFCWPLCEISRGTHNFSEELKIGEGGFGCVYRAVMRNTVYAVKRLKENADLEWTAVKQSFLTEVEQLSRFRHPNIVDFAGYCAQNGFYCLVYGFLPNGSLEDRLHCQTQACPPLSWPQRLDILLGTARAIQFLHQDSPSLIHGDIKSSNVLLDERLTPKLGDFGLARFSRFAGSSPSQSSMVARTQTVRGTLAYLPEEYIKTGRLAVDTDTFSFGVVVLETLAGQRAVKTHGARTKYLVYERLEKLQAVVAGVPGHSEAASCIPPSPQENSYVSSTGRAHSGAAPWQPLAAPSGASAQAAEQLQRGPNQPVESDESLGGLSAALRSWHLTPSCPLDPAPLREAGCPQGDTAGESSWGSGPGSRPTAVEGLALGSSASSSSEPPQIIINPARQKMVQKLALYEDGALDSLQLLSSSSLPGLGLEQDRQGPEESDEFQS

SEQ ID NO: 28747 - DNA, 1902 bp, Artificial Sequence
  derived and/or modified sequence
atggccggcggccccggccccggcgagcccgccgcccccggcgcccagcacttcctgtacgaggtgcccccctgggtgatgtgcagattctacaaggtgatggacgccctggagcccgccgactggtgccagttcgccgccctgatcgtgagagaccagaccgagctgagactgtgcgagagaagcggccagagaaccgccagcgtgctgtggccctggatcaacagaaacgccagagtggccgacctggtgcacatcctgacccacctgcagctgctgagagccagagacatcatcaccgcctggcacccccccgcccccctgcccagccccggcaccaccgcccccagacccagcagcatccccgcccccgccgaggccgaggcctggagccccagaaagctgcccagcagcgccagcaccttcctgagccccgccttccccggcagccagacccacagcggccccgagctgggcctggtgcccagccccgccagcctgtggccccccccccccagccccgcccccagcagcaccaagcccggccccgagagcagcgtgagcctgctgcagggcgccagacccttccccttctgctggcccctgtgcgagatcagcagaggcacccacaacttcagcgaggagctgaagatcggcgagggcggcttcggctgcgtgtacagagccgtgatgagaaacaccgtgtacgccgtgaagagactgaaggagaacgccgacctggagtggaccgccgtgaagcagagcttcctgaccgaggtggagcagctgagcagattcagacaccccaacatcgtggacttcgccggctactgcgcccagaacggcttctactgcctggtgtacggcttcctgcccaacggcagcctggaggacagactgcactgccagacccaggcctgcccccccctgagctggccccagagactggacatcctgctgggcaccgccagagccatccagttcctgcaccaggacagccccagcctgatccacggcgacatcaagagcagcaacgtgctgctggacgagagactgacccccaagctgggcgacttcggcctggccagattcagcagattcgccggcagcagccccagccagagcagcatggtggccagaacccagaccgtgagaggcaccctggcctacctgcccgaggagtacatcaagaccggcagactggccgtggacaccgacaccttcagcttcggcgtggtggtgctggagaccctggccggccagagagccgtgaagacccacggcgccagaaccaagtacctggtgtacgagagactggagaagctgcaggccgtggtggccggcgtgcccggccacagcgaggccgccagctgcatcccccccagcccccaggagaacagctacgtgagcagcaccggcagagcccacagcggcgccgccccctggcagcccctggccgcccccagcggcgccagcgcccaggccgccgagcagctgcagagaggccccaaccagcccgtggagagcgacgagagcctgggcggcctgagcgccgccctgagaagctggcacctgacccccagctgccccctggaccccgcccccctgagagaggccggctgcccccagggcgacaccgccggcgagagcagctggggcagcggccccggcagcagacccaccgccgtggagggcctggccctgggcagcagcgccagcagcagcagcgagcccccccagatcatcatcaaccccgccagacagaagatggtgcagaagctggccctgtacgaggacggcgccctggacagcctgcagctgctgagcagcagcagcctgcccggcctgggcctggagcaggacagacagggccccgaggagagcgacgagttccagagctag

SEQ ID NO: 28748 - DNA, 1902 bp, Artificial Sequence
  derived and/or modified sequence
atggcgggtgggccagggcctggcgagcctgccgcacctggagcccagcatttcctatatgaagtccctccctgggttatgtgtcgcttctacaaggttatggacgccctggagcctgccgactggtgccaatttgcagctttaatcgtgcgcgaccagacagagctccgtctttgcgaacggagcggtcagcgcaccgccagtgtcctatggccatggatcaaccgcaacgcaagagtcgcggatctcgtgcatatcctaacccacctccaactgttaagagccagggatatcattaccgcctggcatcctccggccccactgccttcccctgggacaacggccccaagacccagctccatccctgcaccagctgaagccgaggcgtggagccctaggaagctaccatccagtgcatccacctttctgtcaccagcatttcccgggtctcagactcactcagggcccgagctgggtcttgttccatcccccgcctccctctggcctcctccccctagtcctgcaccctctagcaccaagccagggcccgaatccagcgtctctttgctgcaaggtgccaggccatttcccttctgttggcccctgtgtgaaatttcacgcggaacccataatttttccgaggaattaaagataggagaggggggcttcggatgtgtctaccgagccgtgatgagaaatacagtctacgccgtcaaaaggttgaaagaaaacgccgacctcgagtggacagctgttaaacagtcttttctaactgaagttgagcagctcagcagatttcgacaccctaacatagttgacttcgccggttattgcgcccaaaacggattctactgcctcgtatacggatttctgcctaacggatctcttgaggatcgcctgcactgccaaactcaggcttgcccacctctgtcctggccacagagactggacatcctcctgggcaccgccagagcaatacaattcctccaccaggactcaccgagcttgatccacggcgatatcaagagcagtaatgtgctgcttgacgagcggctgactcccaagctcggggacttcggcctggcgaggttcagccgctttgcaggatctagcccctcccaatcttccatggtggctcggacccagacagtacggggaacacttgcctatctgccggaggaatacatcaagacaggaagattagcggttgacacggacactttctcctttggggtggtggtcctggagactctagctgggcagagggcagtgaagacacacggagcgcgcacaaagtacctggtttacgagcgcttagaaaagctacaggctgtggtggccggtgtgcccgggcattctgaggctgcctcctgtattcctccctctccccaggaaaacagttacgtctcctcgaccggccgggctcactctggcgctgcaccctggcaacccctggccgcaccctcgggagcctctgctcaggcagccgagcaacttcagagggggcccaatcagcccgtcgagagtgacgagtccctgggcggcttgagcgcggcattgcgctcttggcacctgactccaagctgtcccctcgatccagcacctttaagagaagcagggtgccctcagggcgacaccgccggcgagtcttcttgggggtcagggcccggctcgaggcctactgccgtggagggattagccttaggctcctcagccagctcctcttccgagcctcctcaaatcatcatcaacccggcgaggcagaaaatggttcagaaactggctctgtacgaggacggagcgctcgatagtctgcagctcctcagctcttcttccctacccgggctcgggctggaacaggaccggcagggacccgaggaatcagatgagtttcagtcttag

SEQ ID NO: 28749 - DNA, 1902 bp, Artificial Sequence
  derived and/or modified sequence
atggccggcggccctggccctggagagcctgctgcccctggggcccagcacttcctgtatgaggtgcccccctgggtgatgtgccgcttctacaaggtgatggatgccctggagcctgctgactggtgccagtttgctgccctgattgtgcgggaccagacagagctgcggctgtgtgagaggagcggccagaggacagcctctgtgctgtggccctggatcaacagaaatgcccgggtggccgacctggtgcacatcctgacccacctgcagctgctgcgggcccgggacatcatcacagcctggcaccccccagcccccctgcccagccctggcaccacagccccccggcccagcagcatcccagccccagctgaggccgaggcctggagccccaggaagctgcccagcagcgccagcaccttcctgagccctgccttccctggcagccagacccacagcggccctgagctgggcctggtgcccagccctgccagcctgtggcccccaccacccagccctgcccccagcagcaccaagccaggccctgagagctctgtgtccctgctgcagggcgcccggcccttccccttctgctggcccctgtgtgagatcagccggggcacccacaacttcagcgaggagctgaagatcggggagggcggcttcggctgtgtgtacagagctgtgatgaggaacacagtgtatgctgtgaagaggctgaaggaaaatgctgacctggagtggacagctgtgaagcagagcttcctgacagaggtggagcagctgagccgcttccgccaccccaacatcgtggactttgctggctactgtgcccagaatggcttctactgcctggtgtatggcttcctgcccaacggcagcctggaggaccggctgcactgccagacccaggcctgcccccccctgtcctggccccagaggctggacatcctgctgggcacagcccgggccatccagttcctgcaccaggacagccccagcctcatccacggggacatcaagagcagcaatgtgctgctggatgagcggctgacccccaagctgggggactttggcctggcccgcttcagcagatttgctggcagcagccccagccagagctccatggtggcccggacccagacagtgcggggcaccctggcctacctgcctgaggagtacatcaagacaggccgcctggccgtggacacagacaccttctcctttggagtggtggtgctggagaccctggccggccagagagctgtgaagacccatggagcccggaccaagtacctggtgtatgaaaggctggagaagctgcaggccgtggtggccggcgtgcccggccacagcgaggccgccagctgcatcccccccagcccccaggagaacagctatgtgagcagcacaggccgggcccacagcggggccgccccctggcagcccctggccgcccccagcggggccagcgcccaggccgctgagcagctgcagaggggccccaaccagcctgtggagagtgatgagagcctgggcggcctgtctgctgccctgcgctcctggcacctgacccccagctgccccctggaccctgcccccctgcgggaggccggctgcccccagggcgacacagctggggagagctcctggggcagcggccctggcagccggcccacagctgtggagggcctggccctgggcagcagcgccagcagcagcagcgagcccccccagatcatcatcaacccagcccggcagaagatggtgcagaagctggccctgtatgaagatggagccctggacagcctgcagctgctgagcagcagcagcctgcccggcctgggcctggagcaggaccggcagggccctgaggagagtgatgagttccagagctag

SEQ ID NO: 28750 - DNA, 3319 bp, Artificial Sequence
  derived and/or modified sequence
cccaggcccgcgcccgccgcggccctgagaggccccggcaggtcccggcccggcggcggcagccatggccggggggccgggcccgggggagcccgcagcccccggcgcccagcacttcttgtacgaggtgccgccctgggtcatgtgccgcttctacaaagtgatggacgccctggagcccgccgactggtgccagttcgccgccctgatcgtgcgcgaccagaccgagctgcggctgtgcgagcgctccgggcagcgcacggccagcgtcctgtggccctggatcaaccgcaacgcccgtgtggccgacctcgtgcacatcctcacgcacctgcagctgctccgtgcgcgggacatcatcacagcctggcaccctcccgccccgcttccgtccccaggcaccactgccccgaggcccagcagcatccctgcacccgccgaggccgaggcctggagcccccggaagttgccatcctcagcctccaccttcctctccccagcttttccaggctcccagacccattcagggcctgagctcggcctggtcccaagccctgcttccctgtggcctccaccgccatctccagccccttcttctaccaagccaggcccagagagctcagtgtccctcctgcagggagcccgcccctttccgttttgctggcccctctgtgagatttcccggggcacccacaacttctcggaggagctcaagatcggggagggtggctttgggtgcgtgtaccgggcggtgatgaggaacacggtgtatgctgtgaagaggctgaaggagaacgctgacctggagtggactgcagtgaagcagagcttcctgaccgaggtggagcagctgtccaggtttcgtcacccaaacattgtggactttgctggctactgtgctcagaacggcttctactgcctggtgtacggcttcctgcccaacggctccctggaggaccgtctccactgccagacccaggcctgcccacctctctcctggcctcagcgactggacatccttctgggtacagcccgggcaattcagtttctacatcaggacagccccagcctcatccatggagacatcaagagttccaacgtccttctggatgagaggctgacacccaagctgggagactttggcctggcccggttcagccgctttgccgggtccagccccagccagagcagcatggtggcccggacacagacagtgcggggcaccctggcctacctgcccgaggagtacatcaagacgggaaggctggctgtggacacggacaccttcagctttggggtggtagtgctagagaccttggctggtcagagggctgtgaagacgcacggtgccaggaccaagtatctggtgtacgagaggctagagaagctgcaggcagtggtggcgggggtgcccgggcattcggaggccgccagctgcatccccccttccccgcaggagaactcctacgtgtccagcactggcagagcccacagtggggctgctccatggcagcccctggcagcgccatcaggagccagtgcccaggcagcagagcagctgcagagaggccccaaccagcccgtggagagtgacgagagcctaggcggcctctctgctgccctgcgctcctggcacttgactccaagctgccctctggacccagcacccctcagggaggccggctgtcctcagggggacacggcaggagaatcgagctgggggagtggcccaggatcccggcccacagccgtggaaggactggcccttggcagctctgcatcatcgtcgtcagagccaccgcagattatcatcaaccctgcccgacagaagatggtccagaagctggccctgtacgaggatggggccctggacagcctgcagctgctgtcgtccagctccctcccaggcttgggcctggaacaggacaggcaggggcccgaagaaagtgatgaatttcagagctgatgtgttcacctgggcagatcccccaaatccggaagtcaaagttctcatggtcagaagttctcatggtgcacgagtcctcagcactctgccggcagtgggggtgggggcccatgcccgcgggggagagaaggaggtggccctgctgttctaggctctgtgggcataggcaggcagagtggaaccctgcctccatgccagcatctgggggcaaggaaggctggcatcatccagtgaggaggctggcgcatgttgggaggctgctggctgcacagacccgtgaggggaggagaggggctgctgtgcaggggtgtggagtagggagctggctcccctgagagccatgcagggcgtctgcagcccaggcctctggcagcagctctttgcccatctctttggacagtggccaccctgcacaatggggccgacgaggcctagggccctcctacctgcttacaatttggaaaagtgtggccgggtgcggtggctcacgcctgtaatcccagcactttgggaggccaaggcaggaggatcgctggagcccagtaggtcaagaccagccagggcaacatgatgagaccctgtctctgccaaaaaattttttaaactattagcctggcgtggtagcgcacgcctgtggtcccagctgctggggaggctgaagtaggaggatcatttatgcttgggaggtcgaggctgcagtgagtcatgattgtatgactgcactccagcctgggtgacagagcaagaccctgtttcaaaaagaaaaaccctgggaaaagtgaagtatggctgtaagtctcatggttcagtcctagcaagaagcgagaattctgagatcctccagaaagtcgagcagcacccacctccaacctcgggccagtgtcttcaggctttactggggacctgcgagctggcctaatgtggtggcctgcaagccaggccatccctgggcgccacagacgagctccgagccaggtcaggcttcggaggccacaagctcagcctcaggcccaggcactgattgtggcagaggggccactacccaaggtctagctaggcccaagacctagttacccagacagtgagaagcccctggaaggcagaaaagttgggagcatggcagacagggaagggaaacattttcagggaaaagacatgtatcacatgtcttcagaagcaagtcaggtttcatgtaaccgagtgtcctcttgcgtgtccaaaagtagcccagggctgtagcacaggcttcacagtgattttgtgttcagccgtgagtcacactacatgcccccgtgaagctgggcattggtgacgtccaggttgtccttgagtaataaaaacgtatgttgcaat

SEQ ID NO: 28751 - DNA, 1902 bp, Artificial Sequence
  derived and/or modified sequence
atggccggcggccccggccccggcgagcccgccgcccccggcgcccagcactttttgtatgaggttccgccttgggtgatgtgtagattttacaaggtcatggatgctctggagcccgccgactggtgccagttcgctgcactcattgtgcgggatcagaccgagctgagactgtgtgagcgctctggtcaacggacagcctccgtgctatggccctggatcaataggaacgctcgggtggccgatctggtgcacatacttactcacctgcagctcctgcgcgctcgagatataataacagcgtggcaccctcccgcaccattaccctcacctggtaccactgctcccagaccatcgagcattccggctccagccgaagcagaggcttggtcacctcgaaagttgcccagtagtgcgtccactttcttgagcccagcttttccaggctcacagacccattctggccccgagctgggattagtgccaagtccagcatctctctggccgccccccccttctcctgccccgagttctaccaagcctggccctgagtcctccgtgagcctgctgcagggggcccggccttttcccttttgctggccactctgcgagatctccaggggaacacataactttagtgaggaacttaagattggtgagggtggcttcggttgtgtgtaccgggctgtaatgcggaacacggtctacgcggtcaagcgactcaaagagaacgctgatctggagtggactgccgtgaaacagtcatttctgactgaggttgaacagctcagcaggtttcgtcatccaaatatagtggattttgccggatactgcgcacagaacggattctattgcctggtgtatggattcctgccaaacggatccctcgaggatcggctgcactgtcagacacaggcctgtccaccactttcctggcctcaacggctcgacatcctcctaggtactgcacgtgcaattcagtttttgcatcaagattcccctagcctaattcacggcgacatcaagagctctaatgtgttgttggatgagcgcctaacccctaaactgggagacttcggtctcgccaggttttcccgattcgctggctccagcccctctcagtccagcatggtggcacgcacccagacagtcagaggtaccctggcatatcttccggaggagtatattaagactggaaggttagcggtcgacacagataccttcagctttggggtcgtcgtgctcgaaacactagcagggcagagagctgtgaaaactcacggcgcccgcaccaagtatctggtctatgaacggttggaaaagctacaggccgtcgttgctggcgtgcccgggcatagtgaagctgccagctgtatccccccatcaccacaagaaaactcatatgtctcaagtacagggagagcccacagtggggccgcgccatggcaaccattagctgcaccctcgggagcctccgcacaggccgcggaacaattgcagcgaggccctaaccaacctgtcgagtcagacgaatctttaggaggtctgtcagcagctctcagaagctggcatctgacgccaagctgtcccctggatcctgcaccacttcgggaagcaggctgccctcaaggagatacagcaggagagtcaagttggggatccggccctgggtccaggccaactgcggtagaaggactcgctctcggaagctcagcatcctcaagctccgagccaccccagattataatcaacccggccagacaaaagatggtgcagaagctggccctgtatgaagatggagctttggatagcctccaactgctgagcagcagctctcttccaggactgggcctcgaacaggatcgccaggggcctgaagagtccgatgaatttcagtcttag

SEQ ID NO: 28752 - DNA, 1902 bp, Artificial Sequence
  derived and/or modified sequence
atggccggtggccctgggccaggcgagcccgctgcccctggggctcagcacttcctctacgaggtaccaccttgggtaatgtgtaggttttacaaagtgatggacgccctcgaacccgcagactggtgccaatttgctgccctgattgtacgggatcagacagagctccgcctgtgcgaacgaagcgggcagcggacagctagcgtactttggccctggatcaatagaaatgctcgcgtagctgacctggtccatatcttaacacatctgcagctcctgcgcgcaagggacattatcacagcatggcatccccctgcaccccttcctagtcccggaacgaccgcacccagaccatcaagcattcctgcacctgccgaggccgaggcctggtcgccacgcaaactgccctcatcagcctcaaccttcctgagtccagcatttccgggtagtcagacccacagcggcccagagctgggcctcgtgccctcgcccgctagtctgtggcctccaccaccatcccccgcaccgagttcaacaaagcccggacctgaatcctccgtttcactcctgcagggcgctaggccttttcctttttgttggcctctgtgcgagatctcccgagggacccataatttcagcgaggagctcaaaatcggagagggcggttttgggtgcgtttatcgggcagtgatgaggaatactgtttacgccgtgaaaagactgaaggagaacgccgatctagaatggacagcggtgaagcagtctttcctgactgaagtggaacagctcagtcgcttccggcaccctaacatcgttgattttgcaggctactgtgcccagaacggattctattgtttggtctacggttttctgcctaacggaagccttgaagataggttgcattgtcagacccaggcatgcccccctcttagttggcctcagcggctggatatcttactgggtacagcccgagccatccagtttctacaccaggattcaccaagtttgattcatggcgacatcaagtcctccaacgttctgttggacgagcgtctgactccaaaattaggggattttggccttgccagattttcacggtttgcgggaagtagtccgtcccagtcctcaatggtcgccagaactcaaacagttaggggaacgctggcatacctgccagaagaatacattaagactgggaggctggccgtggatacagacacattttccttcggcgtggtggtgctcgagacccttgcgggacaacgagctgtgaagactcacggagcgagaacgaagtacctcgtatatgaacggctcgagaagttgcaagctgtcgtcgcgggagtcccaggccactctgaggcagcctcatgtattccgcctagccctcaagaaaattcatatgtgagctccaccggcagagcacactccggagccgctccttggcagccgcttgcggctccttctggtgcctctgcccaggccgctgagcagctgcagcgcggacccaatcagccagttgaatcagatgagtccctgggcggactgtccgcagcgctgcgctcctggcacctgacaccctcgtgccctctggatcccgctcctctgcgtgaggccggttgtccacagggggacacagccggagaaagttcatggggctccggacctggcagtcgaccaaccgccgtcgaaggcctggccttgggctcaagcgcgtcttcttcttccgaaccaccacagattatcatcaacccagccaggcaaaaaatggtccagaagctagctctgtatgaggacggcgctctcgactctcttcagctgctgagctcgagctcactcccaggtttggggttggagcaggatcgccaaggcccagaggagtcagatgagtttcagtcatag

SEQ ID NO: 28753 - protein, 84 aa, Artificial Sequence
  derived and/or modified sequence
MKRVRTEQIQMAVSCYLKRRQYVDSDGPLKQGLRLSQTAEEMAANLTGNGGGSSGGVSLEQENSRQYPCGITSPLLKTVPERAD

SEQ ID NO: 28754 - protein, 325 aa, Artificial Sequence
  derived and/or modified sequence
MKRVRTEQIQMAVSCYLKRRQYVDSDGPLKQGLRLSQTAEEMAANLTVQSESGCANIVSAAPCQAEPQQYEVQFGRLRNFLTDSDSQHSHEVMPLLYPLFVYLHLNLVQNSPKSTVESFYSRFHGMFLQNASQKDVIEQLQTTQTIQDILSNFKLRAFLDNKYVVRLQEDSYNYLIRYLQSDNNTALCKVLTLHIHLDVQPAKRTDYQLYASGSSSRSENNGLEPPDMPSPILQNEAALEVLQESIKRVKDGPPSLTTICFYAFYNTEQLLNTAEISPDSKLLAAGFDNSCIKLWSLRSKKLKSEPHQVDVSRIHLACDILEEEV

SEQ ID NO: 28755 - DNA, 255 bp, Artificial Sequence
  derived and/or modified sequence
atgaagcgcgtccgcacggagcaaatacagatggccgtgtcttgctatctcaagcgccgccagtacgtcgacagcgatggaccattgaaacaaggcctgcgccttagccagactgccgaggagatggccgccaacctcactggaaatgggggcggcagctcgggtggtgtatccctggagcaagagaattctagacagtatccttgcggaattacatctccactccttaaaactgtgccggagagagccgactag

SEQ ID NO: 28756 - DNA, 978 bp, Artificial Sequence
  derived and/or modified sequence
atgaagcgcgtgcgtacagaacaaatacagatggccgtgtcttgctatttaaagaggagacagtacgtcgactctgacggtccgcttaagcagggacttcggctgagccagactgctgaagaaatggcggctaatttaactgtgcaatccgagtccggatgtgcgaacatcgtttcggccgccccatgccaagccgaaccacagcaatacgaagttcagttcggcagactcagaaacttccttacggattctgactcacaacactctcacgaagtgatgcctttactgtacccattatttgtgtatctccacttgaatctcgtccaaaattcccctaaaagcactgtggaatccttctacagtaggttccatgggatgtttcttcaaaatgcttcccagaaggatgtcattgagcaactacagaccacacagaccatccaggacatcctgagtaacttcaagctgagagcttttctcgataataagtacgttgtcagactccaggaggatagctacaactaccttattagatatttgcagagcgacaataacactgcactctgcaaggtgttgacactgcacatacacctggatgttcagccagctaaacggacggactaccagctatacgcatctggttccagctctcgctcggagaacaacggcctggaaccacccgatatgccaagcccaatcctgcagaacgaggccgctctcgaggtcctgcaggagtcaatcaaacgcgttaaagatggccccccatctttgactacaatctgcttttatgcattttataacacagaacagttgctgaacaccgctgagatatcaccggacagtaagcttctagcagccggcttcgacaacagctgcatcaaactttggtcactgagaagtaaaaaactgaagtccgaaccccaccaggttgatgtgtctcgaattcacttagcctgcgatatcttggaggaagaagtgtag

SEQ ID NO: 28757 - DNA, 255 bp, Artificial Sequence
  derived and/or modified sequence
atgaagagggtgaggacagagcagatccagatggctgtgtcctgctacctgaagaggcggcagtatgtggacagtgatggccccctgaagcagggcctgcggctgagccagacagctgaggagatggccgccaacctgactggaaatggaggcggcagcagcggcggcgtgtccctggagcaggagaacagccggcagtacccctgtggcatcaccagccccctgctgaagacagtgcctgagagagctgactag

SEQ ID NO: 28758 - DNA, 978 bp, Artificial Sequence
  derived and/or modified sequence
atgaagagggtgaggacagagcagatccagatggctgtgtcctgctacctgaagaggcggcagtatgtggacagtgatggccccctgaagcagggcctgcggctgagccagacagctgaggagatggccgccaacctgactgtgcagagcgagagcggctgtgccaacatcgtgtctgctgccccctgccaggccgagccccagcagtatgaggtgcagtttggccgcctgaggaacttcctgacagacagcgacagccagcacagccatgaggtgatgcccctgctgtaccccctgtttgtgtacctgcacctgaacctggtgcagaacagccccaagagcacagtggagagcttctacagccgcttccacggcatgttcctgcagaatgccagccagaaggatgtgattgagcagctgcagaccacccagaccatccaggacatcctgagcaacttcaagctgcgggccttcctggacaacaagtatgtggtgcggctgcaggaggacagctacaactacctgatccgctacctgcagagcgacaacaacacagccctgtgcaaggtgctgaccctgcacatccacctggatgtgcagcctgccaagaggacagactaccagctgtatgccagcggcagcagcagccgctcagaaaataatggcctggagcccccagacatgcccagccccatcctgcagaatgaagctgccctggaggtgctgcaggagagcatcaagagggtgaaggatggcccccccagcctgaccaccatctgcttctacgccttctacaacacagagcagctgctgaacacagctgagatcagcccagacagcaagctgctggccgccggctttgacaacagctgcatcaagctgtggagcctgcggagcaagaagctgaagtctgagccccaccaggtggatgtgagccgcatccacctggcctgtgacatcctggaggaggaggtgtag

SEQ ID NO: 28759 - DNA, 255 bp, Artificial Sequence
  derived and/or modified sequence
atgaagcgggtgcggaccgagcagatccagatggccgtgagctgctatcttaagagacgacagtacgtggatagcgatgggccattgaagcaggggctgcggctttcgcagacggccgaggagatggctgcgaatctcacaggcaatgggggcggatccagtgggggcgtgtctttggagcaggaaaacagccgccaatacccatgcggaatcacgagtcccctcttgaagacggtgcccgagcgcgccgactag

SEQ ID NO: 28760 - DNA, 978 bp, Artificial Sequence
  derived and/or modified sequence
atgaagcgggtgcggaccgagcagatccagatggccgtgagctgctatctaaaacggcgtcaatacgtcgattctgacggacccttgaagcagggcctcaggctttcccagaccgcagaggagatggcggccaatctgaccgtccaaagcgagagcggatgtgccaacattgtgtctgctgcaccgtgccaggctgagccgcagcaatacgaggtccaatttgggcgactgagaaactttcttactgactcagacagccagcacagccatgaggttatgcctcttctgtatcccctgttcgtctacctgcaccttaatcttgtacaaaattccccgaaaagcacagtggagtcattttattccaggtttcacggaatgttccttcagaatgctagccagaaggacgtgattgaacagctgcagactacacaaaccatccaggatatccttagcaacttcaaactgcgcgcttttctcgacaataaatacgttgtgcgcttgcaggaagactcctataactacttgatccggtatctgcagtcagataacaacacagctctgtgcaaagtgctcaccctccatatccatctcgacgtacagcccgcgaagcggaccgactatcagctgtacgcaagcgggagttcgtctagaagtgagaacaacgggctcgaaccacctgacatgccatcccccatcctgcaaaatgaggccgctctcgaggtcctgcaagaatctatcaagcgcgtcaaggatggcccgccaagtctaaccaccatttgtttttatgctttttacaatacggaacaactgctgaacaccgcggagatctctcctgactctaaactgctggctgccgggttcgacaattcatgcattaagttgtggagcctgaggagcaagaaactcaaatcagaaccccatcaggtcgatgtgagccggatccaccttgcttgcgatatccttgaggaggaggtgtag

SEQ ID NO: 28761 - DNA, 492 bp, Artificial Sequence
  derived and/or modified sequence
gcggccgcccagagcggcggcgggggcggcggggcgcggggcgcgggggcccagctgagccggccgtcggagtgagaccctgcggcagagacgacggaggcggaagcaacccgatcccggaggcggcggcggcggggggagccggagccgcctgggatgttcagtcatgaaacgagtgcgtaccgagcagattcagatggcagtgtcctgctacctcaaacgccggcagtacgtggactcagatggtcccctgaagcaaggactgcggctgtcacagactgctgaagagatggcggccaatctaacaggtaatggtgggggctcgtctggtggggtgagcctggagcaggagaactcacgtcaatatccatgtggaattacttctcctcttctcaagacagtgccagagagagcagactgaccaaaaacctcagtgagctacgttaagtgaatgatgttggcctcagagaccctgtctgtcatttagagcgg

SEQ ID NO: 28762 - DNA, 4062 bp, Artificial Sequence
  derived and/or modified sequence
ccctgcggcagagacgacggaggcggaagcaacccgatcccggaggcggcggcggcggggggagccggagccgcctgggatgttcagtcatgaaacgagtgcgtaccgagcagattcagatggcagtgtcctgctacctcaaacgccggcagtacgtggactcagatggtcccctgaagcaaggactgcggctgtcacagactgctgaagagatggcggccaatctaacagtgcaatcagaatctggttgtgccaacatagtgtctgcagccccttgccaggcagaaccccagcaatatgaagtacagtttggacgactgcggaattttctcactgattctgattcccagcatagccacgaagtgatgcctctcctctatcctctctttgtctacctccatctcaacctggtccaaaacagtccgaagagcacagtggaaagtttttacagccgcttccatggaatgtttctgcagaatgctagccagaaggatgtcattgagcagctacagaccactcaaaccatccaggacatcctatctaacttcaagcttcgagcattcctagataacaagtacgtggtccgtctccaagaagacagctacaactaccttatccgctacctccaaagtgacaacaatactgccctgtgcaaagtcctcaccttacatattcatcttgacgtgcagcctgccaagagaacagactatcagctgtatgccagtggcagctcctcccgcagtgagaacaacggtttggagccccccgacatgcccagccctattctgcagaacgaggctgccctagaggtcttacaggagagcattaagcgagtcaaggatgggcctccctccctcactaccatctgcttctatgccttctataacacagagcagctgttgaacactgcagaaatctcccccgatagcaagctgcttgctgctgggtttgacaactcctgtataaaactttggagtttacgatccaagaagttaaaatcagagccccaccaagtagacgtgtcccgcatccatttggcttgtgatattctggaggaggaggtatgaataccatttttttcttccctgcacccgccttcctaatttccttagaatgtccttaccaaacacgacatatcttagaatggacttcctagtttccctcatcatatagctaaagccagactaatgacatgttacctgtagccattgaattcctgcacatgcctaacctaagatgcaaaaacaatttttagcagcattaacttcttattaatgaatggtcagtatttatactatgtgaaatgtggatagcaacactaagcctaatgaaagacctttagctaatattgactttagctgagatttgcagtaaatatacacttatgtgtgtgcacatttgctcaggtacaaataatcggtagtaggataactgagtcgaagggcctccattgtcaactgtaatgaatattattttccccacagaaggttgtgccatttcacagtctcagcaacagtagtaagaatactggcatccctgcaccctcaccacactggatggatggtattggctttctgaggccagtgcatatcctgtggctccatgtaccccggggtgttcccagaccccacttggagaagtaacacaggaagtagagttgccagctcccctccccccgtcagtcagtgttcaatcttgtttggcttgtaaccgtttaggacagtcattgaaaagggcaggcgcagcttgggtttcaggtcaccaaaaatcactaccttagaaaaaatgtgggccaaggaagatagaaattaaacttcacagcattaacttttctttagagtggtcctgaaaaagctgtgggccaaagtatttttgtcttatcaccactgaaattcaggtagctctgcctcacattactttggatggaaaattctttacacaatgttgaataattaaggagcaaaaaaatcactctaattaaattacagttaatgataaggatgtcaagaatattgggtgccctaaattaaaccattgttttcctgttcctgttttctgagtccacttccagttaggatggcctttgaatttttgattcttgcaaccgagacagtataattgaaggatttccttgtgatgagtgaagagtctagattcccatgtagaagctttaatttctagaattttatagtactctccaaaatattttttattacatttgtatttgaattttcaaacatctcttttccttggagacagttccctttttgggagttcttctgataaaactgaggaatactgcctgcatttgctttcgattttctgtaaatacaaaaaaaaattacactgaccttattagctttgatgatacagagtttggagattattctgtgcattaaaaattaatattaaagaagatagcattatgacatctgataacagtagaccaaaataaaacattttaagactctggccactactggtaactagctctgtggcttgtcctatgtttatttccgggtatcagaagtgtatctgaagactcagaagtgaggaaccgcatgcggaattccaggaactgaaagaaattaagtatggctggagttaggagaggggccaagacaggaagtgatgtagtgacactgtcttatatgagcaattatggcggccaaactagggtagtggcagtggcaaaggagacatggatggactagagaagagctcggttattcaattactgtaggggataagggagagcaagcatcaagggtgacgtttgtgtttcaggcttaaacagttggatgtccatcaagaagaaagcaaaagacgtcattggaatggtggttttgtttaagcatttctggctttccatcatggttcatactgaaagtactgtagatgctagctaacctctgccctttttaagaataaaccttttttttaaacttaagaactaaagctgagattctcctattctgttgttgaggggcttcctgcatgcccgcccattttatcacagcaatttgagaagttttctttttggtttctgacaacaagcatttggggagaaagccaggcataaattagttacgatagttggtgtttaatgtttctccagtgaaaatttggacttttctttttcccttatagaatgcataattaaaacagactattattttgaaatgaaatattgaatattaaaaaaaataaaatagagactcttaatacaggagccacaaactcacatacctagagaaaccaaacaggtaaaagcaagtggtgaagccacatggattaatgagatgatagaaagtacaaaatcactatgtaagtcagattaaaaagccagcttgcactctctgctttcatctttttgaagcaataactattacataaatcagtgaatacagtatttctacagtatttgaaacggtgttcacacccagcaattccacttctagacatatatccaagagaatggaaaacatgtgcacacaggcacttgtacatgaatatttatggaagcattattcacaatagccaaaaagtggaaacagtccaaatggccatcaagatgaatgaataaataaaatgtagtgtgtgcatgcagtggaatattatttgcccataaaaagaaatgaagcactgatgcaggctgcaacatggatgaacttgaaagctttatgctacgtgaaagaagccagtcataaaaggtcacctactgttattcctttcataggaaatatccagataggcaagtccatagagacagagaggagaggagtggttgccaggggctgggcaaggagaatgagagtgaccgctaatgggtgtggcatttctttgtgaggtaatgaaaatgttctgtattagatagtggtgatcattgcacaactctgtgaatgtactaaaaatcattgaattgtacactttgaaagaattatatagtatgtaattatatctcagtttaaaaaaaaaaacaggataacagtaaccaaaatcttctatgtaagcttaaaattttctctgttaattatgccaaataaaactgaattcacagca

SEQ ID NO: 28763 - DNA, 255 bp, Artificial Sequence
  derived and/or modified sequence
atgaagagggtgcggacagagcagatccagatggctgtctcctgctatcttaagaggcgtcaatatgtggactcggacggccctctgaagcagggcctgagactcagccaaacggctgaggaaatggccgctaaccttacagggaatggcggtgggtcctccggcggagtgtcactggagcaagaaaactctcggcaatacccatgcggcattactagtcctctcctgaaaacagtgcctgaacgcgcagactag

SEQ ID NO: 28764 - DNA, 978 bp, Artificial Sequence
  derived and/or modified sequence
atgaaacgggttaggacggaacagatccagatggccgtgtcttgctacttgaagagaaggcagtacgtggacagtgatggccctctgaaacaaggcttgagactgtcgcagacagctgaagagatggccgcaaatctgacggtacaatccgagagcgggtgtgctaacattgtgtcagcggctccatgtcaggctgaaccacagcagtatgaagtgcaattcgggaggctgcgtaattttcttacggactctgactcccagcactcacatgaggtcatgcctctactgtatcctctctttgtctacctgcatctgaacctggtgcagaacagtccaaagtccactgtggagtcattctatagtaggtttcatgggatgtttttgcagaacgcctctcagaaagatgtgatcgagcagctgcagactacgcagacgatacaggatatcctgagcaactttaagttacgtgcatttcttgataacaaatacgtcgtgagactgcaagaagatagttacaactatttgatacggtatctgcagtctgataataatactgcgttgtgcaaagtgctgaccctccacatccacctcgacgtacagccagcgaagaggacagactatcagctgtacgcatcagggtcttcctctaggtccgagaacaacggcctggagccccctgatatgccatcgcccatacttcagaatgaggccgcactcgaggtcctgcaggaatccataaagcgagttaaggatggccctccttccctaaccacaatctgcttctacgccttttataacacggaacagctgttaaataccgctgagatttcaccagatagcaagctgttagccgctggtttcgacaattcctgtatcaagctttggtcacttcgatctaagaagttgaaatccgaaccgcaccaagtggatgtgtcgaggattcacctagcatgtgatatattagaggaggaagtttag

SEQ ID NO: 28765 - DNA, 255 bp, Artificial Sequence
  derived and/or modified sequence
atgaagagagtgagaaccgagcagatccagatggccgtgagctgctacctgaagagaagacagtacgtggacagcgacggccccctgaagcagggcctgagactgagccagaccgccgaggagatggccgccaacctgaccggcaacggcggcggcagcagcggcggcgtgagcctggagcaggagaacagcagacagtacccctgcggcatcaccagccccctgctgaagaccgtgcccgagagagccgactag

SEQ ID NO: 28766 - DNA, 978 bp, Artificial Sequence
  derived and/or modified sequence
atgaagagagtgagaaccgagcagatccagatggccgtgagctgctacctgaagagaagacagtacgtggacagcgacggccccctgaagcagggcctgagactgagccagaccgccgaggagatggccgccaacctgaccgtgcagagcgagagcggctgcgccaacatcgtgagcgccgccccctgccaggccgagccccagcagtacgaggtgcagttcggcagactgagaaacttcctgaccgacagcgacagccagcacagccacgaggtgatgcccctgctgtaccccctgttcgtgtacctgcacctgaacctggtgcagaacagccccaagagcaccgtggagagcttctacagcagattccacggcatgttcctgcagaacgccagccagaaggacgtgatcgagcagctgcagaccacccagaccatccaggacatcctgagcaacttcaagctgagagccttcctggacaacaagtacgtggtgagactgcaggaggacagctacaactacctgatcagatacctgcagagcgacaacaacaccgccctgtgcaaggtgctgaccctgcacatccacctggacgtgcagcccgccaagagaaccgactaccagctgtacgccagcggcagcagcagcagaagcgagaacaacggcctggagccccccgacatgcccagccccatcctgcagaacgaggccgccctggaggtgctgcaggagagcatcaagagagtgaaggacggcccccccagcctgaccaccatctgcttctacgccttctacaacaccgagcagctgctgaacaccgccgagatcagccccgacagcaagctgctggccgccggcttcgacaacagctgcatcaagctgtggagcctgagaagcaagaagctgaagagcgagccccaccaggtggacgtgagcagaatccacctggcctgcgacatcctggaggaggaggtgtag

SEQ ID NO: 28767 - protein, 250 aa, Artificial Sequence
  derived and/or modified sequence
MTPLCPRPALCYHFLTSLLRSAMQNARTAEGRSRGTLRARPAPRPAAQHGIPRPLSSAGRLSQGCRGASTVGAAGWKGELPKAGGSPAPGPETPAISPSKRARPAEVGGMQLRFARLSEHATAPTRGSARAAGYDLYSAYDYTIPPMEKAVVKTDIQIALPSGCYGRVAPRSGLAAKHFIDVGAGVIDEDYRGNVGVVLFNFGKEKFEVKKGDRIAQLICERIFYPEIEEVQALDDTERGSGGFGSTGKN

SEQ ID NO: 28768 - protein, 252 aa, Artificial Sequence
  derived and/or modified sequence
MTPLCPRPALCYHFLTSLLRSAMQNARGARQRAEAAVLSGPGPPLGRAAQHGIPRPLSSAGRLSQGCRGASTVGAAGWKGELPKAGGSPAPGPETPAISPSKRARPAEVGGMQLRFARLSEHATAPTRGSARAAGYDLYSAYDYTIPPMEKAVVKTDIQIALPSGCYGRVAPRSGLAAKHFIDVGAGVIDEDYRGNVGVVLFNFGKEKFEVKKGDRIAQLICERIFYPEIEEVQALDDTERGSGGFGSTGKN

SEQ ID NO: 28769 - protein, 141 aa, Artificial Sequence
  derived and/or modified sequence
MQLRFARLSEHATAPTRGSARAAGYDLYSAYDYTIPPMEKAVVKTDIQIALPSGCYGRVAPRSGLAAKHFIDVGAGVIDEDYRGNVGVVLFNFGKEKFEVKKGDRIAQLICERIFYPEIEEVQALDDTERGSGGFGSTGKN

SEQ ID NO: 28770 - DNA, 753 bp, Artificial Sequence
  derived and/or modified sequence
atgaccccactgtgtccccgacccgctctctgctaccattttctgacatcactcctccgttctgccatgcagaacgcccgaacagcggagggcagaagccgtggtaccctccgggctcgtccagcccccagaccagccgcacagcacggcataccacgaccgctgagctccgctggccggttgtctcaaggatgccgaggagcatccacagtcggagccgctgggtggaagggagagcttcccaaggctggggggtcaccagccccgggccccgagaccccagctattagccccagcaaacgagcccggccagccgaagtaggagggatgcaactgaggtttgcgcggttgagcgagcatgctaccgccccaacccgaggttctgcccgggctgctgggtatgacctgtatagcgcttacgactatacaataccgccaatggagaaggctgtggtcaagactgatatccagattgcattgcccagtggctgctatggcagagtagccccgagatccgggttagctgccaaacattttatagatgtgggggcgggcgttattgatgaagactatcgcggaaatgtgggggtggtcctgttcaactttggaaaggagaaattcgaggttaagaaaggcgatcgcattgctcagctgatctgcgagagaatcttctaccccgaaatagaagaggtccaagccctggatgacacggagagaggctcgggtgggtttggttccactgggaagaattag

SEQ ID NO: 28771 - DNA, 759 bp, Artificial Sequence
  derived and/or modified sequence
atgacaccgctttgtccccggcccgctctttgctatcacttccttacatcactactgaggtcagccatgcaaaacgcccggggcgctagacaacgtgccgaggcagccgtgctgtccgggcccgggccaccactgggacgcgctgcgcagcatgggataccacgtccactcagctccgccgggcgcttatcacagggatgccggggggcaagtaccgtcggggcagctggatggaaaggggagctgcccaaagcaggcggatcaccagcgcctgggcctgagacccctgccatttcccccagcaaacgcgccaggccagctgaagttggcggcatgcagctgcgttttgcccgcctgtctgagcacgccactgcacctaccagaggaagcgccagggccgcgggttacgacttgtactccgcctatgactacactatacctccaatggagaaagccgtggtgaaaaccgatattcagatcgctttgcctagcgggtgttacgggagagtcgccccccgttcgggattggccgccaagcattttatcgatgttggcgctggagtgatcgatgaagactacagaggtaacgtgggcgtcgtgcttttcaatttcggtaaggagaaatttgaagtgaagaaaggagaccgaatcgcgcagctgatttgcgagcggattttctaccctgaaattgaggaagtccaggctctcgatgacaccgaaagaggaagcggtggttttggaagcacgggtaaaaactag

SEQ ID NO: 28772 - DNA, 753 bp, Artificial Sequence
  derived and/or modified sequence
atgacccccctgtgccccaggcctgccctgtgctaccacttcctgaccagcctgctgcggagcgccatgcagaatgccaggacagctgagggccgcagccggggcaccctgcgggcccggcctgcccccaggcctgctgcccagcacggcatcccccggcccctgagcagcgctggccgcctgagccagggctgccgcggggccagcacagtgggcgccgccggctggaagggggagctgcccaaggccggcggcagccctgcccctggccctgagaccccagccatcagccccagcaagagggcccggcctgctgaggtgggcggcatgcagctgcgctttgcccggctgtctgagcacgccacagcccccacccggggcagcgcccgggccgccggctatgacctgtacagcgcctatgactacaccatcccccccatggagaaggctgtggtgaagacagacatccagatcgccctgcccagcggctgctacggccgggtggcccccaggagcggcctggccgccaagcacttcattgatgtgggcgctggggtgattgatgaggactacagaggaaatgtgggcgtggtgctcttcaactttgggaaggagaagtttgaggtgaagaagggggacagaattgcccagctgatctgtgagcgcatcttctacccagaaattgaggaggtgcaggccctggatgacacagagcggggcagcggcggcttcggcagcacaggcaagaactag

SEQ ID NO: 28773 - DNA, 759 bp, Artificial Sequence
  derived and/or modified sequence
atgacccccctgtgccccaggcctgccctgtgctaccacttcctgaccagcctgctgcggagcgccatgcagaatgcccggggggcccggcagagagctgaggccgctgtgctgagcggccctggcccccccctgggccgggccgcccagcacggcatcccccggcccctgagcagcgctggccgcctgagccagggctgccgcggggccagcacagtgggcgccgccggctggaagggggagctgcccaaggccggcggcagccctgcccctggccctgagaccccagccatcagccccagcaagagggcccggcctgctgaggtgggcggcatgcagctgcgctttgcccggctgtctgagcacgccacagcccccacccggggcagcgcccgggccgccggctatgacctgtacagcgcctatgactacaccatcccccccatggagaaggctgtggtgaagacagacatccagatcgccctgcccagcggctgctacggccgggtggcccccaggagcggcctggccgccaagcacttcattgatgtgggcgctggggtgattgatgaggactacagaggaaatgtgggcgtggtgctcttcaactttgggaaggagaagtttgaggtgaagaagggggacagaattgcccagctgatctgtgagcgcatcttctacccagaaattgaggaggtgcaggccctggatgacacagagcggggcagcggcggcttcggcagcacaggcaagaactag

SEQ ID NO: 28774 - DNA, 753 bp, Artificial Sequence
  derived and/or modified sequence
atgacccccctgtgcccccggcccgccctgtgctaccacttcctgacatcactcttacgaagcgcaatgcagaatgccaggacagccgaaggccggagccgggggaccctgcgcgcaaggccggccccgcgtcctgccgctcagcacggtattccccgcccgctgagctcagcaggaaggctctcccagggatgccgtggcgccagtaccgtaggagctgctggatggaaaggggagcttccaaaagccggcggcagccccgctccgggaccggagacacctgcaatttccccctccaaacgagctagaccagccgaggtcggaggaatgcaactcaggtttgctcgactatccgaacatgccaccgcccctacgcggggctcagcacgcgccgctggatacgacctctattccgcgtacgattacacaatcccgcccatggaaaaggcagtggtaaaaacagacatacagatcgccttgccttcagggtgctacggcagagtggccccccgctccggactggccgccaagcactttatcgatgtgggcgccggggtgatcgatgaagattaccgcggcaacgtgggcgtagtcttgttcaatttcgggaaagagaagtttgaggtgaaaaagggcgatcgaattgctcagctgatttgcgaacgaatcttctaccccgaaattgaagaggttcaagccctcgatgacacagaaagaggatctggaggatttggttcaaccggaaaaaactag

SEQ ID NO: 28775 - DNA, 759 bp, Artificial Sequence
  derived and/or modified sequence
atgacccccctgtgcccccggcccgccctgtgctaccacttcctgacctccctgctccggtcagccatgcagaacgcgcgtggcgcccgccagcgggcagaggcggccgtactctccggcccgggtcccccattaggaagggctgcccaacatggaatccctcggcccctttcttcagccggaaggttgtcgcaagggtgccgaggggcttcaacggtgggcgctgccggttggaagggtgaactgcctaaagcaggagggtcccctgcccctggacctgaaactcccgcgatctcaccatctaagcgcgcgagacccgccgaggtaggcggaatgcagctacgattcgctaggctgagtgaacacgctaccgcgcctacaagaggatcagcccgagccgcagggtacgacttatactcagcttatgactatactatacctcctatggaaaaggccgtggtcaaaaccgatattcagatcgccctaccgagcggctgctacggccgagtggccccccgctctggactggccgccaagcactttattgatgtgggtgccggagttattgatgaggattatcggggaaatgtcggagtagttctgtttaacttcggtaaggagaagtttgaggtaaagaaaggcgaccgcatagctcagttgatctgcgagcgcatcttttaccctgagatagaagaggtccaagcgctcgatgatacggagcgcggctccggaggattcgggagcaccggtaagaactag

SEQ ID NO: 28776 - DNA, 753 bp, Artificial Sequence
  derived and/or modified sequence
atgacaccgctctgtcccagaccagccctctgctatcactttttaaccagcttactgaggtctgcgatgcagaatgctaggaccgccgaaggcaggagtcgtggcacgttgcgagccaggcctgctccgcgacctgccgctcagcacggcattccacgtcctctaagtagcgccggaaggctgtcgcaggggtgccgaggcgcatcaacagtgggtgctgccggatggaagggcgaactccctaaagcaggcggatcacctgcccctggccctgagactcccgctattagcccctccaaacgggctcgtcctgcggaagtgggcggtatgcagttacgcttcgcacgtcttagcgagcatgctaccgctccgacccggggtagcgctagagccgctgggtatgacctgtatagcgcttatgactatacaatcccgcctatggagaaggctgttgtcaaaacagatatccagattgcactcccctcgggctgctacggccgtgtggctcccaggagtggcctggctgccaagcatttcattgatgtgggcgctggcgtcatcgatgaggactaccggggaaacgtgggcgtggtgttgtttaacttcggaaaggagaagtttgaggtgaagaagggagacaggatcgcccagcttatttgtgaacgtattttttatcctgagatagaagaagttcaagccctggatgatacagagcgcggatcaggcggttttggcagcacgggcaaaaattag

SEQ ID NO: 28777 - DNA, 759 bp, Artificial Sequence
  derived and/or modified sequence
atgacccctctgtgccctcgaccggctctgtgctaccatttcttgacgagcctcctgagaagcgcgatgcaaaatgccaggggcgcacggcagcgggctgaagcagccgtccttagcggaccaggacctcccctgggacgggctgcccagcacggcatccccagacctctgagttccgcaggcaggctttctcaaggttgcaggggcgctagcacagtcggtgctgccggttggaaaggggagctacctaaggccggaggctcgccggctcccggtcctgagacacctgccatctctccttccaagcgcgctaggccagctgaagtcggcggaatgcagcttcgcttcgctcgattgtctgaacacgccacagcacccacgaggggcagcgcgagagcagccggttacgacctgtattcagcttacgactatacaattcccccaatggagaaagctgtggtgaagaccgatatccaaattgcacttccaagcggctgctatgggcgtgtagcacctaggtccggtctggcagcaaagcacttcattgatgtgggcgctggcgtgatcgatgaggattacagaggcaacgtgggtgtggtgctgtttaactttggtaaggagaaatttgaggtcaaaaagggagacaggattgcccagctcatctgcgagcgcatattctaccccgaaatcgaggaagtgcaggctctggacgacactgagaggggctcggggggtttcggcagtaccggcaaaaattag

SEQ ID NO: 28778 - DNA, 753 bp, Artificial Sequence
  derived and/or modified sequence
atgacccccctgtgccccagacccgccctgtgctaccacttcctgaccagcctgctgagaagcgccatgcagaacgccagaaccgccgagggcagaagcagaggcaccctgagagccagacccgcccccagacccgccgcccagcacggcatccccagacccctgagcagcgccggcagactgagccagggctgcagaggcgccagcaccgtgggcgccgccggctggaagggcgagctgcccaaggccggcggcagccccgcccccggccccgagacccccgccatcagccccagcaagagagccagacccgccgaggtgggcggcatgcagctgagattcgccagactgagcgagcacgccaccgcccccaccagaggcagcgccagagccgccggctacgacctgtacagcgcctacgactacaccatcccccccatggagaaggccgtggtgaagaccgacatccagatcgccctgcccagcggctgctacggcagagtggcccccagaagcggcctggccgccaagcacttcatcgacgtgggcgccggcgtgatcgacgaggactacagaggcaacgtgggcgtggtgctgttcaacttcggcaaggagaagttcgaggtgaagaagggcgacagaatcgcccagctgatctgcgagagaatcttctaccccgagatcgaggaggtgcaggccctggacgacaccgagagaggcagcggcggcttcggcagcaccggcaagaactag

SEQ ID NO: 28779 - DNA, 759 bp, Artificial Sequence
  derived and/or modified sequence
atgacccccctgtgccccagacccgccctgtgctaccacttcctgaccagcctgctgagaagcgccatgcagaacgccagaggcgccagacagagagccgaggccgccgtgctgagcggccccggcccccccctgggcagagccgcccagcacggcatccccagacccctgagcagcgccggcagactgagccagggctgcagaggcgccagcaccgtgggcgccgccggctggaagggcgagctgcccaaggccggcggcagccccgcccccggccccgagacccccgccatcagccccagcaagagagccagacccgccgaggtgggcggcatgcagctgagattcgccagactgagcgagcacgccaccgcccccaccagaggcagcgccagagccgccggctacgacctgtacagcgcctacgactacaccatcccccccatggagaaggccgtggtgaagaccgacatccagatcgccctgcccagcggctgctacggcagagtggcccccagaagcggcctggccgccaagcacttcatcgacgtgggcgccggcgtgatcgacgaggactacagaggcaacgtgggcgtggtgctgttcaacttcggcaaggagaagttcgaggtgaagaagggcgacagaatcgcccagctgatctgcgagagaatcttctaccccgagatcgaggaggtgcaggccctggacgacaccgagagaggcagcggcggcttcggcagcaccggcaagaactag

SEQ ID NO: 28780 - DNA, 1170 bp, Artificial Sequence
  derived and/or modified sequence
gggcgcgtcttcagggtggaagcctggcgcacgtccggaggtgccgaggacccaaccagcccaaactctgggggaaatgactcccctctgccctcgccccgcgctctgctaccatttccttacgtctctgcttcgctcagcgatgcaaaacgcgcgaacggcagagggccgaagccgcggtactctccgggccaggcccgcccctcggccggccgcgcagcacgggattccccggccgctgtccagcgctggccgcctgagccaaggctgccgcggagccagtacagtcggggccgctggctggaagggcgagcttcctaaggcggggggaagcccggcgccggggccggagacacccgccatttcacccagtaagcgggcccggcctgcggaggtgggcggcatgcagctccgctttgcccggctctccgagcacgccacggcccccacccggggctccgcgcgcgccgcgggctacgacctgtacagtgcctatgattacacaataccacctatggagaaagctgttgtgaaaacggacattcagatagcgctcccttctgggtgttatggaagagtggctccacggtcaggcttggctgcaaaacactttattgatgtaggagctggtgtcatagatgaagattatagaggaaatgttggtgttgtactgtttaattttggcaaagaaaagtttgaagtcaaaaaaggtgatcgaattgcacagctcatttgcgaacggattttttatccagaaatagaagaagttcaagccttggatgacaccgaaaggggttcaggaggttttggttccactggaaagaattaaaatttatgccaagaacagaaaacaagaagtcatacctttttcttaaaaaaaaaaaaaaagtttttgcttcaagtgttttggtgttttgcacttctgtaaacttactagctttaccttctaaaagtactgcattttttacttttttttatgatcaaggaaaagatcattaaaaaaaaacacaaagaagtttttctttgtgtttggatcaaaaagaaactttgtttttccgcaattgaaggttgtatgtaaatctgctttgtggtgacctgatgtaaacagtgtcttcttaaaatcaaatgtaaatcaattacagattaaaaaaaaaagcctgtatttaactc

SEQ ID NO: 28781 - DNA, 2147 bp, Artificial Sequence
  derived and/or modified sequence
ggtcatgttcccaggacgggcgcgtcttcagggtggaagcctggcgcacgtccggaggtgccgaggacccaaccagcccaaactctgggggaaatgactcccctctgccctcgccccgcgctctgctaccatttccttacgtctctgcttcgctcagcgatgcaaaacgcgcgaggcgcacggcagagggccgaagccgcggtactctccgggccaggcccgcccctcggccgcgccgcgcagcacgggattccccggccgctgtccagcgctggccgcctgagccaaggctgccgcggagccagtacagtcggggccgctggctggaagggcgagcttcctaaggcggggggaagcccggcgccggggccggagacacccgccatttcacccagtaagcgggcccggcctgcggaggtgggcggcatgcagctccgctttgcccggctctccgagcacgccacggcccccacccggggctccgcgcgcgccgcgggctacgacctgtacagtgcctatgattacacaataccacctatggagaaagctgttgtgaaaacggacattcagatagcgctcccttctgggtgttatggaagagtggctccacggtcaggcttggctgcaaaacactttattgatgtaggagctggtgtcatagatgaagattatagaggaaatgttggtgttgtactgtttaattttggcaaagaaaagtttgaagtcaaaaaaggtgatcgaattgcacagctcatttgcgaacggattttttatccagaaatagaagaagttcaagccttggatgacaccgaaaggggttcaggaggttttggttccactggaaagaattaaaatttatgccaagaacagaaaacaagaagtcatacctttttcttaaaaaaaaaaaaaaagtttttgcttcaagtgttttggtgttttgcacttctgtaaacttactagctttaccttctaaaagtactgcattttttacttttttttatgatcaaggaaaagatcattaaaaaaaaacacaaagaagtttttctttgtgtttggatcaaaaagaaactttgtttttccgcaattgaaggttgtatgtaaatctgctttgtggtgacctgatgtaaacagtgtcttcttaaaatcaaatgtaaatcaattacagattaaaaaaaaaagcctgtatttaactcatatgatctcccttcagcaacttattttgctttaattgctttaaatcttaagcaatattttttattcagtaaacaaattctttcacaaggtacaaaatcttgcataagctgaactaaaataaaaatgaaaaggagagattaaaggtattccttgttcttcccttctcttcactagtctaaaaacttctttttaatcttaagattctttgtgatgagggtgagaaaaagaatcctcagtttatttttccactattaatctttcttttgataaatcctctattgactgggtagaggtatgtttgtgaaagacatgtaacttggggatttgttactttaggtttgttcccttgaatttcatctcatcaggcaaattgtactagttgtagttacgagttttccctcagtgaagtagcaataggctgtaatcaagaaaatatgccatttatagagataagataaatgaaataatacttcagccaccaggtttttctgtctcacatacataagcagcatttcattgcagatatgggactgattctgtggcttaccttgattaacatcttttggaagttttgctagtgtgctttcctttctttactatgtttctcagattcctttgtatcagggttttgggtgtcacttaggttttgtccatcagattctgtgagacaccaggcatcgttttgaggatgtgggttatacacatggagtgcttctggaactatcagcccacttgaccacccagtttgtggaagcacaggcaagagtgttcttttctggtgattctccaggccatttaataccctgcaatgtaattgtccctctgtggctcacatttcattagtgagccatgaaatcaactcagtgggacatagccagcatttttgcataccaggttgggctataaaatatttctgttgtcaataaattttaaatgttttcctgctaaactaa

SEQ ID NO: 28782 - DNA, 426 bp, Artificial Sequence
  derived and/or modified sequence
atgcaactccgctttgctagactgagtgagcacgccacggcccctactcggggcagcgccagggcagcaggatacgacttatatagtgcgtatgactatacaattccacccatggaaaaggccgtcgtcaaaacagatatccaaattgctctcccctctggctgttacggcagggttgccccaagatccggcctggccgccaagcacttcattgacgtgggtgcaggagtaatcgatgaggactaccgtggaaatgttggggtcgtgctgttcaactttggaaaggaaaagtttgaggttaaaaaaggagatcgcatcgcacagctgatttgcgaacgtattttctaccccgaaattgaggaggttcaagctctcgatgatacggagaggggctccggggggttcgggagcaccggaaaaaactag

SEQ ID NO: 28783 - DNA, 426 bp, Artificial Sequence
  derived and/or modified sequence
atgcagctgcgctttgcccggctgtctgaacatgccacagcccccacccggggcagcgcccgggctgctggctatgacctgtacagcgcctatgactacaccatcccccccatggagaaggctgtggtgaagacagacatccagatcgccctgcccagcggctgctacggccgggtggcccccaggagcggcctggccgccaagcacttcattgatgtgggcgctggggtgattgatgaggactacagaggaaatgtgggcgtggtgctcttcaactttgggaaggagaagtttgaggtgaagaagggggaccgcatcgcccagctgatctgtgagcgcatcttctacccagaaattgaggaggtgcaggccctggatgacacagagcggggcagcggcggcttcggcagcacaggcaagaactag

SEQ ID NO: 28784 - DNA, 426 bp, Artificial Sequence
  derived and/or modified sequence
atgcagctgcggttcgcccggctgagcgagcacgccaccgcccccacccggggatccgcacgggctgctggatatgatttatacagtgcatacgactatacgatccctccgatggaaaaagccgttgtgaaaacagacatccagatcgccttgccttccgggtgctatggccgggtcgccccaagatcaggactggccgccaagcactttatagacgtaggagcaggagtgatcgacgaggattacagagggaacgtgggagtagtattgttcaattttgggaaagaaaagttcgaggtgaagaaaggagaccgcattgcacagcttatttgcgaacggatcttctacccagaaatagaggaggtgcaagctcttgatgacaccgaacgcggatctggtggttttggttcaaccggcaagaattag

SEQ ID NO: 28785 - DNA, 426 bp, Artificial Sequence
  derived and/or modified sequence
atgcagctgcggtttgctaggctctccgagcacgcaaccgcccctacacggggttctgccagggcagcaggctacgatctctactccgcttacgattataccatacctccgatggagaaagccgtcgtcaaaactgacatccagattgcacttccaagcggctgttacgggcgtgttgcccctagatcagggctggccgcaaaacactttatcgatgttggagccggagtcatcgacgaggactatagggggaacgttggcgtggtactgttcaatttcggtaaggaaaagttcgaggtgaagaagggcgatcgaatcgcacagctgatttgtgagaggattttctacccagaaattgaagaggtgcaagcactggatgatacggagcgcggttctggagggttcgggtcgacagggaagaattag

SEQ ID NO: 28786 - DNA, 426 bp, Artificial Sequence
  derived and/or modified sequence
atgcagctgagattcgccagactgagcgagcacgccaccgcccccaccagaggcagcgccagagccgccggctacgacctgtacagcgcctacgactacaccatcccccccatggagaaggccgtggtgaagaccgacatccagatcgccctgcccagcggctgctacggcagagtggcccccagaagcggcctggccgccaagcacttcatcgacgtgggcgccggcgtgatcgacgaggactacagaggcaacgtgggcgtggtgctgttcaacttcggcaaggagaagttcgaggtgaagaagggcgacagaatcgcccagctgatctgcgagagaatcttctaccccgagatcgaggaggtgcaggccctggacgacaccgagagaggcagcggcggcttcggcagcaccggcaagaactag

SEQ ID NO: 28787 - protein, 224 aa, Artificial Sequence
  derived and/or modified sequence
MDCREMDLYEDYQSPFDFDAGVNKSYLYLSPSGNSSPPGSPTLQKFGLLRTDPVPEEGEDVAATISATETLSEEEQEELRRELAKVEEEIQTLSQVLAAKEKHLAEIKRKLGINSLQELKQNIAKGWQDVTATSAYKKTSETLSQAGQKASAAFSSVGSVITKKLEDVKNSPTFKSFEEKVENLKSKVGGTKPAGGDFGEVLNSAANASATTTEPLPEKTQESL

SEQ ID NO: 28788 - protein, 184 aa, Artificial Sequence
  derived and/or modified sequence
MNRSQPGLLRTDPVPEEGEDVAATISATETLSEEEQEELRRELAKVEEEIQTLSQVLAAKEKHLAEIKRKLGINSLQELKQNIAKGWQDVTATSAYKKTSETLSQAGQKASAAFSSVGSVITKKLEDVKNSPTFKSFEEKVENLKSKVGGTKPAGGDFGEVLNSAANASATTTEPLPEKTQESL

SEQ ID NO: 28789 - protein, 278 aa, Artificial Sequence
  derived and/or modified sequence
MDCREMDLYEDYQSPFDFDAGVNKSYLYLSPSGNSSPPGSPTLQKFGLLRTDPVPEEGEDVAATISATETLSEEEQEELRRELAKVEEEIQTLSQVLAAKEKHLAEIKRKLGINSLQELKQNIAKGWQDVTATSAYKKTSETLSQAGQKASAAFSSVGSVITKKLEDVKNSPTFKSFEEKVENLKGSPKNVESFASMLRHSPLTQMGPAKDKLVIGRIFHIVENDLYIDFGGKFHCVCRRPEVDGESPISWYAVWRRFSQVMITCFSSNSDFGKHRKR

SEQ ID NO: 28790 - DNA, 675 bp, Artificial Sequence
  derived and/or modified sequence
atggactgcagagagatggacctgtacgaggactaccagagccccttcgacttcgacgccggcgtgaacaagagctacctgtacctgagccccagcggcaacagcagcccccccggcagccccaccctgcagaagttcggcctgctgagaaccgaccccgtgcccgaggagggcgaggacgtggccgccaccatcagcgccaccgagaccctgagcgaggaggagcaggaggagctgagaagagagctggccaaggtggaggaggagatccagaccctgagccaggtgctggccgccaaggagaagcacctggccgagatcaagagaaagctgggcatcaacagcctgcaggagctgaagcagaacatcgccaagggctggcaggacgtgaccgccaccagcgcctacaagaagaccagcgagaccctgagccaggccggccagaaggccagcgccgccttcagcagcgtgggcagcgtgatcaccaagaagctggaggacgtgaagaacagccccaccttcaagagcttcgaggagaaggtggagaacctgaagagcaaggtgggcggcaccaagcccgccggcggcgacttcggcgaggtgctgaacagcgccgccaacgccagcgccaccaccaccgagcccctgcccgagaagacccaggagagcctgtag

SEQ ID NO: 28791 - DNA, 837 bp, Artificial Sequence
  derived and/or modified sequence
atggactgcagagagatggacctgtacgaggactaccagagccccttcgacttcgacgccggcgtgaacaagagctacctgtacctgagccccagcggcaacagcagcccccccggcagccccaccctgcagaagttcggcctgctgagaaccgaccccgtgcccgaggagggcgaggacgtggccgccaccatcagcgccaccgagaccctgagcgaggaggagcaggaggagctgagaagagagctggccaaggtggaggaggagatccagaccctgagccaggtgctggccgccaaggagaagcacctggccgagatcaagagaaagctgggcatcaacagcctgcaggagctgaagcagaacatcgccaagggctggcaggacgtgaccgccaccagcgcctacaagaagaccagcgagaccctgagccaggccggccagaaggccagcgccgccttcagcagcgtgggcagcgtgatcaccaagaagctggaggacgtgaagaacagccccaccttcaagagcttcgaggagaaggtggagaacctgaagggcagccccaagaacgtggagagcttcgccagcatgctgagacacagccccctgacccagatgggccccgccaaggacaagctggtgatcggcagaatcttccacatcgtggagaacgacctgtacatcgacttcggcggcaagttccactgcgtgtgcagaagacccgaggtggacggcgagagccccatcagctggtacgccgtgtggagaagattcagccaggtgatgatcacctgcttcagcagcaacagcgacttcggcaagcacagaaagagatag

SEQ ID NO: 28792 - DNA, 456 bp, Artificial Sequence
  derived and/or modified sequence
atggactgcagagagatggacctgtacgaggactaccagagccccttcgacttcgacgccggcgtgaacaagagctacctgtacctgagccccagcggcaacagcagcccccccggcagccccaccctgcagaagttcggcctgctgagaaccgaccccgtgcccgaggagggcgaggacgtggccgccaccatcagcgccaccgagaccctgagcgaggaggagcaggaggagctgagaagagagctggccaaggtggaggaggagatccagaccctgagccaggtgctggccgccaaggagaagcacctggccgagatcaagagaaagctgggcatcaacagcctgcaggagctgaagcagaacatcgccaagggctggcaggacgtgaccgccaccagcgccagaagcaagctgctggccgccgagaccgagctgctgtgcctgctgtactag

SEQ ID NO: 28793 - DNA, 675 bp, Artificial Sequence
  derived and/or modified sequence
atggattgcagagaaatggacctatatgaggattatcaatcaccctttgatttcgacgccggtgtgaataaatcctacctttatttgtctccttctgggaattcaagtccccccggcagtcctacactgcagaagttcggactgctccgcaccgacccagtacctgaggagggggaagatgtggcagctaccatatcagccaccgagacactttcagaagaagagcaggaggaactgagaagagagctcgcgaaagtcgaggaggagatacagactctttcccaagtattggccgccaaagaaaagcacctcgctgaaatcaagcggaagctggggataaactccctgcaagagctcaaacagaatatcgccaagggctggcaagacgttacggcaaccagtgcttacaaaaagacaagtgagaccctcagccaagctgggcagaaggcctccgcagctttcagtagtgtgggatcagtaattacaaaaaaattagaggacgttaagaatagcccaacctttaaatcgtttgaagagaaagttgagaacctcaagagtaaagtcggcgggacaaagcccgctggcggcgacttcggtgaagtgctgaattccgccgccaacgcttccgctacaacaacagagcctctgcctgagaagactcaggaaagtttatag

SEQ ID NO: 28794 - DNA, 837 bp, Artificial Sequence
  derived and/or modified sequence
atggattgtagagaaatggacctttacgaagattaccagtcaccattcgacttcgatgccggcgtcaataagagctacctctatctctcgccttctggcaactctagcccgccagggagtccaacactccaaaaatttggtctactccgaactgaccctgtccctgaagaaggggaagatgtggcggcaactatctctgcgactgagactttgtccgaagaagaacaggaagagctcagaagagagctggccaaggtggaggaggaaatccagaccctgtctcaggttctggctgcaaaggagaagcacctcgcggagattaagcgcaagctcggcataaactctctgcaggaattgaaacaaaatatcgccaaaggatggcaggacgtcaccgcaacttccgcctataaaaagacgtcagagaccctttcccaggccggtcaaaaggccagcgcggctttcagctcagttggaagtgtgatcaccaaaaagctggaagatgtgaagaactccccaacatttaaaagttttgaggagaaagttgagaacttgaaggggagcccaaaaaatgttgagtcttttgcctccatgctcagacattctccactcacacaaatgggtcctgctaaggacaagttggtcatcgggcgcattttccacatagtggagaacgacctgtatatagactttggtggcaagttccattgcgtgtgcaggcggcctgaggtagatggcgagtcccccatttcttggtatgccgtgtggcgtagattctcacaggtgatgattacctgtttttcctctaactctgattttgggaagcatcggaaacggtag

SEQ ID NO: 28795 - DNA, 456 bp, Artificial Sequence
  derived and/or modified sequence
atggactgtcgggagatggacctctatgaggattatcagagcccttttgactttgacgcgggcgtgaacaagtcttacttgtacctctcaccctccggcaattcatcaccacctggcagtcctactcttcagaagttcggcctgctccggacggatccagttcctgaggaaggagaagatgttgctgccaccatcagtgccacggaaacactcagcgaagaggagcaggaggaactgagacgagaacttgctaaagtggaggaggaaatccagactctgagtcaggtcctggccgctaaggagaaacacttggcagaaatcaaacgcaaactgggtattaattcgctgcaggaactcaaacagaacatagctaaggggtggcaggatgtgacggctacctctgccagatccaagctcctggccgctgaaacggaactgttgtgcttgttatattag

SEQ ID NO: 28796 - DNA, 675 bp, Artificial Sequence
  derived and/or modified sequence
atggactgccgggagatggacctgtatgaggactaccagagcccctttgattttgatgctggggtgaacaagagctacctgtacctgagccccagcggcaacagcagccccccaggcagccccaccctgcagaagtttggcctgctgaggacagatcctgtgcctgaggagggagaagatgtggccgccaccatcagcgccacagagaccctgtctgaggaggagcaggaggagctgcggcgggagctggccaaggtggaggaggagatccagaccctgagccaggtgctggccgccaaggagaagcacctggccgagatcaagaggaagctgggcatcaacagcctgcaggagctgaagcagaacatcgccaagggctggcaggatgtgacagccaccagcgcctacaagaagaccagcgagaccctgagccaggccggccagaaggccagcgctgccttcagctctgtgggcagcgtcatcaccaagaagctggaggatgtgaagaacagccccaccttcaagagctttgaggagaaggtggagaacctgaagagcaaggtgggcggcaccaagccagctggaggagactttggagaggtgctgaacagcgctgccaatgccagcgccaccaccacagagcccctgcctgagaagacccaggagagcctgtag

SEQ ID NO: 28797 - DNA, 2563 bp, Artificial Sequence
  derived and/or modified sequence
gcctgaactgtttgtacctctgggccatattgcagaaccctgcccttctttgttgactgaggaaagctcgctccctgcccaggtttttcattgttgatcgaaattaacaccaggtggtgaatagagcccctcctaaggttgctcaggataaatcatttattaaataggtctgcttatcaggaggggcgtgaaggctcccaaaaggaaatgctggcacctgggcccagaagccagggcctctaactcctggggttgatttcttcagtgaagttgcaccctacaaagggaatatggccaaagcggcactcaactgaaggctgatatcaggcgattagacagccatgcattctgcgtttgtctggaatggattgtagagagatggacttatatgaggactaccagtccccgtttgattttgatgcaggagtgaacaaaagctatctctacttgtctcctagtggaaattcatctccacccggatcacctactcttcagaaatttggtctgctgagaacagacccagtccctgaggaaggagaagatgttgctgccacgatcagtgccacagagaccctctcggaagaggagcaggaagagctaagaagagaacttgcaaaggtagaagaagaaatccagactctgtctcaagtgttagcagcaaaagagaagcatctagcagagatcaagcggaaacttggaatcaattctctacaggaactaaaacagaacattgccaaagggtggcaagacgtgacagcaacatctgcttacaagaagacatctgaaaccttatcccaggctggacagaaggcctcagctgctttttcgtctgttggctcagtcatcaccaaaaagctggaagatgtaaaaaactccccaacttttaaatcatttgaagaaaaggtcgaaaacttaaagtctaaagtagggggaaccaagcctgctggtggtgattttggagaagtcttgaattcggctgcaaatgctagtgccaccaccacggagcctcttccagaaaagacacaggagagcctgtgagattcctacctttgttctgctacccactgccagatgctgcaagcgaggtccaagcacatcttgtcaacatgcattgccatgaatttctaccagatgtgcttttatttagctttacatattcctttgaccaaatagtttgtgggttaaacaaaatgaaaatatcttcacctctattcttgggaaacaccctttagtgtacatttatgttcctttatttaggaaacaccattataaaaacacttatagtaaatggggacattcactataatgatctaagaagctacagattgtcatagttgttttcctgctttacaaaattgctccagatctggaatgccagtttgacctttgtcttctataatatttcctttttttcccctctttgaatctctgtatatttgattcttaactaaaattgttctcttaaatattctgaatcctggtaattaaaagtttgggtgtattttctttacctccaaggaaagaactactagctacaaaaaatattttggaataagcattgttttggtataaggtacatattttggttgaagacaccagactgaagtaaacagctgtgcatccaatttattatagttttgtaagtaacaatatgtaatcaaacttctaggtgacttgagagtggaacctcctatatcattatttagcaccgtttgtgacagtaaccatttcagtgtattgtttattataccacttatatcaacttatttttcaccaggttaaaattttaatttctacaaaataacattctgaatcaagcacactgtatgttcagtaggttgaactatgaacactgtcatcaatgttcagttcaaaagcctgaaagtttagatctagaagctggtaaaaatgacaatatcaatcacattaggggaaccattgttgtcttcacttaatccatttagcactatttaaaataagcacaccaagttatatgactaatataacttgaaaattttttatactgaggggttggtgataactcttgaggatgtaatgcattaataaaaatcaactcatcattttctacttgttttcaatgtgttggaaactgtaaaatgatactgtagaacctgtctcctactttgaaaactgaatgtcagggctgagtgaatcaaagtgtctagacatatttgcatagaggccaaggtattctattctaataactgcttactcaacactaccaccttttccttatactgtatatgattatggcctacaatgttgtatttgttatttattaaattgtgattgttttattattgtttatgccaaatgttaactgccaagcttggagtgacctaaagcattttttaaaagcatggctagatttacttcagtataaattatcttatgaaaaccaaattttaaaagccacaggtgttgattgttataaaataacatgctgccattcttgattgctagagtttttgttagtactttggatgcaattaaaactatgtgctatcacatgtgaaaagcttaataaattccatctatcagt

SEQ ID NO: 28798 - DNA, 837 bp, Artificial Sequence
  derived and/or modified sequence
atggactgccgggagatggacctgtatgaggactaccagagcccctttgattttgatgctggggtgaacaagagctacctgtacctgagccccagcggcaacagcagccccccaggcagccccaccctgcagaagtttggcctgctgaggacagatcctgtgcctgaggagggagaagatgtggccgccaccatcagcgccacagagaccctgtctgaggaggagcaggaggagctgcggcgggagctggccaaggtggaggaggagatccagaccctgagccaggtgctggccgccaaggagaagcacctggccgagatcaagaggaagctgggcatcaacagcctgcaggagctgaagcagaacatcgccaagggctggcaggatgtgacagccaccagcgcctacaagaagaccagcgagaccctgagccaggccggccagaaggccagcgctgccttcagctctgtgggcagcgtcatcaccaagaagctggaggatgtgaagaacagccccaccttcaagagctttgaggagaaggtggagaacctgaagggcagccccaagaatgtggagagctttgcctccatgctgcggcacagccccctgacccagatgggccctgccaaggacaagctggtgattggccgcatcttccacatcgtggagaatgacctgtacatcgactttggaggcaagttccactgtgtgtgcagaagacctgaggtggatggagagagccccatctcctggtatgctgtgtggaggcgcttcagccaggtgatgatcacctgcttcagcagcaacagcgactttgggaagcacaggaagaggtag

SEQ ID NO: 28799 - DNA, 456 bp, Artificial Sequence
  derived and/or modified sequence
atggactgccgggagatggacctgtatgaggactaccagagcccctttgattttgatgctggggtgaacaagagctacctgtacctgagccccagcggcaacagcagccccccaggcagccccaccctgcagaagtttggcctgctgaggacagatcctgtgcctgaggagggagaagatgtggccgccaccatcagcgccacagagaccctgtctgaggaggagcaggaggagctgcggcgggagctggccaaggtggaggaggagatccagaccctgagccaggtgctggccgccaaggagaagcacctggccgagatcaagaggaagctgggcatcaacagcctgcaggagctgaagcagaacatcgccaagggctggcaggatgtgacagccaccagcgcccggagcaagctgctggccgctgagacagagctgctgtgcctgctgtactag

SEQ ID NO: 28800 - DNA, 675 bp, Artificial Sequence
  derived and/or modified sequence
atggactgccgggagatggacctgtacgaggactaccagagccccttcgacttcgacgcgggcgtgaataaatcctatctatacttgagcccatccggtaattcctccccgccgggatctccaactctgcagaagtttggtttgctgcggacagatcccgtgcccgaggagggcgaggacgtggctgcaaccattagtgcgacggagactttgtccgaggaggagcaggaagagctccggagggagctggccaaggtggaagaagaaatacagactttatctcaagtgctggctgcgaaggaaaagcatttggcagagattaaaagaaaactgggcattaacagtctacaggaactgaaacaaaatatagctaaaggttggcaagacgtcactgccacgagcgcgtataaaaagactagtgaaaccctctctcaagccgggcagaaagcttccgctgccttctcgtcagtcggcagcgtcatcactaagaagcttgaggatgtgaagaattcccccaccttcaaatcctttgaggaaaaggtggagaatttaaagagcaaggtcggtgggaccaaacccgcaggaggcgatttcggggaagtcttgaactcagccgcaaacgcttccgccaccacaacggaaccactgcctgagaaaacacaggaatccttgtag

SEQ ID NO: 28801 - DNA, 837 bp, Artificial Sequence
  derived and/or modified sequence
atggactgccgggagatggacctgtacgaggactaccagagccccttcgatttcgacgcaggggttaacaagtcctatctgtacttatccccctccgggaatagttctccaccaggttctcccacgctacagaaattcggattgctcagaactgaccccgtaccggaggagggagaagacgtggccgcgactatttcggccaccgaaacacttagcgaggaggagcaggaggagctccggcgtgagctggcaaaggtagaagaggagatccaaaccctttcccaggtgctggctgctaaggaaaaacacctggcagagataaagaggaagctggggatcaatagtctccaggagcttaaacagaatatcgccaagggatggcaagatgtcaccgcaacctccgcatataagaagaccagtgagactctctcgcaggctggtcagaaagcttcagcagccttttcttcggttggtagtgtcataaccaagaaactggaggatgtgaaaaactcccctaccttcaaatcattcgaggaaaaagtcgaaaatcttaaagggtctcccaagaatgttgagagcttcgcctctatgctgcgccattctcccctgactcagatgggacctgccaaagacaaactggtgataggaagaattttccatatcgtggagaatgatctatacatcgacttcggcgggaaatttcactgtgtatgtcgtagaccagaggtggatggcgagtctccaatctcatggtacgccgtgtggcgcagatttagtcaagtaatgataacgtgtttcagctctaattcagatttcggcaagcatcgcaaacggtag

SEQ ID NO: 28802 - DNA, 456 bp, Artificial Sequence
  derived and/or modified sequence
atggactgccgggagatggacctgtacgaggactaccagagcccctttgacttcgacgccggcgtgaacaagtcctacctatatctatcaccctccggtaattctagtccccctgggtcccccactctgcagaaatttggattgcttagaacagatccggttccagaagagggggaggatgtggctgccaccatctcagcgacagaaaccctgtctgaagaagagcaagaagagctacgtcgagagctggccaaggtcgaagaagaaatacagacactatcacaggtgttagctgcaaaagagaaacatctggcagaaatcaaacgcaagcttggaatcaactccctccaagaactgaagcagaatatagccaagggatggcaggacgtgaccgccacaagcgcacgtagcaagctgttagctgccgaaacagagttactatgtttgctctattag

SEQ ID NO: 28803 - DNA, 675 bp, Artificial Sequence
  derived and/or modified sequence
atggattgtcgcgagatggacctttatgaggattatcaatcaccatttgattttgatgccggtgtcaacaaaagctacctttatctgagcccttcgggcaactcctcgccacccggatcccctacgctgcagaagttcgggctgctgagaacagatcccgtgcccgaggagggagaagacgtcgcagctactatatcagcaacagagacactgagtgaggaggaacaggaggagcttcgacgtgaactagctaaggtggaggaggagatccagactttatctcaggttctcgcggcaaaagaaaagcacctcgcagagatcaagcgcaagctcggaattaattccttgcaagaactgaaacagaacatcgccaagggctggcaggacgtgactgcgacctcagcttacaagaaaacatccgaaaccctaagtcaagcgggtcagaaggcatcagcagcattttcctcagtaggttcagtgattactaagaaactggaggacgtgaaaaacagtccaaccttcaaatcttttgaggaaaaggtggagaaccttaagagcaaggtaggcggaacgaagccagcagggggagatttcggtgaagtactcaacagcgctgcaaatgcctccgccactactaccgagccactgccagagaagacgcaggagagcctgtag

SEQ ID NO: 28804 - DNA, 837 bp, Artificial Sequence
  derived and/or modified sequence
atggattgtagggagatggatctttatgaagattaccagagcccattcgactttgacgctggcgtgaacaagagctatctctacctgtcaccctctggcaattcttccccacccggttcccccactttgcaaaagtttggactgctgcgcactgatcccgtgccagaagaaggggaggatgtggctgcaaccatcagcgctaccgagaccctctccgaggaagagcaggaagaactcaggcgggagctggctaaagtggaggaagagattcaaacattgtctcaagtcctcgcagcgaaagagaagcacttggccgaaatcaaaaggaagctaggtatcaattcattgcaggagctgaagcagaacattgcaaaggggtggcaggatgtaaccgcaaccagtgcttataagaagactagcgagacgctcagccaggctgggcaaaaggctagcgcagctttctcctccgttggttccgtaattaccaagaaactagaggatgtgaaaaatagccccacctttaaaagtttcgaggaaaaggtagaaaatctgaagggctccccaaagaatgttgagtcctttgcgagtatgctgcgccattccccccttacccagatgggccctgcgaaggataagctggtgatcggccgaatcttccacatcgtagagaatgatttatatatagatttcgggggaaagtttcactgtgtctgtagacggccagaggttgacggcgaatccccaatctcttggtatgcagtgtggcgccgttttagtcaggtgatgattacgtgcttctccagcaatagtgacttcggcaaacacaggaaacgctag

SEQ ID NO: 28805 - DNA, 456 bp, Artificial Sequence
  derived and/or modified sequence
atggattgccgcgaaatggatttatacgaggattaccagtcgcccttcgacttcgacgctggcgttaacaagtcttacctgtatctgtccccctcaggaaatagttcccctcccggatctccgactctccagaaattcggcctgctgcggactgacccggtgcccgaagagggcgaggacgtggctgctacgatatctgccactgaaaccctttctgaggaagagcaggaagagctccgcagggagctggccaaagtggaagaggaaattcagaccctctctcaagttctagccgctaaagagaagcacctcgcagaaattaagagaaagttgggcataaatagcttgcaagagcttaaacagaatatagccaaaggctggcaagacgtcaccgctaccagcgctaggtcaaagctgcttgcagcagagacagaactgttgtgtttactctactag

SEQ ID NO: 28806 - DNA, 1159 bp, Artificial Sequence
  derived and/or modified sequence
gcccttctttgttgactgaggaaagctcgctccctgcccaggtttttcattgttgatcgaaattaacaccaggtggtgaatagagcccctcctaaggttgctcaggataaatcatttattaaataggtctgcttatcaggaggggcgtgaaggctcccaaaaggaaatgctggcacctgggcccagaagccagggcctctaactcctggggttgatttcttcagtgaagttgcaccctacaaagggaatatggccaaagcggcactcaactgaaggctgatatcaggcgattagacagccatgcattctgcgtttgtctggaatggattgtagagagatggacttatatgaggactaccagtccccgtttgattttgatgcaggagtgaacaaaagctatctctacttgtctcctagtggaaattcatctccacccggatcacctactcttcagaaatttggtctgctgagaacagacccagtccctgaggaaggagaagatgttgctgccacgatcagtgccacagagaccctctcggaagaggagcaggaagagctaagaagagaacttgcaaaggtagaagaagaaatccagactctgtctcaagtgttagcagcaaaagagaagcatctagcagagatcaagcggaaacttggaatcaattctctacaggaactaaaacagaacattgccaaagggtggcaagacgtgacagcaacatctgcttacaagaagacatctgaaaccttatcccaggctggacagaaggcctcagctgctttttcgtctgttggctcagtcatcaccaaaaagctggaagatgtaaaaaactccccaacttttaaatcatttgaagaaaaggtcgaaaacttaaagggttctccaaaaaatgtggaatcctttgcatctatgctgagacattctcctcttacacagatgggacctgcaaaggataaactggtcattggacggatctttcatattgtggagaatgatctgtacatagattttggtggaaagtttcattgtgtatgtagaagaccagaagtggatggagagagtcccatttcgtggtatgctgtttggaggagattttcacaagtgatgataacctgtttttcttccaactctgactttggaaaacatcgtaaaagataa

SEQ ID NO: 28807 - protein, 207 aa, Artificial Sequence
  derived and/or modified sequence
MDRGEQGLLRTDPVPEEGEDVAATISATETLSEEEQEELRRELAKVEEEIQTLSQVLAAKEKHLAEIKRKLGINSLQELKQNIAKGWQDVTATSAYKKTSETLSQAGQKASAAFSSVGSVITKKLEDVKLQAFSHSFSIRSIQHSISMPAMRNSPTFKSFEEKVENLKSKVGGTKPAGGDFGEVLNSAANASATTTEPLPEKTQESL

SEQ ID NO: 28808 - DNA, 624 bp, Artificial Sequence
  derived and/or modified sequence
atggacagaggcgagcagggcctgctgagaaccgaccccgtgcccgaggagggcgaggacgtggccgccaccatcagcgccaccgagaccctgagcgaggaggagcaggaggagctgagaagagagctggccaaggtggaggaggagatccagaccctgagccaggtgctggccgccaaggagaagcacctggccgagatcaagagaaagctgggcatcaacagcctgcaggagctgaagcagaacatcgccaagggctggcaggacgtgaccgccaccagcgcctacaagaagaccagcgagaccctgagccaggccggccagaaggccagcgccgccttcagcagcgtgggcagcgtgatcaccaagaagctggaggacgtgaagctgcaggccttcagccacagcttcagcatcagaagcatccagcacagcatcagcatgcccgccatgagaaacagccccaccttcaagagcttcgaggagaaggtggagaacctgaagagcaaggtgggcggcaccaagcccgccggcggcgacttcggcgaggtgctgaacagcgccgccaacgccagcgccaccaccaccgagcccctgcccgagaagacccaggagagcctgtag

SEQ ID NO: 28809 - DNA, 624 bp, Artificial Sequence
  derived and/or modified sequence
atggatcgaggggagcagggtctgcttcgaaccgacccggtacccgaggaaggggaagatgttgcagcgacaatctccgccactgagaccctttctgaagaagagcaggaagagctgcgaagagagctcgcgaaggtggaggaagaaatacaaacattgtcacaggttctggccgccaaggagaagcacctagccgaaatcaagcgtaagttgggaatcaactctcttcaggagctgaaacagaatatagccaaaggctggcaggacgtgaccgctacttctgcctacaagaagacatctgagaccctttcacaggcggggcagaaggcatccgctgccttcagctccgtgggttctgtcattacaaagaagctcgaagatgtgaagttgcaggctttcagccactcattctctatcagaagcattcagcacagcatctcaatgccagccatgcgtaatagccccacctttaagtcattcgaggagaaagtcgagaatcttaagagcaaagtcggcggaacgaaacccgcgggcggcgacttcggcgaagtactgaattcagccgcaaacgccagcgcaaccacaaccgagccccttccagagaaaacccaagaatccctctag

SEQ ID NO: 28810 - DNA, 624 bp, Artificial Sequence
  derived and/or modified sequence
atggacagaggagagcagggcctgctgaggacagatcctgtgcctgaggagggagaagatgtggccgccaccatcagcgccacagagaccctgtctgaggaggagcaggaggagctgcggcgggagctggccaaggtggaggaggagatccagaccctgagccaggtgctggccgccaaggagaagcacctggccgagatcaagaggaagctgggcatcaacagcctgcaggagctgaagcagaacatcgccaagggctggcaggatgtgacagccaccagcgcctacaagaagaccagcgagaccctgagccaggccggccagaaggccagcgctgccttcagctctgtgggcagcgtcatcaccaagaagctggaggatgtgaagctgcaggccttcagccacagcttcagcatccgcagcatccagcacagcatctccatgcctgccatgaggaacagccccaccttcaagagctttgaggagaaggtggagaacctgaagagcaaggtgggcggcaccaagccagctggaggagactttggagaggtgctgaacagcgctgccaatgccagcgccaccaccacagagcccctgcctgagaagacccaggagagcctgtag

SEQ ID NO: 28811 - DNA, 624 bp, Artificial Sequence
  derived and/or modified sequence
atggaccggggcgagcagggcctgctgcggaccgaccccgtgcccgaggagggagaggacgtggctgccaccatatcggcaaccgaaaccctgtccgaagaagagcaggaagaactcaggagggaactggctaaagtggaagaggaaatccagaccctgtcacaagtgctcgcagccaaggaaaagcatcttgcagaaatcaagcgtaaattaggtataaactcactgcaggaattaaagcaaaacattgcgaaggggtggcaagacgtaactgctacttccgcttataaaaaaacttccgagactctaagccaggccggtcaaaaagccagcgccgcgttctcttctgttggaagtgtcataacaaagaaactggaagacgttaagctgcaggccttttcccactcctttagtattcggagcattcaacactcaatcagcatgccagctatgagaaattcacccacattcaagagtttcgaggagaaggttgagaatctgaaatccaaagtcggcggcacgaaacctgccgggggagatttcggggaggtcctgaactccgcagcaaatgcaagcgctactacgacagagcccctccctgagaagacacaggaaagtctgtag

SEQ ID NO: 28812 - DNA, 624 bp, Artificial Sequence
  derived and/or modified sequence
atggatagaggggagcaggggctattgaggacggatcccgtgccagaggaaggcgaggatgtggcagcaacaatatcagctacagagacccttagcgaagaagaacaagaggagttgagacgtgaactggcaaaggtcgaagaagagattcaaaccctgagccaagtcttagccgctaaagagaaacacctcgccgaaattaaacgcaaacttgggattaactctctccaagaactgaagcagaatatagccaaaggctggcaggatgtcaccgctaccagtgcatataaaaagaccagcgaaacactcagtcaggccggacagaaggcctcagctgccttttcgtccgtgggatcggtgataactaaaaagttagaagatgtgaagttgcaggccttcagccatagtttctcgataagaagcatccagcactccatttcgatgccagccatgaggaattcacctaccttcaagagttttgaggagaaggtggaaaatctcaaatctaaggttggaggtaccaaacccgcaggcggagattttggcgaagtgctaaactcagctgcgaacgccagcgcaaccacgacagaacctctgccggaaaaaactcaagaatcgttgtag

SEQ ID NO: 28813 - DNA, 2856 bp, Artificial Sequence
  derived and/or modified sequence
aggtcgaccgggtcaggtggttgggtgacgccccaggaaagcgctccaggccgagggcgggcggcgccgccgcgcccgacgcctctgggggtggggacttcgcgggagtcgccggcggaggcgaggaggagctctgcgcggcgcggcgggcgatccgagccgggacgggctgcaggcgggggtgctgcagaggacacgaggcggcgggctggagacatggaccgcggcgagcaaggtctgctgagaacagacccagtccctgaggaaggagaagatgttgctgccacgatcagtgccacagagaccctctcggaagaggagcaggaagagctaagaagagaacttgcaaaggtagaagaagaaatccagactctgtctcaagtgttagcagcaaaagagaagcatctagcagagatcaagcggaaacttggaatcaattctctacaggaactaaaacagaacattgccaaagggtggcaagacgtgacagcaacatctgcttacaagaagacatctgaaaccttatcccaggctggacagaaggcctcagctgctttttcgtctgttggctcagtcatcaccaaaaagctggaagatgtaaaattgcaagccttttcacattcctttagtatacgttccattcagcattcaattagcatgcctgctatgagaaactccccaacttttaaatcatttgaagaaaaggtcgaaaacttaaagtctaaagtagggggaaccaagcctgctggtggtgattttggagaagtcttgaattcggctgcaaatgctagtgccaccaccacggagcctcttccagaaaagacacaggagagcctgtgagattcctacctttgttctgctacccactgccagatgctgcaagcgaggtccaagcacatcttgtcaacatgcattgccatgaatttctaccagatgtgcttttatttagctttacatattcctttgaccaaatagtttgtgggttaaacaaaatgaaaatatcttcacctctattcttgggaaacaccctttagtgtacatttatgttcctttatttaggaaacaccattataaaaacacttatagtaaatggggacattcactataatgatctaagaagctacagattgtcatagttgttttcctgctttacaaaattgctccagatctggaatgccagtttgacctttgtcttctataatatttcctttttttcccctctttgaatctctgtatatttgattcttaactaaaattgttctcttaaatattctgaatcctggtaattaaaagtttgggtgtattttctttacctccaaggaaagaactactagctacaaaaaatattttggaataagcattgttttggtataaggtacatattttggttgaagacaccagactgaagtaaacagctgtgcatccaatttattatagttttgtaagtaacaatatgtaatcaaacttctaggtgacttgagagtggaacctcctatatcattatttagcaccgtttgtgacagtaaccatttcagtgtattgtttattataccacttatatcaacttatttttcaccaggttaaaattttaatttctacaaaataacattctgaatcaagcacactgtatgttcagtaggttgaactatgaacactgtcatcaatgttcagttcaaaagcctgaaagtttagatctagaagctggtaaaaatgacaatatcaatcacattaggggaaccattgttgtcttcacttaatccatttagcactatttaaaataagcacaccaagttatatgactaatataacttgaaaattttttatactgaggggttggtgataactcttgaggatgtaatgcattaataaaaatcaactcatcattttctacttgttttcaatgtgttggaaactgtaaaatgatactgtagaacctgtctcctactttgaaaactgaatgtcagggctgagtgaatcaaagtgtctagacatatttgcatagaggccaaggtattctattctaataactgcttactcaacactaccaccttttccttatactgtatatgattatggcctacaatgttgtatttgttatttattaaattgtgattgttttattattgtttatgccaaatgttaactgccaagcttggagtgacctaaagcattttttaaaagcatggctagatttacttcagtataaattatcttatgaaaaccaaattttaaaagccacaggtgttgattgttataaaataacatgctgccattcttgattgctagagtttttgttagtactttggatgcaattaaaactatgtgctatcacatgtgaaaagcttaataaattccatctatcagtagtataggtctcaatatttattatgagaccagtggtctggaaacagcttgttgtaccgaatcaactggagtctatgcttaaaaaaaaaaaatttttttttaaccatccttaaattattgcttaatggtatcatattaacatattctaaataagggctttaaggcacaggctgttgaagcattttctcagaggagtggatctgtagaagtctgtctttctatagaaatattgtgcttactcaagtgttaaattattttttctatgaactagtctacttcttaaaattcaaacatattcttttgatcacattgtttcttgagcatcctgccctgctactaacttttcaacaaggcaaaatggagtaaagtggcaatttctttagatgagtgaaataccctcaagtctcttttctgcccaaaaagggaaaagtgatagaaatgggggtggcaagtggggtgagtggatgaaggtgggtattgggggtggctgtg

SEQ ID NO: 28814 - protein, 132 aa, Artificial Sequence
  derived and/or modified sequence
MDTAYPREDTRAPTPSKAGAHTALTLGAPHPPPRDHLIWSVFSTLYLNLCCLGFLALAYSIKARDQKVVGDLEAARRFGSKAKCYNILAAMWTLVPPLLLLGLVVTGALHLARLAKDSAAFFSTKFDDADYD

SEQ ID NO: 28815 - DNA, 399 bp, Artificial Sequence
  derived and/or modified sequence
atggacaccgcctaccccagagaggacaccagagcccccacccccagcaaggccggcgcccacaccgccctgaccctgggcgccccccaccccccccccagagaccacctgatctggagcgtgttcagcaccctgtacctgaacctgtgctgcctgggcttcctggccctggcctacagcatcaaggccagagaccagaaggtggtgggcgacctggaggccgccagaagattcggcagcaaggccaagtgctacaacatcctggccgccatgtggaccctggtgccccccctgctgctgctgggcctggtggtgaccggcgccctgcacctggccagactggccaaggacagcgccgccttcttcagcaccaagttcgacgacgccgactacgactag

SEQ ID NO: 28816 - DNA, 399 bp, Artificial Sequence
  derived and/or modified sequence
atggacacagcctacccccgcgaggatacccgcgccccgacgccttcgaaggctggagcacacactgcgttaacactaggagctccccacccaccacctagggaccacctcatctggtcagtcttctctacactttatttaaacctgtgctgcctcggtttccttgcattagcctacagtataaaagcaagggatcagaaggttgttggagatctggaggccgctcgtagatttggctcaaaggcgaaatgttacaacatcctggccgctatgtggacgctagtgcctccattactgctgctcgggctagtggtgactggagcactccacttggccagacttgccaaggactccgctgcattcttctccaccaagtttgacgatgcggattacgactag

SEQ ID NO: 28817 - DNA, 736 bp, Artificial Sequence
  derived and/or modified sequence
accagtctgagtgtggaagagacggcgctggaacccatggacacggcgtatccccgcgaggacacccgggcccccacgcccagcaaggccggtgcccacacagccctcacactgggggccccgcaccccccgcctcgagaccacttgatctggtcggtgttcagcaccctctacctgaatctgtgttgcctcggcttcctggcgctggcctactccatcaaggcccgagatcagaaggtggttggtgacctggaagcggcccggcgttttggctccaaagccaagtgctacaacatcctggccgcgatgtggacgctggtgccgccactgctgctcctggggctggtggtgactggtgccctgcacctggcccggctggccaaggactctgccgccttcttcagcaccaagtttgatgacgcggactatgactgacaggctgggtcctgatctggggcactagccccaggacactgaccccaggctgctgcccctggggcccaatactgactccccggagcctggccctccttctgtggggcctccatccctgccccatcctgatcctggggccctccagccccaacatgggcacctaaggctgaaccagtcagaccccggggtcttcaccctaacccgagagttcccgggccctaactctgcccccgatcctgcccctccctcctcacactccaggcccctcggttccacgattaaaagtgcctggttccagaaa

SEQ ID NO: 28818 - DNA, 399 bp, Artificial Sequence
  derived and/or modified sequence
atggacacagcctacccccgggaggacacccgggcccccacccccagcaaggccggggcccacacagccctgaccctgggcgccccccaccccccaccccgggaccacctgatctggagcgtcttcagcaccctgtacctgaacctgtgctgcctgggcttcctggccctggcctacagcatcaaggcccgggaccagaaggtggtgggggacctggaggccgcccggcgcttcggcagcaaggccaagtgctacaacatcctggccgccatgtggaccctggtgccccccctgctgctgctgggcctggtggtgactggagccctgcacctggcccggctggccaaggacagcgctgccttcttcagcaccaagtttgatgatgctgactatgactag

SEQ ID NO: 28819 - DNA, 399 bp, Artificial Sequence
  derived and/or modified sequence
atggacaccgcctacccccgggaggacacccgggcccccacccccagcaaagcaggcgcccacacagcgctcacgctgggagccccccatcccccacccagagaccatctcatatggagtgtgttctccacgctctatctgaatctgtgctgtctgggttttctggccctcgcttattccattaaggcccgcgaccagaaagtagttggcgacctcgaagcggcacgaaggttcggaagcaaggccaaatgctataacatcttagcagccatgtggaccttggtgcctcccctgttgctgttgggcctcgtggtgactggcgcattgcatctggctcgcctggctaaggattctgctgctttcttctcaacgaagtttgatgatgccgattatgattag

SEQ ID NO: 28820 - DNA, 399 bp, Artificial Sequence
  derived and/or modified sequence
atggacaccgcctacccccgagaggacacaagagccccaaccccatcgaaggcaggagcccataccgcgctgacactgggagcgccacacccacccccaagggatcatctaatctggtcagtcttttctactctgtatttgaacctgtgttgcctggggttcctggctctggcctattctattaaagcaagagaccaaaaggtggtcggagacttagaggcagctaggaggtttggctccaaggctaaatgttataatatccttgccgctatgtggaccctggtccctcctctactgctgctgggtctagtggtcactggcgcactacatctggcccgactggcaaaggattccgccgctttttttagcacaaaatttgatgacgcagactatgattag

SEQ ID NO: 28821 - protein, 244 aa, Artificial Sequence
  derived and/or modified sequence
MDPGAALQRRAGGGGGLGAGSPALSGGQGRRRKQPPRPADFKLQVIIIGSRGVGKTSLMERFTDDTFCEACKSTVGVDFKIKTVELRGKKIRLQIWDTAGQERFNSITSAYYRSAKGIILVYDITKKETFDDLPKWMKMIDKYASEDAELLLVGNKLDCETDREITRQQGEKFAQQITGMRFCEASAKDNFNVDEIFLKLVDDILKKMPLDILRNELSNSILSLQPEPEIPPELPPPRPHVRCC

SEQ ID NO: 28822 - DNA, 735 bp, Artificial Sequence
  derived and/or modified sequence
atggaccccggcgccgccctgcagagaagagccggcggcggcggcggcctgggcgccggcagccccgccctgagcggcggccagggcagaagaagaaagcagccccccagacccgccgacttcaagctgcaggtgatcatcatcggcagcagaggcgtgggcaagaccagcctgatggagagattcaccgacgacaccttctgcgaggcctgcaagagcaccgtgggcgtggacttcaagatcaagaccgtggagctgagaggcaagaagatcagactgcagatctgggacaccgccggccaggagagattcaacagcatcaccagcgcctactacagaagcgccaagggcatcatcctggtgtacgacatcaccaagaaggagaccttcgacgacctgcccaagtggatgaagatgatcgacaagtacgccagcgaggacgccgagctgctgctggtgggcaacaagctggactgcgagaccgacagagagatcaccagacagcagggcgagaagttcgcccagcagatcaccggcatgagattctgcgaggccagcgccaaggacaacttcaacgtggacgagatcttcctgaagctggtggacgacatcctgaagaagatgcccctggacatcctgagaaacgagctgagcaacagcatcctgagcctgcagcccgagcccgagatcccccccgagctgcccccccccagaccccacgtgagatgctgctag

SEQ ID NO: 28823 - DNA, 2138 bp, Artificial Sequence
  derived and/or modified sequence
gctgccgctactgcggagtagctgcttcccttcctcctctcccggcggcggcggcggcagcggcggaggaggaggaggaggggacccgggcgcagagagccggccggcggcgcagttgcagcgcggagcccacgggccgccggggccgctccagcgggcggaagccgagcccggggccgaccccccgcgcgcggcggaggccgagggggcgccggggcccggggcgcgcagccggggggcgggcggcggcgggcggcgggccgagcgggagccgcatgcgtgtatggatccgggcgccgcgctgcagaggcgggccgggggcggcggcggtctgggcgcgggctccccggcgctgtcgggcggccagggccgccggaggaagcagccccccaggccggccgacttcaagttgcaggtcatcattatcggctcccgcggcgtgggcaagaccagcctgatggagcgcttcaccgacgacaccttctgcgaggcctgcaagtccaccgtgggtgttgacttcaaaatcaaaactgtagagctaagaggaaagaaaattagattacagatctgggacacagcaggtcaggagagattcaacagcattacctcagcttattacagaagtgccaaggggatcatattagtatatgatatcactaagaaggagacatttgatgatttgccgaaatggatgaagatgattgataagtatgcttcagaagatgcagagcttctcttagttggaaataagttggactgtgaaacggacagagaaatcaccaggcagcagggggaaaagtttgcacagcagatcactgggatgcggttctgtgaagcaagtgccaaggataacttcaatgtggacgagatatttttgaaacttgtcgatgacattctgaaaaagatgcctctggatattttaaggaatgagttgtccaatagtatcctgtcgttacaaccagagcctgagataccgccagaactgcctccaccaagaccacatgtccgatgctgttgatttcctactttggagacaaagtggaaatgattcctggaaaggggaaaaaacgttctattctgcactacaatcattttgacaatttcctttcgcactttgtaatccaagtcagagctatacactaacttgtaaatatgcatatatgcaatcctgggtaagttttggttataagttacctatttccctccaaattattatatttcattcattaccccagtgtctagtgtacatacactgggaaacctagtacttctaatatgaagaatgggagaaatgaaaggtataatgtttcttgaaataaataatataattgtccttattaattatattatgaggacagaagatattctgataagagagaacgtggtgctttgcttaccgttttaaagaaaatttgtaaaactaaagactttttgaaaaaaagctatcttaagtgctttttctttatttacaagacatttcccccagtggtagcatctgaagtattggagtgtttctgccacgaagcaaagctccattcatggccgtcatggaaggttatttattaatgttacataatggtagaatattactagttagagggttggatttgacttggtcctaaggccacagaatctctctcatggcttcctaagggatgtacctttatgcttttaagaactacaaagattcaataaagaaagaaatgtttttgaaactatagaaaaagattttaaaacacgctgctgtcctaaacaaatcctgtttaaaggaattttaaagagatgcattttactatatcaaagaacatacgtgtatttgcctaaacactctgtacctttgtaatgataaaacttcccccttctttacggtgaagcttattctgattaagcctagactgtgttctttttttttttttttttttttttttttttttttttttttttttttggtctgatgatgaatttgtgaactctatctttggtatatcttttattaaactgcactgttttgtttagtcaaggtaattaagtaattatgtatttgaataacttggtgtgtcttgagtgttgtggtatgaaaagcattgtggtctttctacactaatgaagtgcaaataaaattttgtatttatgaatga

SEQ ID NO: 28824 - DNA, 735 bp, Artificial Sequence
  derived and/or modified sequence
atggatccaggagccgccctgcagcgacgagcgggcggtggtggtggtctcggcgccggatcccccgccttaagcgggggtcagggaagacggcgaaagcagcctcccaggccagccgacttcaaactccaagtaattatcatcggaagccgcggcgtaggtaagacgagcctgatggagcgcttcaccgacgacactttctgtgaagcatgtaaatccacagtgggggtggacttcaaaattaagactgtggagttgcgcggcaaaaaaatccggctgcagatttgggacaccgctggtcaggagagattcaatagcatcacttccgcctattatcggagcgcaaaaggaataattctagtctatgatatcaccaaaaaggagacattcgatgatctgcctaaatggatgaagatgatagacaagtatgcttcggaagacgccgaattactactcgtgggcaataagctggattgtgaaacggatcgggaaattacgaggcagcagggcgaaaagttcgcgcagcagatcaccgggatgaggttctgtgaagcaagcgccaaagacaatttcaacgtggacgagatttttcttaaattggtggatgatatcctaaaaaagatgcctctggatattctgagaaacgagctttccaacagtattctcagcctgcaacccgagccagagatcccaccagaattgcctccacctcgcccacacgttagatgctgttag

SEQ ID NO: 28825 - DNA, 735 bp, Artificial Sequence
  derived and/or modified sequence
atggaccctggagctgccctgcagaggagagctgggggcggcggcggcctgggcgccggcagccctgccctgagcggcggccagggcagaagaaggaagcagccccccaggcctgctgacttcaagctgcaggtgatcatcatcggcagccggggcgtgggcaagaccagcctgatggagcgcttcacagatgacaccttctgtgaggcctgcaagagcacagtgggcgtggacttcaagatcaagacagtggagctgcggggcaagaagatccggctgcagatctgggacacagctggccaggagcgcttcaacagcatcaccagcgcctactaccgcagcgccaagggcatcatcctggtgtatgacatcaccaagaaggagacctttgatgacctgcccaagtggatgaagatgattgacaagtatgcctctgaagatgctgagctgctgctggtgggcaacaagctggactgtgaaacagaccgggagatcacccggcagcagggcgagaagtttgcccagcagatcaccggcatgaggttctgtgaggccagcgccaaggacaacttcaacgtggatgagatcttcctgaagctggtggatgacatcctgaagaagatgcccctggacatcctgagaaatgagctgagcaacagcatcctgagcctgcagcctgagcctgagatccccccagagctgcccccaccccggccccacgtgcgctgctgctag

SEQ ID NO: 28826 - DNA, 735 bp, Artificial Sequence
  derived and/or modified sequence
atggaccccggcgccgccctgcagcggcgggccggcggcggcggcggactgggcgccggttcgccagccctgagcggcggacaggggcggcgtagaaagcagcccccacggccggctgacttcaagttgcaggttataatcattggcagccgcggtgtaggaaagacttcattgatggaacgcttcaccgacgacaccttttgtgaagcttgtaagtccactgtgggggtagacttcaaaatcaaaacagtggagctgagggggaagaagattcggctgcagatatgggacaccgctggccaggaaagatttaacagtatcacatccgcctactaccggtcagcaaagggtattattctcgtgtacgacatcacaaagaaagaaacgttcgacgatctgcctaaatggatgaaaatgatcgataagtacgccagcgaagacgcggaactcttgttggtagggaacaagctcgactgtgaaacggacagagaaattacaagacagcagggagagaagttcgcacagcagataaccgggatgagattttgcgaagcctcggcaaaagataatttcaatgtggatgagatatttcttaagctggttgatgacatcctgaagaagatgccactggatatcctgcgcaatgaactcagtaattccatactgtctctgcaacctgagccagagatccctccagaattgcctccccctcggccccacgtgcggtgttgctag

SEQ ID NO: 28827 - DNA, 735 bp, Artificial Sequence
  derived and/or modified sequence
atggatcccggtgcagccttgcaaagaagggcaggcggaggtggcggactgggagccggttcacctgcactatctggtgggcagggcagacggaggaagcagccaccccgaccagccgacttcaagctacaggtcattattatcggcagtcgcggtgtcggaaagaccagcctgatggagcggtttacggacgacacattctgtgaagcctgcaagtcaactgtgggggtagatttcaaaataaaaacagtggagctgagaggcaaaaagattcgcctgcagatttgggacacggccggtcaagagagattcaactctataacatctgcctattaccgttctgcgaaagggattattttagtttacgacatcacaaagaaggagacctttgatgatctccccaaatggatgaagatgattgataagtacgcttcagaagacgcggagttgcttctggtgggcaataagctggactgtgagacggatagagaaataactagacagcagggggagaagtttgctcagcaaataacagggatgcggttttgcgaagcctcagccaaggacaatttcaacgtggatgagatttttttaaaattagtcgacgatattctgaaaaagatgcctttagacattctgcgtaacgaactgtccaatagcatcctatcgttgcagcccgaaccagaaattcccccagaactgcctccgccacggccacacgtgcggtgctgctag

SEQ ID NO: 28828 - protein, 910 aa, Artificial Sequence
  derived and/or modified sequence
MKKMSRNVLLQMEEEEDDDDGDIVLENLGQTIVPDLGSLESQHDFRTPEFEEFNGKPDSLFFNDGQRRIDFVLVYEDESRKETNKKGTNEKQRRKRQAYESNLICHGLQLEATRSVLDDKLVFVKVHAPWEVLCTYAEIMHIKLPLKPNDLKNRSSAFGTLNWFTKVLSVDESIIKPEQEFFTAPFEKNRMNDFYIVDRDAFFNPATRSRIVYFILSRVKYQVINNVSKFGINRLVNSGIYKAAFPLHDCKFRRQSEDPSCPNERYLLYREWAHPRSIYKKQPLDLIRKYYGEKIGIYFAWLGYYTQMLLLAAVVGVACFLYGYLNQDNCTWSKEVCHPDIGGKIIMCPQCDRLCPFWKLNITCESSKKLCIFDSFGTLVFAVFMGVWVTLFLEFWKRRQAELEYEWDTVELQQEEQARPEYEARCTHVVINEITQEEERIPFTAWGKCIRITLCASAVFFWILLIIASVIGIIVYRLSVFIVFSAKLPKNINGTDPIQKYLTPQTATSITASIISFIIIMILNTIYEKVAIMITNFELPRTQTDYENSLTMKMFLFQFVNYYSSCFYIAFFKGKFVGYPGDPVYWLGKYRNEECDPGGCLLELTTQLTIIMGGKAIWNNIQEVLLPWIMNLIGRFHRVSGSEKITPRWEQDYHLQPMGKLGLFYEYLEMIIQFGFVTLFVASFPLAPLLALVNNILEIRVDAWKLTTQFRRLVPEKAQDIGAWQPIMQGIAILAVVTNAMIIAFTSDMIPRLVYYWSFSVPPYGDHTSYTMEGYINNTLSIFKVADFKNKSKGNPYSDLGNHTTCRYRDFRYPPGHPQEYKHNIYYWHVIAAKLAFIIVMEHVIYSVKFFISYAIPDVSKRTKSKIQREKYLTQKLLHENHLKDMTKNMGVIAERMIEAVDNNLRPKSE

SEQ ID NO: 28829 - DNA, 2733 bp, Artificial Sequence
  derived and/or modified sequence
atgaagaaaatgagcaggaatgtgttactccagatggaggaagaagaggacgacgatgacggagacattgtcctggaaaatctcggccagacaattgtcccagatctgggctcccttgagagtcagcacgactttagaaccccagagtttgaagagtttaacggcaaacctgacagtctgtttttcaacgacggacagcggcgcatcgacttcgttttggtctacgaggatgagtcgagaaaggagacaaacaaaaagggcaccaacgagaaacagaggcgaaagaggcaggcttacgaaagtaatctgatttgccacggactgcaattagaggcgacccggtctgtcctggacgacaagctggtttttgtaaaagtgcatgctccttgggaggtgctgtgtacctatgctgagataatgcacattaagttgcctctgaaacctaatgacctgaaaaatcgcagttctgctttcggcaccctgaactggttcactaaagtgctctctgtggatgaatccatcatcaagcccgagcaagagttttttaccgccccattcgagaagaataggatgaatgacttctacattgttgatcgcgacgcatttttcaacccagctacccggtcgcggatcgtgtatttcatcttgtcgcgtgtgaaataccaggttataaacaacgttagcaagttcggaataaatagattggtcaattctgggatctataaggccgctttccctctccatgattgtaaatttcggagacagtccgaggacccctcctgtcctaatgagcgttatctcctttacagggagtgggcccacccccggtccatttacaaaaagcagcccttggatctcataagaaagtattatggggagaagatcggaatctactttgcctggctgggttactacactcagatgctgctgctcgctgccgtggtgggtgttgcctgcttcctgtatggatacttgaatcaggataactgcacctggagtaaggaggtttgccatcccgacattggcggtaagataatcatgtgtccccagtgtgatagactgtgtcccttctggaagcttaacatcacttgcgagtcttcaaaaaaactctgtatcttcgattcattcgggacactcgtttttgctgtttttatgggcgtctgggtcacactctttctggagttttggaaacgtaggcaggctgagctagagtacgaatgggacaccgttgaactgcagcaggaggagcaggctcggccagaatacgaagcaaggtgtacgcatgtggtgataaatgagatcactcaggaggaagagcgaatcccttttacggcctgggggaaatgcatccggattactctgtgcgccagcgcagtgttcttctggattttactgatcatagcttcggtgattggcattattgtctatagactctcagtctttattgtgttctctgccaagctgccaaaaaacatcaacggcacagaccccatacagaaatatctgaccccacaaaccgcaacatcaataaccgcttctatcattagtttcatcattattatgattctgaacaccatttacgagaaggtcgccatcatgatcaccaattttgagctgccaaggactcagactgactatgaaaatagcctaacaatgaagatgtttctgttccagttcgttaactattactctagctgtttttacatcgcttttttcaaagggaaatttgtcggatatcccggagatccagtctattggttgggcaagtatagaaacgaagagtgcgaccctgggggctgcctgctagaactgaccacacagctgacaatcattatggggggaaaggccatctggaacaacatccaggaagtgctgcttccatggataatgaatctgattggccgatttcaccgcgtttccggatctgagaaaattactcccagatgggagcaagactaccacctccagcctatgggaaagctgggcctgttttatgaatatcttgagatgattatccagtttggctttgtcacactgttcgtggccagcttcccgctggctccacttcttgcccttgtgaacaacatcctggagattcgcgtcgatgcatggaagctcaccactcagttcagaaggctggtgcccgagaaggcacaggacataggcgcttggcagcccatcatgcagggtattgctatcttggccgtggtgactaatgccatgatcatcgccttcacctccgacatgattccacgattggtatattactggagtttttctgtacccccgtatggcgatcatactagctacacaatggaaggttatattaataacactctgagtatctttaaggtggcagactttaagaacaaatccaagggaaacccctatagtgacctgggtaaccacactacttgccgctaccgcgacttcaggtaccctcctggacaccctcaagaatataaacacaatatttactattggcacgtcattgctgctaagttggctttcatcatagtgatggagcacgtaatttacagtgtcaaattctttatctcctatgctatccccgatgttagtaaaagaaccaagagtaagatacagagggaaaaatatctgacacaaaagttactgcatgagaatcacctcaaggatatgacaaagaacatgggcgtgatcgccgaaagaatgatcgaggccgttgacaataatcttcgtcccaagtccgaatag

SEQ ID NO: 28830 - DNA, 2733 bp, Artificial Sequence
  derived and/or modified sequence
atgaagaagatgagcagaaatgtgctgctgcagatggaggaggaggaggatgatgatgatggagacatcgtgctggagaacctgggccagaccatcgtgcctgacctgggcagcctggagagccagcacgacttccgcaccccagagtttgaggagttcaacgggaagccagacagcctcttcttcaatgatggccagaggagaattgactttgtgctggtgtatgaagatgagagcaggaaggagaccaacaagaagggcaccaatgagaagcagaggaggaagaggcaggcctatgagagcaacctgatctgccacggcctgcagctggaggccaccaggtctgtgctggatgacaagctggtgtttgtgaaggtgcacgccccctgggaggtgctgtgcacctatgcagagatcatgcacatcaagctgcccctgaagcccaatgacctgaagaacagaagcagcgccttcggcaccctgaactggttcaccaaggtgctgtctgtggatgagagcatcatcaagccagagcaggagttcttcaccgccccctttgagaagaacaggatgaatgacttctacatcgtggacagagatgccttcttcaacccagccaccaggagcagaattgtgtacttcatcctgagccgggtgaagtaccaggtgatcaacaacgtgtccaagtttggcatcaaccggctggtgaacagcggcatctacaaggccgccttccccctgcatgactgcaagttccggcggcagagcgaggaccccagctgccccaatgaaagatacctgctgtaccgggagtgggcccaccccaggagcatctacaagaagcagcccctggacctgatcaggaagtactatggagagaagattggcatctactttgcctggctgggctactacacccagatgctgctgctggccgctgtggtgggcgtggcctgcttcctgtatggctacctgaaccaggacaactgcacctggagcaaggaggtgtgccacccagacattggaggcaagatcatcatgtgcccccagtgtgaccggctgtgccccttctggaagctgaacatcacctgtgagagcagcaagaagctgtgcatctttgacagctttggcaccctggtgtttgctgtgttcatgggcgtgtgggtgaccctcttcctggagttctggaagaggcggcaggccgagctggagtatgagtgggacacagtggagctgcagcaggaggagcaggcccggccagaatatgaggcccgctgcacccacgtggtgatcaatgagatcacccaggaggaggagcgcatccccttcaccgcctggggcaagtgcatccgcatcaccctgtgtgccagcgctgtgttcttctggatcctgctgatcatcgcctctgtgattggcatcatcgtgtaccgcctgtctgtgttcatcgtgttttctgccaagctgcccaagaacatcaatggaacagaccccatccagaagtacctgaccccccagacagccaccagcatcacagccagcatcatctccttcatcatcatcatgatcctgaacaccatctatgagaaggtggccatcatgatcaccaactttgagctgcccaggacccagacagattatgagaacagcctgaccatgaagatgttcctgttccagtttgtgaactactacagcagctgcttctacatcgccttcttcaagggcaagtttgtgggctacccaggggaccctgtgtactggctgggcaagtacagaaatgaggagtgtgaccccggcggctgcctgctggagctgaccacccagctgaccatcatcatgggcggcaaggccatctggaacaacatccaggaggtgctgctgccctggatcatgaacctgattggccgcttccaccgggtgtctggcagcgagaagatcaccccccgctgggagcaggactaccacctgcagcccatgggcaagctgggcctcttctatgagtacctggagatgatcatccagtttggatttgtgaccctgtttgtggccagcttccccctggcccccctgctggccctggtgaacaacatcctggagatccgggtggatgcctggaagctgaccacccagttccggcggctggtgcctgagaaggcccaggacattggagcctggcagcccatcatgcagggcatcgccatcctggccgtggtgaccaatgccatgatcatcgccttcaccagtgacatgatcccccggctggtgtactactggagcttctctgtgcccccctacggggaccacaccagctacaccatggagggctacatcaacaacaccctgagcatcttcaaggtggccgacttcaagaacaagagcaaaggaaacccctacagcgacctgggcaaccacaccacctgccgctacagagacttccgctacccacctggccacccccaggagtacaagcacaacatctactactggcacgtgattgctgccaagctggccttcatcatcgtgatggagcacgtgatctacagcgtgaagttcttcatctcctatgccatcccagatgtgtccaagaggaccaagagcaagatccagcgggagaagtacctgacccagaagctgctgcacgagaaccacctgaaggacatgaccaagaacatgggcgtgattgctgagaggatgattgaggccgtggacaacaacctgcggcccaagtctgagtag

SEQ ID NO: 28831 - DNA, 2733 bp, Artificial Sequence
  derived and/or modified sequence
atgaagaagatgagccggaacgtgctgctgcagatggaggaggaggaggatgacgatgatggcgacatagtgcttgagaatttaggacagacaatcgtgcctgatctcggttctctggaaagtcagcatgatttccgaacaccagaattcgaggagttcaacgggaaacctgatagcctgttctttaacgatgggcagagaagaattgattttgtgctggtgtacgaggatgagtctaggaaggagacaaataaaaaagggactaacgaaaagcagagacgaaagagacaggcgtacgaaagcaatcttatctgtcacggcttgcagctggaggcaacacgctcggtactggacgataaacttgtatttgtgaaggttcacgcaccttgggaggtcttatgcacatatgccgaaataatgcatatcaagctgccacttaagcctaatgaccttaagaaccgcagctctgctttcggaacattaaattggttcactaaggtgctcagtgtggacgagagtatcatcaagcccgagcaggaattcttcacggctccctttgagaaaaataggatgaacgacttctatatagtggaccgcgatgcattcttcaacccggcaacgcgttccaggatcgtctattttatccttagccgggtgaagtaccaagtgataaacaatgtgtccaaattcggcatcaacaggcttgtgaactctggtatatataaggctgcttttccattgcacgattgcaagtttcgccgtcagagtgaggatccaagctgccccaatgaacgctatttgctatatcgcgaatgggctcacccccgttccatctataaaaaacagccactggacctgatcaggaagtactacggcgagaaaatcggcatttactttgcctggttgggctactatactcaaatgctgctcctggcagccgtggtgggcgttgcttgttttctgtacggctacctcaatcaggacaattgtacctggtccaaagaagtgtgtcaccccgatattggtgggaaaataatcatgtgcccacagtgcgacaggctctgccctttctggaagttgaacatcacatgtgagagttcaaagaaactgtgtatatttgacagttttggcacactggtttttgccgtgttcatgggcgtgtgggtgacactattcctagagttctggaagcgacgtcaagctgagcttgagtacgaatgggatactgtggaactgcagcaggaggaacaggcaaggcccgaatatgaagcccgctgcacccacgtagtgattaatgaaatcacacaagaggaagaacgcatccctttcaccgcttgggggaaatgtattagaatcactctctgcgcctctgccgtgttcttctggatcctgctcatcatcgcgagcgtgattggcatcatcgtgtataggttaagtgtgtttattgtcttcagcgccaaactcccaaagaacattaatggaaccgacccaatccaaaagtacctcactccccagaccgccacttcgataacagcttctattatttcctttattatcatcatgattttgaacacaatctacgagaaggtggccattatgatcacaaattttgaactccctcggacacagacagattatgagaactcattgactatgaagatgttcctttttcagtttgtaaactattactcatcttgtttctatattgcgttcttcaaaggtaagtttgttggataccctggcgatcccgtttattggttaggtaaatatcgcaatgaagaatgcgatccgggtggttgcctccttgagttgacgactcagctgacgatcatcatgggtgggaaggcaatctggaataacattcaagaagtgctgctcccgtggattatgaacctcattggcaggtttcacagggtgtctgggtcggaaaagatcacccctcgttgggagcaggactaccaccttcaaccaatggggaaacttggattgttctacgaatacctggagatgatcatacagttcgggttcgtgacattatttgtggcatcctttcccctggccccccttctcgctctggtgaataacatactcgagatccgggtagatgcctggaagttgacaacccaattccggagattagtgccagagaaagcgcaggatatcggggcttggcaacctataatgcaaggaattgctattttggctgtggttacaaacgccatgatcattgcctttacatccgacatgattccccgtttagtgtactactggtcattctctgttccaccctatggcgatcacacttcatacaccatggaaggatatatcaacaacacattaagtatattcaaggtcgccgatttcaaaaataaaagtaaaggcaacccttactccgacctgggtaatcacacaacttgtagataccgcgactttagatacccaccaggccacccacaggagtataagcataatatctattactggcacgtaattgctgctaagttagcatttataatagtgatggaacatgttatctattcagtgaagtttttcatctcttatgctattcctgacgtcagcaaacgcactaagtctaaaatccagcgggaaaagtacttgacccaaaaattgctccatgagaatcacctgaaggatatgaccaagaacatgggggtgatagccgagcgtatgatcgaggctgtcgacaataacctcagacctaagtcggagtag

SEQ ID NO: 28832 - DNA, 2733 bp, Artificial Sequence
  derived and/or modified sequence
atgaagaaaatgagcaggaacgtcctgctacaaatggaagaggaagaagacgatgacgacggcgatatcgtgctggaaaatctgggtcagactattgtgcctgacctcggttcactagaatctcaacacgatttcaggactccagagttcgaggaattcaatgggaaaccggacagtctgttttttaatgacggccagagaagaatcgactttgtgctggtatacgaggacgagagtcggaaagagaccaacaagaaaggcactaatgagaagcagcggcgaaaacgacaggcgtatgagtctaatctgatttgccacggtctgcagctcgaggctacacgtagtgtactggacgataaactggtgttcgtgaaggtgcacgccccttgggaggttctatgcacctatgctgagattatgcacatcaaactaccgctcaagcccaatgatctgaaaaaccgttcctcggcctttggtaccctgaattggttcactaaggtccttagcgttgatgaatccatcattaagcccgagcaagagttttttacggcaccattcgaaaagaaccggatgaatgacttctacatcgtcgatcgggatgctttcttcaaccccgctactaggtctcgcatagtctattttattctttcgcgggtgaagtatcaggttatcaataacgtatcgaaattcggcattaacaggctggtgaacagtgggatttataaggctgcctttcctctccacgattgcaaatttagaagacagtccgaggatccaagttgcccaaacgaaaggtatctgttgtaccgggaatgggcacaccccagaagcatctacaagaaacagcccctcgatctgataagaaagtactatggcgaaaagatcggtatctattttgcctggcttgggtactacacacaaatgctcttgctcgctgccgtcgttggcgtagcgtgcttcctatacggctatcttaaccaggacaattgtacatggtcaaaggaggtttgtcaccccgacatcggaggaaagatcatcatgtgccctcaatgcgatcggctctgccccttctggaagctgaatattacatgtgagagttcgaagaaactgtgcattttcgattcctttggcacactggtgtttgcagtgtttatgggagtttgggtgactctgtttctcgagttctggaaacggaggcaggctgaactggagtacgagtgggatacggttgaactgcagcaggaggaacaggctagaccagaatatgaagctcggtgtacacatgtggtcatcaacgagattacgcaggaagaagaaaggataccctttacggcctggggcaaatgtattagaattaccctttgtgcctctgcagtgttcttttggattcttttaatcattgcctcggtgatcggtatcatcgtgtacagactctctgtctttatagtgttctcagccaagcttcctaagaatataaatggcacggatcctatccagaaatatctgaccccccagaccgccacgtcgataacagcgagcattataagcttcatcattattatgatcttgaacaccatttacgagaaggttgcaattatgatcaccaactttgagctgcctagaactcagactgactacgaaaattctttgaccatgaagatgtttctgtttcagtttgtcaactactatagttcatgcttttacatcgcttttttcaaaggaaaattcgtgggataccccggagaccctgtgtattggcttgggaagtacaggaacgaagaatgtgacccaggaggatgcctgttagaacttactacccagctgacaattataatggggggtaaagcgatctggaacaatatccaggaggttttattgccgtggatcatgaatctcatcggccgttttcacagagtgagcggctccgagaagatcaccccacgttgggagcaagattaccacctgcagccaatgggcaaactcgggctcttctacgagtacctcgaaatgattatacagtttggtttcgtcactttatttgtggcctccttccctctcgccccactcctcgccctggtgaacaatattctggagatccgcgtcgatgcctggaaactcacaacccagtttaggagactggtgccagagaaggctcaggacatcggagcatggcagccaatcatgcagggaatcgccatactggctgtcgtgactaacgctatgattattgcattcacttccgatatgattcccaggctcgtttactactggtccttctcagtgcccccatacggagatcatacctcttacaccatggaggggtacattaataataccttgtccatattcaaagtggccgacttcaagaataaatctaagggaaacccatactcggacctgggaaatcataccacctgccgctacagagattttaggtatcccccaggccatccccaggagtataagcacaatatctactactggcatgtgattgctgccaaactcgccttcattattgtgatggagcacgtgatctactcagtcaaattctttatcagctacgccatcccggacgtgagcaaacgtaccaaatcaaagattcagagggagaagtatctgactcagaaattgcttcacgagaaccacctcaaggacatgacgaagaacatgggagtgatcgcagaaagaatgatcgaagccgttgacaacaatctccgcccaaaatccgaatag

SEQ ID NO: 28833 - DNA, 5975 bp, Artificial Sequence
  derived and/or modified sequence
gagaggcgtcctccggctctgggctccggtcggtgggtgcctcggctcggctttccccggcgctggctgggctcagcggcccctgagcccaagcgacacacgccccgcggtccccgatccggcccctgggagagccgcgccgttctggaacccgggagcccccaacttcgcgccaagttcggagccgccttctgagggagacatgaaaaagatgagcaggaatgttttgctacaaatggaggaggaggaggacgacgacgatggggatatcgtgttggaaaaccttggacagacaattgtccccgatttgggatcactggaaagtcagcatgattttcgaaccccggagtttgaagaatttaatggaaaacctgactccctcttttttaatgatggccagcgaagaattgactttgttctagtatatgaggatgaaagcagaaaagagaccaataaaaagggtacaaatgaaaaacaaaggaggaaaagacaagcatacgaatctaaccttatctgtcatggcctgcagttagaagcaacaagatcagtattggatgacaagcttgtatttgtaaaagtacacgcaccatgggaggtgttatgtacgtatgctgagataatgcacatcaaattgcctctgaaacccaatgatctgaaaaaccggtcctcagcctttggtacactcaactggtttaccaaagtcctcagtgtagacgaaagcatcatcaagccagagcaagagtttttcactgccccatttgagaagaaccggatgaatgatttttacatagttgatagagatgctttcttcaatccagccaccagaagccgcattgtttacttcatcctctctcgggtcaagtatcaagtgataaacaatgttagcaagtttgggatcaacagacttgtaaactctgggatctacaaggcagctttcccactccatgattgcaaattccgccgtcagtcagaggatcccagctgccctaatgaacggtaccttctgtacagagaatgggctcatcctcgaagcatatacaaaaagcagcccttggatcttatcaggaaatactatggagagaagattggaatctactttgcttggctgggctattacactcagatgcttctcctggccgcagttgtaggagtggcttgctttctctatggatatcttaatcaagataactgtacatggagcaaagaagtttgtcatcctgatattggtggcaagatcataatgtgtcctcagtgtgataggctttgtccattctggaaactcaatattacttgcgagtcctcaaagaaattgtgcatcttcgacagttttggaaccctggtctttgcagtatttatgggagtatgggttaccttgtttttggagttttggaagcgacgccaggcagaacttgagtatgaatgggatactgttgagttacagcaggaagaacaagcccgaccagaatacgaagcacgatgtactcacgtagtgataaatgagattactcaggaagaagaacgcattccctttactgcctggggaaaatgtatacggataaccctctgtgccagtgctgtctttttctggatcctattgatcatcgcttcagttattgggatcattgtctataggctctcggtgttcattgtattttctgcaaaacttcccaagaacattaatggaacagacccaatccagaaatacctgactccacagacagccacgtccatcacggcctccatcatcagctttataattatcatgattctgaacaccatatatgaaaaagtggcaattatgattactaacttcgaactcccaaggacccagactgattatgagaacagcctcaccatgaagatgttcttattccagtttgtcaactactactcttcatgcttctacatagcattctttaagggcaaatttgtaggctatccaggagacccagtttattggttgggaaaatacagaaatgaagagtgtgacccaggtggctgtcttcttgaactgacaactcagctgacaataatcatgggaggaaaagcaatctggaataacatacaagaagtattattgccctggatcatgaatctaattgggcgatttcacagagtttctggatcagaaaagataaccccacgatgggaacaggactaccatctgcagcctatgggcaaactgggattattttatgaatatcttgaaatgattattcagtttgggttcgtcaccttatttgtggcctcttttccactggcccctctgttggctctcgtgaacaatatattggaaataagagtggacgcatggaaactgaccacccagtttagacgcctggtaccagagaaagcccaagacattggagcatggcagcccatcatgcaaggaatagcaattctggctgtggtgaccaatgccatgatcatagctttcacgtcggacatgatcccccgcctagtgtactactggtccttctccgtccctccctacggggaccacacttcctacaccatggaagggtacatcaacaacactctctccatcttcaaagtcgcagacttcaaaaacaaaagcaagggaaacccgtactctgacctgggtaaccataccacatgcaggtatcgtgatttccgatacccacctggacacccccaggagtataaacacaacatctactattggcatgtgattgcagccaagctggcttttatcattgtcatggagcacgtcatctactctgtgaaatttttcatttcatatgcaattcccgatgtatcaaaacgcacaaagagcaagatccagagagaaaaatacctaacccaaaagcttcttcatgagaatcacctcaaagatatgacgaaaaatatgggggtgatagctgagcggatgatagaagcagtagataacaatttacggccaaaatcagaataagagctttatgttctgagaagcactttaaggaatttagctttgtcaaaatatattaggaatcactaatgagaatgtgtaagttaaatcactttggcaaatatgagtctcaactattgccatttcctcatgtattatttttcagtttcagctagcgatgcagaaactggaaaatgtaaaacttagatcatgaagggcataaaacttatcacccggaaaacctcaatgttacctttttctgataaattggaattttacagaaaaagtccctcagtgtgcttaaaaaccaccccttctaaagtagaatggattcttttttttctgtttgattattttcatttctgtctattctcaggcgcatgatctcctttatttttaagccatgtttcatttcttcacttggctagatctgttccagggtcatcttttccttacagtaccatcattatagatttaatttaatagctttcatgtgattaaaaatagctaactagactcaaggattcacaatatttaggtgtattttcaatacctccagaaaggaaacctcagttaatcagaggaaatagtttcagtcttcatttgagcatgtctttccatctcaaaaaaatactcttagtaggttggagtgaagatagcaaggttttgaagcatatttgtcctaatccacagtgacactttttatcttccaggagcactcctaggaggttccgtgcctaatcaatgttgactgctttgcagatctcaagggaataaaatgacaaaagcagggaaagttacagattcaaacagcattttaactcatgttgatctggataattaatcttttctaaagatgtgtagtttcttggaaaacagtgatatcacatgattaaaattacatttttatcaacataattgtctggaaaagataagcccctcaattttctaccagttgacttttattcattagatacagaaggtgcagtattacacatcaccagctgcctttgtgaatggctcactacacagccattggggtacaactgtgtgcatgggcagaaacagcaagtgccctcattgtggtcattgggtggggagtgccttttgtcaaggagtctgcaggaattggcttatttctgtatgccaaagtgatcaacacaccaaagtctctgccataaagaatgtggcttccttgcatcctccatcctgttactctgggcccagtaatttgatgtaactgtctgattgtactagagacaggagtatacccagcttattcataatcaagtaaagagactcagattagatttgattttttagcctcctctagagccaatcaggcagttaagagtaataaaggaaaagggtttggtcacaaaccctaccattatctggagattacttcctgctgcactcctgtcttgccatgcacgtcttgccccctcacttttgctcagcctagcagtctacttcactttattgccttgtaagtgtcaggcctcctgggcgctctggaaaagacagggagccaggccctctcacccctactggtaacaggtcattgctgggtgcacaagagggaggtgatttgcatcatggtcatgctgcatgggcttcactgggatgctgttaaacaccagaggagccaacctatcagaatcccagcagcaaaggaaaactcagattttagaggctttttacaataaagtagcgtaactctaggtcatgattgatttcaaatgcctgccatgaatgatttgtaagtaattatgtaggatccatcaaagcagtattgtaggcttttgaattgtcccagtggatccgggaccccatttcactgtctctcttgatcgtgttaatgatgcaatcagagttcaagacaggccccatgaagtctgactgcactgggatggagaaatgaatttcttcccactgaaggaaactctttctcattcgcagccaagacgggagtgccactgttcctctcttcactcctgagatactgcttctggaagcgggtgtcacttcctctctagtacctcttctcttctctgaagtgtgtgactatctcctagtgtttaaatttggcagttactcgccatgtatgtcagcatagaaaaggaaatgtttttaccttatctcctgtatgtatgatagaacttaaaagaaatgtgcatttgttttcatagccccagcagagaaaatcctcttcatagattaaatgtgctgctgtggacaggaggggaaaaaaaaccctctacatattgaaaggcaccaaatgtaatatctgacactgttaagatgcccaaaagagcaaagttgtagtggagatgcagggtcatttccccatgccatccacagtgtttgttagtgagtccacggctgacttgcagtgataaagaaaagcatggagctgtgtctgcagacaatggtggctgcatctgtaagtggcttcagaggcagcagccctggggaaattgatgggtgtggcagtggacctgtgaagagggagaatctagccttcagcctgtccagtgttaaccactagagaaactgagctttatatccttttttaatgcctgtgaattttagcatattgaaacattagagcaaatactcaggggatttttcattaaacatccctcagataatttagctatatatcattagaaagggaaagctatcatttttattttaaaactaaacaaggccatcttataaactgtcaccaaagtcttcccttttttattgcatgtgtgccttgaatttcataaaacattaattcacaatgggggtcagaatgtactcttgttgaaacacttcttgtaccattttatgttcatattatgtttgagagggtaaaaatgtatgagcagcttaactgaagtagaactattcatgatgcttttcacacattgtggcataagatgtaaagtttgtaattaatgttaatttctgtgcattttaatattcttttataattattaatgttaatttctgtgcattttaatattcttttataattatgagcattttaataaattcatttttacaaacaata

SEQ ID NO: 28834 - DNA, 2733 bp, Artificial Sequence
  derived and/or modified sequence
atgaagaagatgagcagaaacgtgctgctgcagatggaggaggaggaggacgacgacgacggcgacatcgtgctggagaacctgggccagaccatcgtgcccgacctgggcagcctggagagccagcacgacttcagaacccccgagttcgaggagttcaacggcaagcccgacagcctgttcttcaacgacggccagagaagaatcgacttcgtgctggtgtacgaggacgagagcagaaaggagaccaacaagaagggcaccaacgagaagcagagaagaaagagacaggcctacgagagcaacctgatctgccacggcctgcagctggaggccaccagaagcgtgctggacgacaagctggtgttcgtgaaggtgcacgccccctgggaggtgctgtgcacctacgccgagatcatgcacatcaagctgcccctgaagcccaacgacctgaagaacagaagcagcgccttcggcaccctgaactggttcaccaaggtgctgagcgtggacgagagcatcatcaagcccgagcaggagttcttcaccgcccccttcgagaagaacagaatgaacgacttctacatcgtggacagagacgccttcttcaaccccgccaccagaagcagaatcgtgtacttcatcctgagcagagtgaagtaccaggtgatcaacaacgtgagcaagttcggcatcaacagactggtgaacagcggcatctacaaggccgccttccccctgcacgactgcaagttcagaagacagagcgaggaccccagctgccccaacgagagatacctgctgtacagagagtgggcccaccccagaagcatctacaagaagcagcccctggacctgatcagaaagtactacggcgagaagatcggcatctacttcgcctggctgggctactacacccagatgctgctgctggccgccgtggtgggcgtggcctgcttcctgtacggctacctgaaccaggacaactgcacctggagcaaggaggtgtgccaccccgacatcggcggcaagatcatcatgtgcccccagtgcgacagactgtgccccttctggaagctgaacatcacctgcgagagcagcaagaagctgtgcatcttcgacagcttcggcaccctggtgttcgccgtgttcatgggcgtgtgggtgaccctgttcctggagttctggaagagaagacaggccgagctggagtacgagtgggacaccgtggagctgcagcaggaggagcaggccagacccgagtacgaggccagatgcacccacgtggtgatcaacgagatcacccaggaggaggagagaatccccttcaccgcctggggcaagtgcatcagaatcaccctgtgcgccagcgccgtgttcttctggatcctgctgatcatcgccagcgtgatcggcatcatcgtgtacagactgagcgtgttcatcgtgttcagcgccaagctgcccaagaacatcaacggcaccgaccccatccagaagtacctgaccccccagaccgccaccagcatcaccgccagcatcatcagcttcatcatcatcatgatcctgaacaccatctacgagaaggtggccatcatgatcaccaacttcgagctgcccagaacccagaccgactacgagaacagcctgaccatgaagatgttcctgttccagttcgtgaactactacagcagctgcttctacatcgccttcttcaagggcaagttcgtgggctaccccggcgaccccgtgtactggctgggcaagtacagaaacgaggagtgcgaccccggcggctgcctgctggagctgaccacccagctgaccatcatcatgggcggcaaggccatctggaacaacatccaggaggtgctgctgccctggatcatgaacctgatcggcagattccacagagtgagcggcagcgagaagatcacccccagatgggagcaggactaccacctgcagcccatgggcaagctgggcctgttctacgagtacctggagatgatcatccagttcggcttcgtgaccctgttcgtggccagcttccccctggcccccctgctggccctggtgaacaacatcctggagatcagagtggacgcctggaagctgaccacccagttcagaagactggtgcccgagaaggcccaggacatcggcgcctggcagcccatcatgcagggcatcgccatcctggccgtggtgaccaacgccatgatcatcgccttcaccagcgacatgatccccagactggtgtactactggagcttcagcgtgcccccctacggcgaccacaccagctacaccatggagggctacatcaacaacaccctgagcatcttcaaggtggccgacttcaagaacaagagcaagggcaacccctacagcgacctgggcaaccacaccacctgcagatacagagacttcagatacccccccggccacccccaggagtacaagcacaacatctactactggcacgtgatcgccgccaagctggccttcatcatcgtgatggagcacgtgatctacagcgtgaagttcttcatcagctacgccatccccgacgtgagcaagagaaccaagagcaagatccagagagagaagtacctgacccagaagctgctgcacgagaaccacctgaaggacatgaccaagaacatgggcgtgatcgccgagagaatgatcgaggccgtggacaacaacctgagacccaagagcgagtag

SEQ ID NO: 28835 - protein, 155 aa, Artificial Sequence
  derived and/or modified sequence
MGPGDFRRCRERISQGLQGLPGRAELWFPPRPACDFFGDGRSTDIQEEALAASPLLEDLRRRLTRAFQWAVQRAISRRVQEAAAAAAAREEQSWTGVEATLARLRAELVEMHFQNHQLARTLLDLNMKVQQLKKEYELEITSDSQSPKDDAANPE

SEQ ID NO: 28836 - DNA, 468 bp, Artificial Sequence
  derived and/or modified sequence
atgggccccggcgacttcagaagatgcagagagagaatcagccagggcctgcagggcctgcccggcagagccgagctgtggttcccccccagacccgcctgcgacttcttcggcgacggcagaagcaccgacatccaggaggaggccctggccgccagccccctgctggaggacctgagaagaagactgaccagagccttccagtgggccgtgcagagagccatcagcagaagagtgcaggaggccgccgccgccgccgccgccagagaggagcagagctggaccggcgtggaggccaccctggccagactgagagccgagctggtggagatgcacttccagaaccaccagctggccagaaccctgctggacctgaacatgaaggtgcagcagctgaagaaggagtacgagctggagatcaccagcgacagccagagccccaaggacgacgccgccaaccccgagtag

SEQ ID NO: 28837 - DNA, 2299 bp, Artificial Sequence
  derived and/or modified sequence
catctttcagcagcagcggtagagcagtgaccaggcgtctccgcgatgggccccggggacttccgccgctgcagagagagaatttcccaggggctccagggactcccaggtagagcggagctttggttcccacctcgtcccgcgtgcgacttcttcggggacggcaggagcacggacatccaggaggaggccctcgccgccagcccgctgctggaggacctcagacgacggctgacgcgcgccttccagtgggcggtgcagcgcgcgatctcgaggcgcgtgcaggaggcggcggcggcggcggcggcgcgggaggagcagagctggacgggcgttgaggccaccctggccaggctgcgggcggagctggtggaaatgcatttccaaaaccaccagctggctagaactttactggacctaaacatgaaagtgcagcaattgaaaaaggagtatgaactggaaattacatcagactcccaaagcccaaaagatgatgctgcgaatccggaataaagaaatgcacacgcaagggctgggcgcggtggctcacgcctgtaatcccagcactttgggaggccgaggcgggcggatcaagacgtcaggagattgagaccatcctggctaacactgtgaaaccctgcctctactaaaaatacaaaaaattagccagacgtggtggcaggcacctgtagtccctgctactcaggagtctgaggcaggagaatggcgtgaacccaggagacagagcttgcagtgagccgaaatcctgccactgcactccagcctgggtgacagagcaagactccatctcaaaaaaaaaaaaaaaaaaaaaagcacacgcgaagctctggatcctaaaactaacgcatacaaccctgaaacaattctgatgaacacattatgctttgcataagttttgaggggcaatttatagacccaaaacaaatgacaggggaaggtgacagaaaaacatctaagagaggggagagaaaaatgatgtattaccaagttttaaagttatttatttgttatttttactgggacatagaagtaaaatataactatagataaatctctctctgtctctctcactcaaagaatgctttaatgccaactttcggtattcaaccttgtgtcacctgacctttctggcattgcctgagctttcagagtttgtgcttgttttgttttacttgattattctcagtttgtctgtccagcagcctgccctgcttcttgtggagaattgtttctacttggattctaaccatgccctttaggtggtctgtgactaagggtattccatcttcctggatatagtcatgcagctcaaggcaggcagatgggtttgtccttaggatttttgaatgggcactaaaagagtagatgactatttctgccagtagaagctgtggatcaggggcttggaagctgctggtggtcaccatgtgagaaagcccacaccctaatggaggtgactgaaacggaaccactaaaagcacaaaaggggagggagggagggagggtgcttcgcttccttgttcctggggtcaagctgtataagactccaggccttgctcttgtttatgtacatgaaatattctgatatccttctcataaaatctctttttgcctaagtaaattcaagctggagtttcatgacttgtatctagtgttcataactaatacagttgttcagttttaggagttaaaatggttcttactgttgaattggactatctaactgtacccgaaaagtgctgtctttttaatgcaaacagtaaagttaataaaaaatagttgcagatctaagtgatatttataatggttattgtctgcaaaatacaaattaatttataacaagctatgtaattttaatatttaataaactataaaaatcagttcttgaagacaaaggagaacagaagagacacagtctttctcttgttaaaagaaatacaaggacaagcatggtggatcacgcttgtaattccagcactttgggaggctgaggtgggcagattgtttgagctcaggagtttgagaccagcctggtcaacatggcaaaaccccatctctactaaaaatacaaaaattagccaggcgtggtggtgctcgcctatagtaccagctactcaggaggctgaggcataagaatcacttgaacctgggagatggaggttgcagtgagccgagatcatgcccctgcactccagcctgggtgacagagggggacttggcctcgaaaaaataaataaataataaaaataaaataaatgcaagttgttttatgtgtgtg

SEQ ID NO: 28838 - DNA, 468 bp, Artificial Sequence
  derived and/or modified sequence
atgggccccggcgacttccggaggtgtagagagaggatctcccaaggattgcagggtctaccgggccgagccgaactgtggtttcctccaaggcctgcctgcgacttcttcggcgacggtagatccaccgatatccaagaagaagcactggctgcatcaccattactcgaagacttgcgacgcagactcaccagagccttccagtgggctgtccaaagagccatcagtaggcgtgttcaggaagccgcagccgccgcagcagctagagaggaacaaagttggacgggagtggaagccacactggctcgcctgcgtgctgaactggttgaaatgcactttcaaaatcaccagctggccagaacactgctcgatctgaacatgaaagttcagcagcttaagaaggagtatgagttagagattacctccgactcccaatccccaaaagacgatgctgccaatccagagtag

SEQ ID NO: 28839 - DNA, 468 bp, Artificial Sequence
  derived and/or modified sequence
atgggccctggggacttccgccgctgccgggagcgcatcagccagggcctgcagggcctgcccggccgggcagagctgtggttcccccccaggcctgcctgtgacttctttggagatggccgcagcacagacatccaggaggaggccctggccgccagccccctgctggaggacctgcggcggcggctgacccgggccttccagtgggccgtgcagagggccatcagcagaagagtgcaggaggccgctgctgctgctgctgcccgggaggagcagagctggacaggagtggaggccaccctggcccggctgcgggcagagctggtggagatgcacttccagaaccaccagctggcccggaccctgctggacctgaacatgaaggtgcagcagctgaagaaggagtatgagctggagatcaccagtgacagccagagccccaaggatgatgctgccaaccctgagtag

SEQ ID NO: 28840 - DNA, 468 bp, Artificial Sequence
  derived and/or modified sequence
atgggccccggcgacttccggcggtgccgggagcggatcagccagggcctgcaggggctgccaggccgggcagaattgtggttccctcctaggcctgcttgcgacttcttcggtgacggccgttccactgacatccaagaagaggccctcgctgcctccccactacttgaggatcttcgccgccgactcacccgcgctttccaatgggctgttcagagagccattagccggagagtgcaggaagcagccgcagccgctgcagcccgagaggaacagagttggacgggcgtggaagctaccctagctaggctccgggccgagctcgtcgaaatgcacttccagaaccatcagctggctcgcactctactggacttaaacatgaaagttcagcaactcaaaaaggagtacgagctcgagatcacatccgatagtcagtcccccaaggacgatgctgcaaatcctgaatag

SEQ ID NO: 28841 - DNA, 468 bp, Artificial Sequence
  derived and/or modified sequence
atggggccaggcgactttagaagatgcagggaacgcatatctcaaggcttgcagggcttaccaggcagagctgaactgtggtttccgccaaggcctgcctgcgacttcttcggggacggtaggagtaccgacattcaggaggaggcattggcagccagtccactgctcgaggatttacgcaggcgcctcaccagggctttccagtgggccgtccagcgcgctattagtcggcgagtgcaagaggctgccgctgccgctgcagccagagaggaacagtcatggacaggggtcgaagccacgctggcgcgactcagggcagaactggtggaaatgcacttccagaatcatcagctggcacgaaccctcctggacctaaatatgaaggtacagcagcttaagaaagaatacgaactggagatcacctccgatagccagagccccaaagatgacgccgctaatccagagtag

SEQ ID NO: 28842 - protein, 412 aa, Artificial Sequence
  derived and/or modified sequence
LTDRQTDTAPSPSYHLLPGRRRTVDAAASRGQGPEPAPGGGVEGVGARGVALKLFVQLLGCSRFGGAVVRAGEAEPSGAARSASSGREEPQPEEGEEEEEKEEERGPQWRLGARKPGSWTGEAAVCADSAPAARAPQALARASGRGGRVARRGAEESGPPHSPSRRGSASRAGPGRASETMNFLLSWVHWSLALLLYLHHAKWSQAAPMAEGGGQNHHEVVKFMDVYQRSYCHPIETLVDIFQEYPDEIEYIFKPSCVPLMRCGGCCNDEGLECVPTEESNITMQIMRIKPHQGQHIGEMSFLQHNKCECRPKKDRARQEKKSVRGKGKGQKRKRKKSRYKSWSVYVGARCCLMPWSLPGPHPCGPCSERRKHLFVQDPQTCKCSCKNTDSRCKARQLELNERTCRCDKPRR

SEQ ID NO: 28843 - protein, 232 aa, Artificial Sequence
  derived and/or modified sequence
MNFLLSWVHWSLALLLYLHHAKWSQAAPMAEGGGQNHHEVVKFMDVYQRSYCHPIETLVDIFQEYPDEIEYIFKPSCVPLMRCGGCCNDEGLECVPTEESNITMQIMRIKPHQGQHIGEMSFLQHNKCECRPKKDRARQEKKSVRGKGKGQKRKRKKSRYKSWSVYVGARCCLMPWSLPGPHPCGPCSERRKHLFVQDPQTCKCSCKNTDSRCKARQLELNERTCRCDKPRR

SEQ ID NO: 28844 - protein, 412 aa, Artificial Sequence
  derived and/or modified sequence
MTDRQTDTAPSPSYHLLPGRRRTVDAAASRGQGPEPAPGGGVEGVGARGVALKLFVQLLGCSRFGGAVVRAGEAEPSGAARSASSGREEPQPEEGEEEEEKEEERGPQWRLGARKPGSWTGEAAVCADSAPAARAPQALARASGRGGRVARRGAEESGPPHSPSRRGSASRAGPGRASETMNFLLSWVHWSLALLLYLHHAKWSQAAPMAEGGGQNHHEVVKFMDVYQRSYCHPIETLVDIFQEYPDEIEYIFKPSCVPLMRCGGCCNDEGLECVPTEESNITMQIMRIKPHQGQHIGEMSFLQHNKCECRPKKDRARQEKKSVRGKGKGQKRKRKKSRYKSWSVYVGARCCLMPWSLPGPHPCGPCSERRKHLFVQDPQTCKCSCKNTDSRCKARQLELNERTCRCDKPRR

SEQ ID NO: 28845 - DNA, 3677 bp, Artificial Sequence
  derived and/or modified sequence
tcgcggaggcttggggcagccgggtagctcggaggtcgtggcgctgggggctagcaccagcgctctgtcgggaggcgcagcggttaggtggaccggtcagcggactcaccggccagggcgctcggtgctggaatttgatattcattgatccgggttttatccctcttcttttttcttaaacatttttttttaaaactgtattgtttctcgttttaatttatttttgcttgccattccccacttgaatcgggccgacggcttggggagattgctctacttccccaaatcactgtggattttggaaaccagcagaaagaggaaagaggtagcaagagctccagagagaagtcgaggaagagagagacggggtcagagagagcgcgcgggcgtgcgagcagcgaaagcgacaggggcaaagtgagtgacctgcttttgggggtgaccgccggagcgcggcgtgagccctcccccttgggatcccgcagctgaccagtcgcgctgacggacagacagacagacaccgcccccagccccagctaccacctcctccccggccggcggcggacagtggacgcggcggcgagccgcgggcaggggccggagcccgcgcccggaggcggggtggagggggtcggggctcgcggcgtcgcactgaaacttttcgtccaacttctgggctgttctcgcttcggaggagccgtggtccgcgcgggggaagccgagccgagcggagccgcgagaagtgctagctcgggccgggaggagccgcagccggaggagggggaggaggaagaagagaaggaagaggagagggggccgcagtggcgactcggcgctcggaagccgggctcatggacgggtgaggcggcggtgtgcgcagacagtgctccagccgcgcgcgctccccaggccctggcccgggcctcgggccggggaggaagagtagctcgccgaggcgccgaggagagcgggccgccccacagcccgagccggagagggagcgcgagccgcgccggccccggtcgggcctccgaaaccatgaactttctgctgtcttgggtgcattggagccttgccttgctgctctacctccaccatgccaagtggtcccaggctgcacccatggcagaaggaggagggcagaatcatcacgaagtggtgaagttcatggatgtctatcagcgcagctactgccatccaatcgagaccctggtggacatcttccaggagtaccctgatgagatcgagtacatcttcaagccatcctgtgtgcccctgatgcgatgcgggggctgctgcaatgacgagggcctggagtgtgtgcccactgaggagtccaacatcaccatgcagattatgcggatcaaacctcaccaaggccagcacataggagagatgagcttcctacagcacaacaaatgtgaatgcagaccaaagaaagatagagcaagacaagaaaaaaaatcagttcgaggaaagggaaaggggcaaaaacgaaagcgcaagaaatcccggtataagtcctggagcgtgtacgttggtgcccgctgctgtctaatgccctggagcctccctggcccccatccctgtgggccttgctcagagcggagaaagcatttgtttgtacaagatccgcagacgtgtaaatgttcctgcaaaaacacagactcgcgttgcaaggcgaggcagcttgagttaaacgaacgtacttgcagatgtgacaagccgaggcggtgagccgggcaggaggaaggagcctccctcagggtttcgggaaccagatctctcaccaggaaagactgatacagaacgatcgatacagaaaccacgctgccgccaccacaccatcaccatcgacagaacagtccttaatccagaaacctgaaatgaaggaagaggagactctgcgcagagcactttgggtccggagggcgagactccggcggaagcattcccgggcgggtgacccagcacggtccctcttggaattggattcgccattttatttttcttgctgctaaatcaccgagcccggaagattagagagttttatttctgggattcctgtagacacacccacccacatacatacatttatatatatatatattatatatatataaaaataaatatctctattttatatatataaaatatatatattctttttttaaattaacagtgctaatgttattggtgtcttcactggatgtatttgactgctgtggacttgagttgggaggggaatgttcccactcagatcctgacagggaagaggaggagatgagagactctggcatgatcttttttttgtcccacttggtggggccagggtcctctcccctgcccaggaatgtgcaaggccagggcatgggggcaaatatgacccagttttgggaacaccgacaaacccagccctggcgctgagcctctctaccccaggtcagacggacagaaagacagatcacaggtacagggatgaggacaccggctctgaccaggagtttggggagcttcaggacattgctgtgctttggggattccctccacatgctgcacgcgcatctcgcccccaggggcactgcctggaagattcaggagcctgggcggccttcgcttactctcacctgcttctgagttgcccaggagaccactggcagatgtcccggcgaagagaagagacacattgttggaagaagcagcccatgacagctccccttcctgggactcgccctcatcctcttcctgctccccttcctggggtgcagcctaaaaggacctatgtcctcacaccattgaaaccactagttctgtccccccaggagacctggttgtgtgtgtgtgagtggttgaccttcctccatcccctggtccttcccttcccttcccgaggcacagagagacagggcaggatccacgtgcccattgtggaggcagagaaaagagaaagtgttttatatacggtacttatttaatatccctttttaattagaaattaaaacagttaatttaattaaagagtagggttttttttcagtattcttggttaatatttaatttcaactatttatgagatgtatcttttgctctctcttgctctcttatttgtaccggtttttgtatataaaattcatgtttccaatctctctctccctgatcggtgacagtcactagcttatcttgaacagatatttaattttgctaacactcagctctgccctccccgatcccctggctccccagcacacattcctttgaaataaggtttcaatatacatctacatactatatatatatttggcaacttgtatttgtgtgtatatatatatatatatgtttatgtatatatgtgattctgataaaatagacattgctattctgttttttatatgtaaaaacaaaacaagaaaaaatagagaattctacatactaaatctctctccttttttaattttaatatttgttatcatttatttattggtgctactgtttatccgtaataattgtggggaaaagatattaacatcacgtctttgtctctagtgcagtttttcgagatattccgtagtacatatttatttttaaacaacgacaaagaaatacagatatatcttaaaaaaaaaaaagcattttgtattaaagaatttaattctgatctcaaaaaaaaaaaaaaaaaa

SEQ ID NO: 28846 - DNA, 1236 bp, Artificial Sequence
  derived and/or modified sequence
ctgaccgaccgccagaccgacaccgcccccagccccagctaccacctgctgcccggccgccgccgcaccgtggacgccgccgccagccgcggccagggccccgagcccgcccccggcggcggcgtggagggcgtgggcgcccgcggcgtggccctgaagctgttcgtgcagctgctgggctgcagccgcttcggcggcgccgtggtgcgcgccggcgaggccgagcccagcggcgccgcccgcagcgccagcagcggccgcgaggagccccagcccgaggagggcgaggaggaggaggagaaggaggaggagcgcggcccccagtggcgcctgggcgcccgcaagcccggcagctggaccggcgaggccgccgtgtgcgccgacagcgcccccgccgcccgcgccccccaggccctggcccgcgccagcggccgcggcggccgcgtggcccgccgcggcgccgaggagagcggccccccccacagccccagccgccgcggcagcgccagccgcgccggccccggccgcgccagcgagaccatgaacttcctgctgagctgggtgcactggagcctggccctgctgctgtacctgcaccacgccaagtggagccaggccgcccccatggccgagggcggcggccagaaccaccacgaggtggtgaagttcatggacgtgtaccagcgcagctactgccaccccatcgagaccctggtggacatcttccaggagtaccccgacgagatcgagtacatcttcaagcccagctgcgtgcccctgatgcgctgcggcggctgctgcaacgacgagggcctggagtgcgtgcccaccgaggagagcaacatcaccatgcagatcatgcgcatcaagccccaccagggccagcacatcggcgagatgagcttcctgcagcacaacaagtgcgagtgccgccccaagaaggaccgcgcccgccaggagaagaagagcgtgcgcggcaagggcaagggccagaagcgcaagcgcaagaagagccgctacaagagctggagcgtgtacgtgggcgcccgctgctgcctgatgccctggagcctgcccggcccccacccctgcggcccctgcagcgagcgccgcaagcacctgttcgtgcaggacccccagacctgcaagtgcagctgcaagaacaccgacagccgctgcaaggcccgccagctggagctgaacgagcgcacctgccgctgcgacaagccccgccgc

SEQ ID NO: 28847 - DNA, 1239 bp, Artificial Sequence
  derived and/or modified sequence
ctgaccgacagacagaccgacaccgcccccagccccagctaccacctgctgcccggcagaagaagaaccgtggacgccgccgccagcagaggccagggccccgagcccgcccccggcggcggcgtggagggcgtgggcgccagaggcgtggccctgaagctgttcgtgcagctgctgggctgcagcagattcggcggcgccgtggtgagagccggcgaggccgagcccagcggcgccgccagaagcgccagcagcggcagagaggagccccagcccgaggagggcgaggaggaggaggagaaggaggaggagagaggcccccagtggagactgggcgccagaaagcccggcagctggaccggcgaggccgccgtgtgcgccgacagcgcccccgccgccagagccccccaggccctggccagagccagcggcagaggcggcagagtggccagaagaggcgccgaggagagcggccccccccacagccccagcagaagaggcagcgccagcagagccggccccggcagagccagcgagaccatgaacttcctgctgagctgggtgcactggagcctggccctgctgctgtacctgcaccacgccaagtggagccaggccgcccccatggccgagggcggcggccagaaccaccacgaggtggtgaagttcatggacgtgtaccagagaagctactgccaccccatcgagaccctggtggacatcttccaggagtaccccgacgagatcgagtacatcttcaagcccagctgcgtgcccctgatgagatgcggcggctgctgcaacgacgagggcctggagtgcgtgcccaccgaggagagcaacatcaccatgcagatcatgagaatcaagccccaccagggccagcacatcggcgagatgagcttcctgcagcacaacaagtgcgagtgcagacccaagaaggacagagccagacaggagaagaagagcgtgagaggcaagggcaagggccagaagagaaagagaaagaagagcagatacaagagctggagcgtgtacgtgggcgccagatgctgcctgatgccctggagcctgcccggcccccacccctgcggcccctgcagcgagagaagaaagcacctgttcgtgcaggacccccagacctgcaagtgcagctgcaagaacaccgacagcagatgcaaggccagacagctggagctgaacgagagaacctgcagatgcgacaagcccagaagatag

SEQ ID NO: 28848 - DNA, 1239 bp, Artificial Sequence
  derived and/or modified sequence
ctcaccgatagacaaaccgataccgccccaagcccctcataccacctacttcctggcaggcggcggaccgtggacgctgccgcctccagaggacagggaccggagcccgctcctggaggtggtgttgagggggtgggggctcgaggtgtcgccctgaagctatttgtccagctgctcggctgcagccgatttggcggggccgtggttagggccggagaggcggagccgtctggagctgccaggagtgcctcaagtggaagggaggaaccccagcccgaggaaggtgaggaggaggaggagaaggaggaggaacgcggcccccagtggcgtcttggagcacgcaagcctggctcttggacaggcgaggctgccgtgtgtgccgattcagcacctgctgcccgggctccgcaggctcttgcccgggcatctgggaggggtgggcgggtagcacgtagaggggcagaggaatccgggccaccccactcaccatctaggcgtggatccgcctctcgagccggccccgggcgcgctagtgaaacaatgaacttccttctaagctgggtgcactggagcttggccctcttgttatacctgcatcatgccaagtggagtcaggccgcgccaatggccgagggaggtggacagaatcaccatgaggtcgtcaagtttatggatgtctaccaaagatcctactgccacccaattgagacattagtcgacatcttccaggaataccctgatgagatcgagtacatcttcaagcccagttgtgtccctctgatgcgatgtggggggtgctgcaatgatgaaggactggagtgcgtgcccacagaggagtcaaatattaccatgcagatcatgcgcataaagccccaccaggggcagcatattggcgagatgtctttcctgcaacataacaagtgcgagtgtagaccgaaaaaagatcgggccagacaagaaaagaaaagcgtccgcggcaagggcaaaggacagaagcgtaagcggaagaagagcagatacaagtcctggtctgtctacgtgggcgcgaggtgctgtctgatgccctggagccttccaggccctcatccatgcggtccttgcagcgaaaggcgtaaacacctctttgtgcaggatcctcagacttgcaagtgctcttgcaagaatactgatagtcgctgcaaggcccgacagctcgagctgaatgaaaggacatgtcggtgtgacaaacccagacggtag

SEQ ID NO: 28849 - DNA, 1239 bp, Artificial Sequence
  derived and/or modified sequence
ctgacagaccggcagacagacacagcccccagccccagctaccacctgctgcccggcagaagaagaacagtggatgctgctgccagccggggccagggccctgagcccgcccctgggggcggcgtggagggcgtgggcgcccggggcgtggccctgaagctgtttgtgcagctgctgggctgcagcagatttggaggagctgtggtgcgggccggggaggccgagcccagcggggccgcccggagcgccagcagcggccgggaggagccccagcctgaggagggggaggaggaggaggagaaggaggaggagcggggcccccagtggaggctgggcgccaggaagccaggctcctggacaggagaggccgctgtgtgtgccgacagcgccccagctgcccgggccccccaggccctggcccgggccagcggccggggcggccgggtggccaggagaggagctgaggagagcggccccccccacagccccagcagaagaggcagcgccagccgggccggccctggccgggccagcgagaccatgaacttcctgctgtcctgggtgcactggagcctggccctgctgctgtacctgcaccacgccaagtggagccaggccgcccccatggccgagggcggcggccagaaccaccacgaggtggtgaagttcatggatgtgtaccagaggagctactgccaccccatcgagaccctggtggacatcttccaggagtacccagatgaaattgagtacatcttcaagcccagctgtgtgcccctgatgagatgtggcggctgctgcaatgatgagggcctggagtgtgtgcccacagaggagagcaacatcaccatgcagatcatgaggatcaagccccaccagggccagcacatcggggagatgtccttcctgcagcacaacaagtgtgaatgtcggcccaagaaggaccgggcccggcaggagaagaagtctgtgcggggcaagggcaagggccagaagaggaagaggaagaagagccgctacaagtcctggagcgtgtatgtgggcgcccgctgctgcctgatgccctggagcctgcccggcccccacccctgtggcccctgcagcgagaggaggaagcacctgtttgtgcaggacccccagacctgcaagtgcagctgcaagaacacagacagccgctgcaaggcccggcagctggagctgaatgaaagaacctgccgctgtgacaagcccaggaggtag

SEQ ID NO: 28850 - DNA, 1239 bp, Artificial Sequence
  derived and/or modified sequence
ctgaccgaccggcagaccgacaccgcccccagccccagctaccacctcctaccagggcgcaggagaaccgtggatgcagctgccagtcggggacagggaccagagcctgccccgggaggaggagtggagggagtcggggccagaggcgtcgccttaaaactgtttgtacagctcttgggatgctctaggttcggaggggctgtggttagggcaggggaagccgagccttccggcgcagcaaggagtgcctccagcggccgcgaagaaccacagcctgaggaaggtgaggaggaggaagagaaggaggaagagagaggcccccagtggcggctcggcgccaggaagcccggaagttggactggggaagcagcagtctgcgcagactctgcgcctgcagcccgagcgcctcaggccctggctcgggcgtctgggagaggaggcagggtagcacgcagaggcgccgaagaaagcggccccccccactcaccctctcggagaggctctgcgagcagagcaggacccggccgtgcctctgaaacaatgaatttcctccttagttgggtgcactggagcctggctctactcctctacctgcatcacgccaaatggtctcaggctgctccaatggctgaaggaggcggccagaaccaccacgaggtggtgaaattcatggatgtataccagcggagttactgccacccaatagagactctcgtagacatatttcaggagtacccagacgagattgaatatatcttcaagcctagctgtgtgccgttaatgcggtgtggggggtgttgcaatgacgagggactggagtgcgtcccaaccgaggagagcaacataaccatgcagatcatgcgcatcaagccgcaccagggccaacacatcggtgagatgtctttcctgcagcacaacaagtgcgaatgtagacccaagaaggacagggccagacaggaaaagaaatccgtacgtggaaagggcaaaggacagaaacgtaagagaaagaagtccagatataaaagctggagcgtttatgttggagcgagatgctgtctgatgccgtggagtctgcccgggccacacccttgcggcccctgctccgagagacgaaaacacttgtttgtgcaagatcctcagacttgtaaatgtagctgtaaaaacactgacagccggtgtaaagcaaggcagctcgaactgaacgaacgcacatgtcgatgtgataagcctaggcggtag

SEQ ID NO: 28851 - DNA, 1239 bp, Artificial Sequence
  derived and/or modified sequence
cttaccgacaggcagactgacaccgccccaagcccttcctatcatctgttgcctggcaggcggagaacggttgacgccgcagccagccggggtcaaggtccagaacccgctcctggtgggggagtggagggagtgggcgctaggggcgttgccctcaaacttttcgtccagctactcggctgcagcaggttcggcggagcggtcgtgcgagcaggggaagccgagccctctggcgctgcgaggagcgcttcttcagggagggaggagcctcagcccgaggaaggggaggaagaggaagagaaggaggaagaaagaggccctcagtggcgcctcggtgctcgcaagcccggttcatggaccggcgaagctgccgtttgcgccgattccgctccggcagccagggctccacaggccctcgccagagctagtggtagagggggtcgggtggcacggcgaggagccgaagagtctggacctcctcatagcccttctcggagagggtctgcctctagagccggacccggtcgagccagtgaaacaatgaacttcctgttatcttgggtacattggagcctggctctgctgttgtacctgcaccacgcgaagtggtctcaagccgcacccatggcagagggtggcggtcagaatcatcatgaggtcgtgaaatttatggacgtgtaccagcggtcttattgtcatccaatcgaaacgctggtcgatatctttcaggaatacccagacgagatcgagtatatatttaaaccgtcttgtgtccctcttatgcgttgcggagggtgctgcaatgatgagggtttggaatgcgtgcctacagaggaatctaatataaccatgcagatcatgcgaattaagccacaccagggacagcatattggcgaaatgtccttcctgcaacataacaaatgtgagtgtagaccgaaaaaggatcgggcacgacaagagaagaaatccgtcagaggcaagggcaagggccagaagcgaaaacggaagaaatcgaggtataagagctggtccgtctacgttggcgcacgctgttgtttgatgccatggtcactacctggaccacacccctgcggcccttgtagtgagcggcgtaagcatctgtttgtgcaggatccccaaacttgtaaatgcagctgcaaaaacaccgactctaggtgcaaagccaggcagcttgagttgaacgagagaacctgtcgctgtgacaagccacggcgatag

SEQ ID NO: 28852 - DNA, 1239 bp, Artificial Sequence
  derived and/or modified sequence
ctaactgatcgtcagaccgacacagcgccctctccgtcataccatctactgccaggccgcagaagaaccgtcgatgccgcagcatccagaggacagggtcctgagcccgctcccgggggaggcgttgagggggtcggagctcggggcgtggcgttgaagctgttcgtgcagctgctcggttgttcccgtttcggtggtgctgtggtgcgcgcaggggaggcagaaccttctggagcagctaggagtgctagttctggccgggaagaaccacagccggaggaaggcgaagaagaagaggagaaggaggaagagcgcggtccccagtggagattgggtgccagaaagccaggaagttggactggagaggcagctgtatgcgccgacagtgccccagccgcaagggctcctcaggcattagctcgggcatcagggcgcggcggaagagtggctagacgcggagctgaggagtcaggcccccctcattctccttctaggcggggaagtgccagccgagcgggccccggcagggcttcagagaccatgaattttctacttagctgggtacattggagcctggcacttctcctctatctccaccacgccaagtggtctcaggccgccccaatggcggaaggcggtggccaaaaccaccacgaagtagtgaagtttatggatgtctaccagcgtagttactgtcaccctatcgagaccttggttgatattttccaggagtaccccgatgagatagaatatatattcaagccttcatgcgttccgctgatgagatgtggtggatgctgtaatgatgaggggctcgaatgtgttccgaccgaggagtccaacatcacaatgcaaatcatgcggataaagccacaccagggccagcatatcggggagatgagcttcctccagcacaataagtgcgagtgtaggcctaagaaagatagggctcggcaagaaaaaaaatcagtcagaggcaagggcaaaggccagaagcggaaacgcaagaaatcccgctataaaagctggagcgtctatgtaggcgctagatgttgtctgatgccctggagtctaccaggtccccacccatgtggtccttgttcggagagaaggaagcacttgttcgtgcaggacccacagacctgtaaatgtagctgtaagaacaccgactctagatgtaaggcccggcaacttgagctgaatgagcggacatgtcgctgcgacaaaccgcggagatag

SEQ ID NO: 28853 - DNA, 1239 bp, Artificial Sequence
  derived and/or modified sequence
ctgacggacagacagactgatacagccccgtctccatcctatcacttgttaccaggcagacgaagaaccgtcgacgccgctgcctctcgtggtcaaggacctgagcctgcacctggggggggagtggagggcgtgggagcaagaggagtagcattgaagctgtttgttcagctgctcggatgcagcagattcgggggagcagtggtacgcgccggcgaggccgagccgagcggagctgccaggtcagcttcatcaggccgggaagagccacaacccgaagagggcgaagaggaagaggaaaaggaagaagagagaggaccccaatggaggttaggagcacggaaaccgggcagctggaccggagaagcagctgtatgtgccgacagcgctcctgcagcaagagccccccaagcattggctcgtgcaagcggacggggtggtagagtagctcggcggggtgcagaggaaagtggtccaccccattccccctctcgcagaggctctgcctctcgggcaggccccggcagagcgtcggagaccatgaactttcttctcagctgggtacattggtctcttgccctgcttttatatctgcatcatgctaagtggagccaggctgcccctatggccgaaggaggagggcagaatcatcatgaagtcgtcaagttcatggacgtttaccaacggagttattgtcatcccattgagaccctagttgacatctttcaggagtacccagacgagatcgaatacatcttcaagcctagctgtgtgcctctcatgcggtgtggtggctgttgtaacgatgaaggcctcgagtgtgtacccaccgaagaatccaatattacaatgcaaattatgaggatcaaacctcatcagggacagcatatcggcgagatgtcattcctgcaacacaataaatgcgagtgccgcccaaaaaaagacagagcccggcaagaaaagaagagtgttcgaggcaagggcaagggtcagaaaagaaagagaaaaaaatcaagatacaaatcgtggagtgtgtacgtaggagctcggtgttgcttgatgccatggagtctccccggaccccacccatgtggaccgtgttctgaacgccgcaagcatctgttcgttcaagacccccaaacatgtaagtgttcttgcaagaataccgattctcgatgcaaggcacggcaactggagttaaacgaaagaacatgccgttgcgacaaacccaggagatag

SEQ ID NO: 28854 - DNA, 1286 bp, Artificial Sequence
  derived and/or modified sequence
ctgacggacagacagacagacaccgcccccagccccagctaccacctcctccccggccggcggcggacagtggacgcggcggcgagccgcgggcaggggccggagcccgcgcccggaggcggggtggagggggtcggggctcgcggcgtcgcactgaaacttttcgtccaacttctgggctgttctcgcttcggaggagccgtggtccgcgcgggggaagccgagccgagcggagccgcgagaagtgctagctcgggccgggaggagccgcagccggaggagggggaggaggaagaagagaaggaagaggagagggggccgcagtggcgactcggcgctcggaagccgggctcatggacgggtgaggcggcggtgtgcgcagacagtgctccagccgcgcgcgctccccaggccctggcccgggcctcgggccggggaggaagagtagctcgccgaggcgccgaggagagcgggccgccccacagcccgagccggagagggagcgcgagccgcgccggccccggtcgggcctccgaaaccatgaactttctgctgtcttgggtgcattggagccttgccttgctgctctacctccaccatgccaagtggtcccaggctgcacccatggcagaaggaggagggcagaatcatcacgaagtggtgaagttcatggatgtctatcagcgcagctactgccatccaatcgagaccctggtggacatcttccaggagtaccctgatgagatcgagtacatcttcaagccatcctgtgtgcccctgatgcgatgcgggggctgctgcaatgacgagggcctggagtgtgtgcccactgaggagtccaacatcaccatgcagattatgcggatcaaacctcaccaaggccagcacataggagagatgagcttcctacagcacaacaaatgtgaatgcagaccaaagaaagatagagcaagacaagaaaaaaaatcagttcgaggaaagggaaaggggcaaaaacgaaagcgcaagaaatcccggtataagtcctggagcgtgtacgttggtgcccgctgctgtctaatgccctggagcctccctggcccccatccctgtgggccttgctcagagcggagaaagcatttgtttgtacaagatccgcagacgtgtaaatgttcctgcaaaaacacagactcgcgttgcaaggcgaggcagcttgagttaaacgaacgtacttgcagatgtgacaagccgaggcggtgagccgggcaggaggaaggagcctccctcagggtttcgggaaccagatc

SEQ ID NO: 28855 - DNA, 784 bp, Artificial Sequence
  derived and/or modified sequence
gcgcgagccgcgccggccccggtcgggcctccgaaaccatgaactttctgctgtcttgggtgcattggagccttgccttgctgctctacctccaccatgccaagtggtcccaggctgcacccatggcagaaggaggagggcagaatcatcacgaagtggtgaagttcatggatgtctatcagcgcagctactgccatccaatcgagaccctggtggacatcttccaggagtaccctgatgagatcgagtacatcttcaagccatcctgtgtgcccctgatgcgatgcgggggctgctgcaatgacgagggcctggagtgtgtgcccactgaggagtccaacatcaccatgcagattatgcggatcaaacctcaccaaggccagcacataggagagatgagcttcctacagcacaacaaatgtgaatgcagaccaaagaaagatagagcaagacaagaaaaaaaatcagttcgaggaaagggaaaggggcaaaaacgaaagcgcaagaaatcccggtataagtcctggagcgtgtacgttggtgcccgctgctgtctaatgccctggagcctccctggcccccatccctgtgggccttgctcagagcggagaaagcatttgtttgtacaagatccgcagacgtgtaaatgttcctgcaaaaacacagactcgcgttgcaaggcgaggcagcttgagttaaacgaacgtacttgcagatgtgacaagccgaggcggtgagccgggcaggaggaaggagcctccctcagggtttcgggaaccagatc

SEQ ID NO: 28856 - RNA, 1239 nt, Artificial Sequence
  derived and/or modified sequence
cuaacugaucgucagaccgacacagcgcccucuccgucauaccaucuacugccaggccgcagaagaaccgucgaugccgcagcauccagaggacaggguccugagcccgcucccgggggaggcguugagggggucggagcucggggcguggcguugaagcuguucgugcagcugcucgguuguucccguuucgguggugcuguggugcgcgcaggggaggcagaaccuucuggagcagcuaggagugcuaguucuggccgggaagaaccacagccggaggaaggcgaagaagaagaggagaaggaggaagagcgcgguccccaguggagauugggugccagaaagccaggaaguuggacuggagaggcagcuguaugcgccgacagugccccagccgcaagggcuccucaggcauuagcucgggcaucagggcgcggcggaagaguggcuagacgcggagcugaggagucaggccccccucauucuccuucuaggcggggaagugccagccgagcgggccccggcagggcuucagagaccaugaauuuucuacuuagcuggguacauuggagccuggcacuucuccucuaucuccaccacgccaaguggucucaggccgccccaauggcggaaggcgguggccaaaaccaccacgaaguagugaaguuuauggaugucuaccagcguaguuacugucacccuaucgagaccuugguugauauuuuccaggaguaccccgaugagauagaauauauauucaagccuucaugcguuccgcugaugagaugugguggaugcuguaaugaugaggggcucgaauguguuccgaccgaggaguccaacaucacaaugcaaaucaugcggauaaagccacaccagggccagcauaucggggagaugagcuuccuccagcacaauaagugcgaguguaggccuaagaaagauagggcucggcaagaaaaaaaaucagucagaggcaagggcaaaggccagaagcggaaacgcaagaaaucccgcuauaaaagcuggagcgucuauguaggcgcuagauguugucugaugcccuggagucuaccagguccccacccaugugguccuuguucggagagaaggaagcacuuguucgugcaggacccacagaccuguaaauguagcuguaagaacaccgacucuagauguaaggcccggcaacuugagcugaaugagcggacaugucgcugcgacaaaccgcggagauag

SEQ ID NO: 28857 - RNA, 1239 nt, Artificial Sequence
  derived and/or modified sequence
cugacggacagacagacugauacagccccgucuccauccuaucacuuguuaccaggcagacgaagaaccgucgacgccgcugccucucguggucaaggaccugagccugcaccuggggggggaguggagggcgugggagcaagaggaguagcauugaagcuguuuguucagcugcucggaugcagcagauucgggggagcagugguacgcgccggcgaggccgagccgagcggagcugccaggucagcuucaucaggccgggaagagccacaacccgaagagggcgaagaggaagaggaaaaggaagaagagagaggaccccaauggagguuaggagcacggaaaccgggcagcuggaccggagaagcagcuguaugugccgacagcgcuccugcagcaagagccccccaagcauuggcucgugcaagcggacggggugguagaguagcucggcggggugcagaggaaagugguccaccccauucccccucucgcagaggcucugccucucgggcaggccccggcagagcgucggagaccaugaacuuucuucucagcuggguacauuggucucuugcccugcuuuuauaucugcaucaugcuaaguggagccaggcugccccuauggccgaaggaggagggcagaaucaucaugaagucgucaaguucauggacguuuaccaacggaguuauugucaucccauugagacccuaguugacaucuuucaggaguacccagacgagaucgaauacaucuucaagccuagcugugugccucucaugcggugugguggcuguuguaacgaugaaggccucgaguguguacccaccgaagaauccaauauuacaaugcaaauuaugaggaucaaaccucaucagggacagcauaucggcgagaugucauuccugcaacacaauaaaugcgagugccgcccaaaaaaagacagagcccggcaagaaaagaagaguguucgaggcaagggcaagggucagaaaagaaagagaaaaaaaucaagauacaaaucguggaguguguacguaggagcucgguguugcuugaugccauggagucuccccggaccccacccauguggaccguguucugaacgccgcaagcaucuguucguucaagacccccaaacauguaaguguucuugcaagaauaccgauucucgaugcaaggcacggcaacuggaguuaaacgaaagaacaugccguugcgacaaacccaggagauag

SEQ ID NO: 28858 - protein, 389 aa, Artificial Sequence
  derived and/or modified sequence
LTDRQTDTAPSPSYHLLPGRRRTVDAAASRGQGPEPAPGGGVEGVGARGVALKLFVQLLGCSRFGGAVVRAGEAEPSGAARSASSGREEPQPEEGEEEEEKEEERGPQWRLGARKPGSWTGEAAVCADSAPAARAPQALARASGRGGRVARRGAEESGPPHSPSRRGSASRAGPGRASETMNFLLSWVHWSLALLLYLHHAKWSQAAPMAEGGGQNHHEVVKFMDVYQRSYCHPIETLVDIFQEYPDEIEYIFKPSCVPLMRCGGCCNDEGLECVPTEESNITMQIMRIKPHQGQHIGEMSFLQHNKCECRPKKDRARQEKKSVRGKGKGQKRKRKKSRPCGPCSERRKHLFVQDPQTCKCSCKNTDSRCKARQLELNERTCRCDKPRR

SEQ ID NO: 28859 - protein, 209 aa, Artificial Sequence
  derived and/or modified sequence
MNFLLSWVHWSLALLLYLHHAKWSQAAPMAEGGGQNHHEVVKFMDVYQRSYCHPIETLVDIFQEYPDEIEYIFKPSCVPLMRCGGCCNDEGLECVPTEESNITMQIMRIKPHQGQHIGEMSFLQHNKCECRPKKDRARQEKKSVRGKGKGQKRKRKKSRPCGPCSERRKHLFVQDPQTCKCSCKNTDSRCKARQLELNERTCRCDKPRR

SEQ ID NO: 28860 - protein, 389 aa, Artificial Sequence
  derived and/or modified sequence
MTDRQTDTAPSPSYHLLPGRRRTVDAAASRGQGPEPAPGGGVEGVGARGVALKLFVQLLGCSRFGGAVVRAGEAEPSGAARSASSGREEPQPEEGEEEEEKEEERGPQWRLGARKPGSWTGEAAVCADSAPAARAPQALARASGRGGRVARRGAEESGPPHSPSRRGSASRAGPGRASETMNFLLSWVHWSLALLLYLHHAKWSQAAPMAEGGGQNHHEVVKFMDVYQRSYCHPIETLVDIFQEYPDEIEYIFKPSCVPLMRCGGCCNDEGLECVPTEESNITMQIMRIKPHQGQHIGEMSFLQHNKCECRPKKDRARQEKKSVRGKGKGQKRKRKKSRPCGPCSERRKHLFVQDPQTCKCSCKNTDSRCKARQLELNERTCRCDKPRR

SEQ ID NO: 28861 - DNA, 3608 bp, Artificial Sequence
  derived and/or modified sequence
tcgcggaggcttggggcagccgggtagctcggaggtcgtggcgctgggggctagcaccagcgctctgtcgggaggcgcagcggttaggtggaccggtcagcggactcaccggccagggcgctcggtgctggaatttgatattcattgatccgggttttatccctcttcttttttcttaaacatttttttttaaaactgtattgtttctcgttttaatttatttttgcttgccattccccacttgaatcgggccgacggcttggggagattgctctacttccccaaatcactgtggattttggaaaccagcagaaagaggaaagaggtagcaagagctccagagagaagtcgaggaagagagagacggggtcagagagagcgcgcgggcgtgcgagcagcgaaagcgacaggggcaaagtgagtgacctgcttttgggggtgaccgccggagcgcggcgtgagccctcccccttgggatcccgcagctgaccagtcgcgctgacggacagacagacagacaccgcccccagccccagctaccacctcctccccggccggcggcggacagtggacgcggcggcgagccgcgggcaggggccggagcccgcgcccggaggcggggtggagggggtcggggctcgcggcgtcgcactgaaacttttcgtccaacttctgggctgttctcgcttcggaggagccgtggtccgcgcgggggaagccgagccgagcggagccgcgagaagtgctagctcgggccgggaggagccgcagccggaggagggggaggaggaagaagagaaggaagaggagagggggccgcagtggcgactcggcgctcggaagccgggctcatggacgggtgaggcggcggtgtgcgcagacagtgctccagccgcgcgcgctccccaggccctggcccgggcctcgggccggggaggaagagtagctcgccgaggcgccgaggagagcgggccgccccacagcccgagccggagagggagcgcgagccgcgccggccccggtcgggcctccgaaaccatgaactttctgctgtcttgggtgcattggagccttgccttgctgctctacctccaccatgccaagtggtcccaggctgcacccatggcagaaggaggagggcagaatcatcacgaagtggtgaagttcatggatgtctatcagcgcagctactgccatccaatcgagaccctggtggacatcttccaggagtaccctgatgagatcgagtacatcttcaagccatcctgtgtgcccctgatgcgatgcgggggctgctgcaatgacgagggcctggagtgtgtgcccactgaggagtccaacatcaccatgcagattatgcggatcaaacctcaccaaggccagcacataggagagatgagcttcctacagcacaacaaatgtgaatgcagaccaaagaaagatagagcaagacaagaaaaaaaatcagttcgaggaaagggaaaggggcaaaaacgaaagcgcaagaaatcccgtccctgtgggccttgctcagagcggagaaagcatttgtttgtacaagatccgcagacgtgtaaatgttcctgcaaaaacacagactcgcgttgcaaggcgaggcagcttgagttaaacgaacgtacttgcagatgtgacaagccgaggcggtgagccgggcaggaggaaggagcctccctcagggtttcgggaaccagatctctcaccaggaaagactgatacagaacgatcgatacagaaaccacgctgccgccaccacaccatcaccatcgacagaacagtccttaatccagaaacctgaaatgaaggaagaggagactctgcgcagagcactttgggtccggagggcgagactccggcggaagcattcccgggcgggtgacccagcacggtccctcttggaattggattcgccattttatttttcttgctgctaaatcaccgagcccggaagattagagagttttatttctgggattcctgtagacacacccacccacatacatacatttatatatatatatattatatatatataaaaataaatatctctattttatatatataaaatatatatattctttttttaaattaacagtgctaatgttattggtgtcttcactggatgtatttgactgctgtggacttgagttgggaggggaatgttcccactcagatcctgacagggaagaggaggagatgagagactctggcatgatcttttttttgtcccacttggtggggccagggtcctctcccctgcccaggaatgtgcaaggccagggcatgggggcaaatatgacccagttttgggaacaccgacaaacccagccctggcgctgagcctctctaccccaggtcagacggacagaaagacagatcacaggtacagggatgaggacaccggctctgaccaggagtttggggagcttcaggacattgctgtgctttggggattccctccacatgctgcacgcgcatctcgcccccaggggcactgcctggaagattcaggagcctgggcggccttcgcttactctcacctgcttctgagttgcccaggagaccactggcagatgtcccggcgaagagaagagacacattgttggaagaagcagcccatgacagctccccttcctgggactcgccctcatcctcttcctgctccccttcctggggtgcagcctaaaaggacctatgtcctcacaccattgaaaccactagttctgtccccccaggagacctggttgtgtgtgtgtgagtggttgaccttcctccatcccctggtccttcccttcccttcccgaggcacagagagacagggcaggatccacgtgcccattgtggaggcagagaaaagagaaagtgttttatatacggtacttatttaatatccctttttaattagaaattaaaacagttaatttaattaaagagtagggttttttttcagtattcttggttaatatttaatttcaactatttatgagatgtatcttttgctctctcttgctctcttatttgtaccggtttttgtatataaaattcatgtttccaatctctctctccctgatcggtgacagtcactagcttatcttgaacagatatttaattttgctaacactcagctctgccctccccgatcccctggctccccagcacacattcctttgaaataaggtttcaatatacatctacatactatatatatatttggcaacttgtatttgtgtgtatatatatatatatatgtttatgtatatatgtgattctgataaaatagacattgctattctgttttttatatgtaaaaacaaaacaagaaaaaatagagaattctacatactaaatctctctccttttttaattttaatatttgttatcatttatttattggtgctactgtttatccgtaataattgtggggaaaagatattaacatcacgtctttgtctctagtgcagtttttcgagatattccgtagtacatatttatttttaaacaacgacaaagaaatacagatatatcttaaaaaaaaaaaagcattttgtattaaagaatttaattctgatctcaaaaaaaaaaaaaaaaaa

SEQ ID NO: 28862 - DNA, 1167 bp, Artificial Sequence
  derived and/or modified sequence
ctgaccgaccgccagaccgacaccgcccccagccccagctaccacctgctgcccggccgccgccgcaccgtggacgccgccgccagccgcggccagggccccgagcccgcccccggcggcggcgtggagggcgtgggcgcccgcggcgtggccctgaagctgttcgtgcagctgctgggctgcagccgcttcggcggcgccgtggtgcgcgccggcgaggccgagcccagcggcgccgcccgcagcgccagcagcggccgcgaggagccccagcccgaggagggcgaggaggaggaggagaaggaggaggagcgcggcccccagtggcgcctgggcgcccgcaagcccggcagctggaccggcgaggccgccgtgtgcgccgacagcgcccccgccgcccgcgccccccaggccctggcccgcgccagcggccgcggcggccgcgtggcccgccgcggcgccgaggagagcggccccccccacagccccagccgccgcggcagcgccagccgcgccggccccggccgcgccagcgagaccatgaacttcctgctgagctgggtgcactggagcctggccctgctgctgtacctgcaccacgccaagtggagccaggccgcccccatggccgagggcggcggccagaaccaccacgaggtggtgaagttcatggacgtgtaccagcgcagctactgccaccccatcgagaccctggtggacatcttccaggagtaccccgacgagatcgagtacatcttcaagcccagctgcgtgcccctgatgcgctgcggcggctgctgcaacgacgagggcctggagtgcgtgcccaccgaggagagcaacatcaccatgcagatcatgcgcatcaagccccaccagggccagcacatcggcgagatgagcttcctgcagcacaacaagtgcgagtgccgccccaagaaggaccgcgcccgccaggagaagaagagcgtgcgcggcaagggcaagggccagaagcgcaagcgcaagaagagccgcccctgcggcccctgcagcgagcgccgcaagcacctgttcgtgcaggacccccagacctgcaagtgcagctgcaagaacaccgacagccgctgcaaggcccgccagctggagctgaacgagcgcacctgccgctgcgacaagccccgccgc

SEQ ID NO: 28863 - DNA, 1170 bp, Artificial Sequence
  derived and/or modified sequence
ctgaccgacagacagaccgacaccgcccccagccccagctaccacctgctgcccggcagaagaagaaccgtggacgccgccgccagcagaggccagggccccgagcccgcccccggcggcggcgtggagggcgtgggcgccagaggcgtggccctgaagctgttcgtgcagctgctgggctgcagcagattcggcggcgccgtggtgagagccggcgaggccgagcccagcggcgccgccagaagcgccagcagcggcagagaggagccccagcccgaggagggcgaggaggaggaggagaaggaggaggagagaggcccccagtggagactgggcgccagaaagcccggcagctggaccggcgaggccgccgtgtgcgccgacagcgcccccgccgccagagccccccaggccctggccagagccagcggcagaggcggcagagtggccagaagaggcgccgaggagagcggccccccccacagccccagcagaagaggcagcgccagcagagccggccccggcagagccagcgagaccatgaacttcctgctgagctgggtgcactggagcctggccctgctgctgtacctgcaccacgccaagtggagccaggccgcccccatggccgagggcggcggccagaaccaccacgaggtggtgaagttcatggacgtgtaccagagaagctactgccaccccatcgagaccctggtggacatcttccaggagtaccccgacgagatcgagtacatcttcaagcccagctgcgtgcccctgatgagatgcggcggctgctgcaacgacgagggcctggagtgcgtgcccaccgaggagagcaacatcaccatgcagatcatgagaatcaagccccaccagggccagcacatcggcgagatgagcttcctgcagcacaacaagtgcgagtgcagacccaagaaggacagagccagacaggagaagaagagcgtgagaggcaagggcaagggccagaagagaaagagaaagaagagcagaccctgcggcccctgcagcgagagaagaaagcacctgttcgtgcaggacccccagacctgcaagtgcagctgcaagaacaccgacagcagatgcaaggccagacagctggagctgaacgagagaacctgcagatgcgacaagcccagaagatag

SEQ ID NO: 28864 - DNA, 1170 bp, Artificial Sequence
  derived and/or modified sequence
ttgacagaccggcagaccgacaccgccccatctcctagttatcatctgctgcccggaagaagaaggaccgtcgacgcagccgcgagtagaggacaggggcccgagccggcccccggcggcggtgtggagggggtaggcgcccgaggtgttgcgcttaagcttttcgtgcagctcctgggctgttctcgatttggcggggccgttgtgagagccggcgaggctgaaccatcaggagcagctaggtcagccagcagcgggcgagaagagcctcagcctgaggaaggggaagaggaagaggaaaaagaggaagagcgggggccccagtggcgcctgggggcccgcaagccgggtagctggaccggtgaggctgccgtgtgtgccgattcagcacctgccgcccgggcgccgcaggctctcgcccgagcaagcggccgggggggccgcgtggcccggcgtggtgccgaggagtccgggcctccacatagtccttcaagacgcggttcggccagcagggccgggcctgggagggcgagcgagaccatgaactttctgctgagctgggtgcactggtccctggctctgttgttgtacctgcatcatgccaagtggagtcaggcagcccccatggctgaaggcggcggccagaatcatcatgaggtagtgaaatttatggacgtgtatcagcggtcatattgccatccaatagagacactggtggatatcttccaggaatacccggatgaaattgagtatatattcaaaccctcctgcgtgcctctgatgaggtgcgggggctgttgtaatgatgaagggttagaatgtgtacccactgaagaaagtaacatcacgatgcaaattatgcgcataaagcctcaccagggacagcatatcggtgagatgagttttctgcaacacaacaaatgcgagtgcagacctaagaaagatcgggctcgccaagaaaaaaaatcagtgcgtggtaagggcaaaggacagaagcgaaagagaaagaaatcaagaccatgcgggccatgctctgagcgacggaagcatttgttcgttcaagatcctcaaacgtgtaagtgtagttgtaaaaacactgattcccggtgtaaagcccggcagttggaactgaatgagcggacctgtcgctgtgataaaccccggagatag

SEQ ID NO: 28865 - DNA, 1170 bp, Artificial Sequence
  derived and/or modified sequence
ctgacagaccggcagacagacacagcccccagccccagctaccacctgctgcccggcagaagaagaacagtggatgctgctgccagccggggccagggccctgagcccgcccctgggggcggcgtggagggcgtgggcgcccggggcgtggccctgaagctgtttgtgcagctgctgggctgcagcagatttggaggagctgtggtgcgggccggggaggccgagcccagcggggccgcccggagcgccagcagcggccgggaggagccccagcctgaggagggggaggaggaggaggagaaggaggaggagcggggcccccagtggaggctgggcgccaggaagccaggctcctggacaggagaggccgctgtgtgtgccgacagcgccccagctgcccgggccccccaggccctggcccgggccagcggccggggcggccgggtggccaggagaggagctgaggagagcggccccccccacagccccagcagaagaggcagcgccagccgggccggccctggccgggccagcgagaccatgaacttcctgctgtcctgggtgcactggagcctggccctgctgctgtacctgcaccacgccaagtggagccaggccgcccccatggccgagggcggcggccagaaccaccacgaggtggtgaagttcatggatgtgtaccagaggagctactgccaccccatcgagaccctggtggacatcttccaggagtacccagatgaaattgagtacatcttcaagcccagctgtgtgcccctgatgagatgtggcggctgctgcaatgatgagggcctggagtgtgtgcccacagaggagagcaacatcaccatgcagatcatgaggatcaagccccaccagggccagcacatcggggagatgtccttcctgcagcacaacaagtgtgaatgtcggcccaagaaggaccgggcccggcaggagaagaagtctgtgcggggcaagggcaagggccagaagaggaagaggaagaagagccggccctgtggcccctgcagcgagaggaggaagcacctgtttgtgcaggacccccagacctgcaagtgcagctgcaagaacacagacagccgctgcaaggcccggcagctggagctgaatgaaagaacctgccgctgtgacaagcccaggaggtag

SEQ ID NO: 28866 - DNA, 1170 bp, Artificial Sequence
  derived and/or modified sequence
ctgaccgaccggcagaccgacaccgcccccagccccagctaccaccttctgccggggagaagacgtactgtagacgcggccgctagccggggccaagggcccgaaccagccccgggcggaggggtggagggcgtgggggcaagaggggtggctttgaaacttttcgttcagctgctgggctgcagccggtttgggggagccgtcgtgcgggccggcgaggctgaacccagtggggccgcccgcagcgcgagctctggcagggaggagcctcagcccgaggagggtgaggaggaagaggagaaggaggaagagcgggggccacagtggcggctgggagcccgaaagcctggatcctggacaggggaggccgccgtgtgtgcagatagtgcacctgcagcacgagctccccaagctctggccagagcctcagggcgtggaggacgcgtagcccggaggggggccgaggagtctggacccccccactcgccatcaagacgcgggtccgcatcgagggcgggtcccggaagagcgtctgaaaccatgaatttcctcctcagctgggtgcattggtctctggctttactcctgtacctacatcacgccaagtggtcacaggccgcccccatggcggaagggggaggccagaatcaccatgaagtggtgaaattcatggatgtgtaccagagatcctactgtcacccaattgaaaccttggttgatatctttcaggagtacccagacgaaatcgagtacattttcaaaccaagttgcgtgccattaatgagatgtggaggctgctgcaatgatgaaggcctcgaatgcgtgcccacagaggagagcaacattacaatgcaaattatgagaatcaaacctcaccaaggacagcatatcggcgagatgtcctttttgcagcataacaaatgcgagtgtaggcccaagaaggatagagccaggcaggagaaaaagagtgtgagaggaaaggggaaaggacagaagcggaagcgtaaaaaatcccgaccatgtgggccttgctccgaacggagaaagcatctcttcgttcaggatccgcaaacttgcaaatgtagctgcaaaaacaccgattcccggtgtaaggctagacagctggagctgaacgagcgcacctgtcgctgtgacaagccgcggaggtag

SEQ ID NO: 28867 - DNA, 1170 bp, Artificial Sequence
  derived and/or modified sequence
ctgacagaccgccagaccgacacggcaccatcacctagttaccatctgctgcccggaagacggagaactgtagacgcagccgcttcaagggggcaaggccctgaacccgctccagggggtggggttgaaggtgtgggcgctaggggcgttgcgctgaagctttttgtgcagctcctgggctgcagccggttcggcggagccgttgtgagggccggtgaagctgagcctagcggtgctgctcgttccgcaagctcaggcagggaggaaccccagcccgaggagggtgaggaagaggaggagaaagaggaggaacgcggtcctcagtggagactgggagcaaggaagcctgggagctggacgggtgaagccgcagtgtgcgccgattctgcaccggcagcgagagcacctcaggcacttgctcgggctagcggcagaggcggacgggtggctcggaggggcgctgaagagtccgggccacctcactccccttcacggaggggcagcgcatctcgcgcaggccctggtagagcctccgaaacaatgaactttctgctgagttgggtgcactggtcgctcgcccttctactctacttacaccacgccaagtggtcccaggctgccccaatggccgaaggtggagggcagaatcaccacgaagtggtgaagttcatggacgtttaccaacgctcttattgtcatcccatagagaccctcgttgacatctttcaggaatatccagatgagattgagtatatcttcaagccaagttgcgtgccacttatgcgctgcgggggatgctgtaatgatgaaggtctggaatgcgtgcctaccgaagagagcaacattacaatgcagataatgaggatcaaacctcatcaggggcagcatattggagagatgagtttccttcaacacaataagtgtgaatgccggcctaaaaaggatagggccagacaggagaagaagagtgtgcgtgggaagggtaaaggccagaagagaaaaaggaaaaagtctcgtccgtgcggcccatgttctgaaaggcgaaaacacctatttgttcaagacccacaaacatgcaagtgcagttgtaaaaacacagattcgagatgtaaggccaggcaactggagctgaacgagcgaacgtgtcgctgtgacaagcctaggagatag

SEQ ID NO: 28868 - DNA, 1170 bp, Artificial Sequence
  derived and/or modified sequence
ctaactgacagacaaaccgataccgctccatcaccatcttaccatctcctgcccgggcggagacgaaccgtggatgccgccgcttctagaggacaggggcctgagcctgcaccaggaggcggagtagaaggggtaggggctcgcggcgtggctctgaagttgtttgttcagctcctgggatgcagccggtttggtggtgccgtcgtgcgagcaggggaggccgaacctagtggagcagctcggagcgcgagtagtggaagagaagaaccccaacccgaagagggagaagaggaggaggagaaagaggaagaacgaggtcctcagtggcgactcggcgctagaaagccaggctcgtggacaggagaggccgccgtttgtgccgactctgctccagcagctagggcgccgcaggcactagctagagcatcgggcagaggcggccgggtggcacggcggggcgcagaggaatcaggtcccccccatagcccaagtcggcgtggaagcgcgagcagggcaggccccgggagagcatcggaaaccatgaacttcctactgtcctgggttcactggagccttgccttattgctttatttgcatcatgccaagtggtctcaagcagctccaatggctgaaggaggaggccagaaccaccacgaggtggtcaaattcatggatgtctaccagcgttcatactgtcacccaatagagactttagtggatatatttcaggagtaccccgacgagattgaatatatcttcaaaccatcctgtgtgcctctcatgagatgtggcggctgctgcaacgatgagggactcgaatgcgtgccaactgaggaatccaacattacaatgcagatcatgcgcataaagccccaccagggtcagcatatcggggaaatgagttttcttcagcacaataagtgcgagtgcagacctaagaaggatcgagccaggcaagaaaaaaagtctgtgcgcgggaaaggcaaaggtcagaaacggaagcgcaaaaaatctcggccctgtggcccatgctccgaacgcagaaagcatctcttcgtgcaagacccgcaaacatgtaagtgctcatgtaagaataccgacagccggtgtaaggcccgtcagctcgaactgaatgagcgaacatgccggtgcgacaaaccacgtagatag

SEQ ID NO: 28869 - DNA, 1170 bp, Artificial Sequence
  derived and/or modified sequence
ctaactgacagacaaaccgataccgctccatcaccatcttaccatctcctgcccgggcggagacgaaccgtggatgccgccgcttctagaggacaggggcctgagcctgcaccaggaggcggagtagaaggggtaggggctcgcggcgtggctctgaagttgtttgttcagctcctgggatgcagccggtttggtggtgccgtcgtgcgagcaggggaggccgaacctagtggagcagctcggagcgcgagtagtggaagagaagaaccccaacccgaagagggagaagaggaggaggagaaagaggaggaacgcggccctcagtggaggctgggcgcccggaagcctgggagctggaccggcgaagctgctgtatgtgccgattccgccccagcagctagagctccccaggccctggcaagggctagcggaaggggcggcagagtagcccggagaggagctgaagaatcaggcccaccccatagcccatcacgaagaggatccgcatcacgggcaggtcccggcagagcgtcagagaccatgaatttcctgttatcttgggttcactggagcttagccttgcttctttatctgcaccatgctaagtggagccaggccgcaccaatggctgaaggcggaggccagaatcaccacgaagtagtcaaattcatggacgtgtatcagcgctcctactgccacccaatcgagacgctggttgacatatttcaagagtatcctgatgaaatcgagtatatctttaaaccttcctgtgtacctctgatgcgctgcggcggatgttgtaatgatgaaggactggagtgcgttcctacagaggagtcaaacattactatgcagataatgaggattaaaccccaccaaggacagcacattggagaaatgtcttttttacaacacaataaatgcgaatgtagacccaagaaagatagagccagacaggaaaaaaaaagtgtcagaggtaagggcaagggccaaaaaaggaagaggaaaaagtctcgcccatgcggcccatgtagcgagcgtagaaagcacttgttcgtgcaggacccacagacttgtaagtgctcttgcaaaaatacagactcacgttgtaaggcccgacagctggaacttaacgagcgcacctgtcggtgtgacaagccccggagatag

SEQ ID NO: 28870 - DNA, 1197 bp, Artificial Sequence
  derived and/or modified sequence
ctgacggacagacagacagacaccgcccccagccccagctaccacctcctccccggccggcggcggacagtggacgcggcggcgagccgcgggcaggggccggagcccgcgcccggaggcggggtggagggggtcggggctcgcggcgtcgcactgaaacttttcgtccaacttctgggctgttctcgcttcggaggagccgtggtccgcgcgggggaagccgagccgagcggagccgcgagaagtgctagctcgggccgggaggagccgcagccggaggagggggaggaggaagaagagaaggaagaggagagggggccgcagtggcgactcggcgctcggaagccgggctcatggacgggtgaggcggcggtgtgcgcagacagtgctccagccgcgcgcgctccccaggccctggcccgggcctcgggccggggaggaagagtagctcgccgaggcgccgaggagagcgggccgccccacagcccgagccggagagggagcgcgagccgcgccggccccggtcgggcctccgaaaccatgaactttctgctgtcttgggtgcattggagccttgccttgctgctctacctccaccatgccaagtggtcccaggctgcacccatggcagaaggaggagggcagaatcatcacgaagtggtgaagttcatggatgtctatcagcgcagctactgccatccaatcgagaccctggtggacatcttccaggagtaccctgatgagatcgagtacatcttcaagccatcctgtgtgcccctgatgcgatgcgggggctgctgcaatgacgagggcctggagtgtgtgcccactgaggagtccaacatcaccatgcagattatgcggatcaaacctcaccaaggccagcacataggagagatgagcttcctacagcacaacaaatgtgaatgcagaccaaagaaagatagagcaagacaagaaaaaaaatcagttcgaggaaagggaaaggggcaaaaacgaaagcgcaagaaatcccgtccctgtgggccttgctcagagcggagaaagcatttgtttgtacaagatccgcagacgtgtaaatgttcctgcaaaaacacagactcgcgttgcaaggcgaggcagcttgagttaaacgaacgtacttgcagatgtgacaagccgaggcggtgagccgggcaggaggaaggagcctccctc

SEQ ID NO: 28871 - RNA, 1170 nt, Artificial Sequence
  derived and/or modified sequence
cuaacugacagacaaaccgauaccgcuccaucaccaucuuaccaucuccugcccgggcggagacgaaccguggaugccgccgcuucuagaggacaggggccugagccugcaccaggaggcggaguagaagggguaggggcucgcggcguggcucugaaguuguuuguucagcuccugggaugcagccgguuugguggugccgucgugcgagcaggggaggccgaaccuaguggagcagcucggagcgcgaguaguggaagagaagaaccccaacccgaagagggagaagaggaggaggagaaagaggaagaacgagguccucaguggcgacucggcgcuagaaagccaggcucguggacaggagaggccgccguuugugccgacucugcuccagcagcuagggcgccgcaggcacuagcuagagcaucgggcagaggcggccggguggcacggcggggcgcagaggaaucaggucccccccauagcccaagucggcguggaagcgcgagcagggcaggccccgggagagcaucggaaaccaugaacuuccuacuguccuggguucacuggagccuugccuuauugcuuuauuugcaucaugccaaguggucucaagcagcuccaauggcugaaggaggaggccagaaccaccacgagguggucaaauucauggaugucuaccagcguucauacugucacccaauagagacuuuaguggauauauuucaggaguaccccgacgagauugaauauaucuucaaaccauccugugugccucucaugagauguggcggcugcugcaacgaugagggacucgaaugcgugccaacugaggaauccaacauuacaaugcagaucaugcgcauaaagccccaccagggucagcauaucggggaaaugaguuuucuucagcacaauaagugcgagugcagaccuaagaaggaucgagccaggcaagaaaaaaagucugugcgcgggaaaggcaaaggucagaaacggaagcgcaaaaaaucucggcccuguggcccaugcuccgaacgcagaaagcaucucuucgugcaagacccgcaaacauguaagugcucauguaagaauaccgacagccgguguaaggcccgucagcucgaacugaaugagcgaacaugccggugcgacaaaccacguagauag

SEQ ID NO: 28872 - RNA, 1170 nt, Artificial Sequence
  derived and/or modified sequence
cuaacugacagacaaaccgauaccgcuccaucaccaucuuaccaucuccugcccgggcggagacgaaccguggaugccgccgcuucuagaggacaggggccugagccugcaccaggaggcggaguagaagggguaggggcucgcggcguggcucugaaguuguuuguucagcuccugggaugcagccgguuugguggugccgucgugcgagcaggggaggccgaaccuaguggagcagcucggagcgcgaguaguggaagagaagaaccccaacccgaagagggagaagaggaggaggagaaagaggaggaacgcggcccucaguggaggcugggcgcccggaagccugggagcuggaccggcgaagcugcuguaugugccgauuccgccccagcagcuagagcuccccaggcccuggcaagggcuagcggaaggggcggcagaguagcccggagaggagcugaagaaucaggcccaccccauagcccaucacgaagaggauccgcaucacgggcaggucccggcagagcgucagagaccaugaauuuccuguuaucuuggguucacuggagcuuagccuugcuucuuuaucugcaccaugcuaaguggagccaggccgcaccaauggcugaaggcggaggccagaaucaccacgaaguagucaaauucauggacguguaucagcgcuccuacugccacccaaucgagacgcugguugacauauuucaagaguauccugaugaaaucgaguauaucuuuaaaccuuccuguguaccucugaugcgcugcggcggauguuguaaugaugaaggacuggagugcguuccuacagaggagucaaacauuacuaugcagauaaugaggauuaaaccccaccaaggacagcacauuggagaaaugucuuuuuuacaacacaauaaaugcgaauguagacccaagaaagauagagccagacaggaaaaaaaaagugucagagguaagggcaagggccaaaaaaggaagaggaaaaagucucgcccaugcggcccauguagcgagcguagaaagcacuuguucgugcaggacccacagacuuguaagugcucuugcaaaaauacagacucacguuguaaggcccgacagcuggaacuuaacgagcgcaccugucggugugacaagccccggagauag

SEQ ID NO: 28873 - protein, 163 aa, Artificial Sequence
  derived and/or modified sequence
MAEGGGQNHHEVVKFMDVYQRSYCHPIETLVDIFQEYPDEIEYIFKPSCVPLMRCGGCCNDEGLECVPTEESNITMQIMRIKPHQGQHIGEMSFLQHNKCECRPKKDRARQENPCGPCSERRKHLFVQDPQTCKCSCKNTDSRCKARQLELNERTCRCDKPRR

SEQ ID NO: 28874 - protein, 371 aa, Artificial Sequence
  derived and/or modified sequence
LTDRQTDTAPSPSYHLLPGRRRTVDAAASRGQGPEPAPGGGVEGVGARGVALKLFVQLLGCSRFGGAVVRAGEAEPSGAARSASSGREEPQPEEGEEEEEKEEERGPQWRLGARKPGSWTGEAAVCADSAPAARAPQALARASGRGGRVARRGAEESGPPHSPSRRGSASRAGPGRASETMNFLLSWVHWSLALLLYLHHAKWSQAAPMAEGGGQNHHEVVKFMDVYQRSYCHPIETLVDIFQEYPDEIEYIFKPSCVPLMRCGGCCNDEGLECVPTEESNITMQIMRIKPHQGQHIGEMSFLQHNKCECRPKKDRARQENPCGPCSERRKHLFVQDPQTCKCSCKNTDSRCKARQLELNERTCRCDKPRR

SEQ ID NO: 28875 - protein, 191 aa, Artificial Sequence
  derived and/or modified sequence
MNFLLSWVHWSLALLLYLHHAKWSQAAPMAEGGGQNHHEVVKFMDVYQRSYCHPIETLVDIFQEYPDEIEYIFKPSCVPLMRCGGCCNDEGLECVPTEESNITMQIMRIKPHQGQHIGEMSFLQHNKCECRPKKDRARQENPCGPCSERRKHLFVQDPQTCKCSCKNTDSRCKARQLELNERTCRCDKPRR

SEQ ID NO: 28876 - protein, 371 aa, Artificial Sequence
  derived and/or modified sequence
MTDRQTDTAPSPSYHLLPGRRRTVDAAASRGQGPEPAPGGGVEGVGARGVALKLFVQLLGCSRFGGAVVRAGEAEPSGAARSASSGREEPQPEEGEEEEEKEEERGPQWRLGARKPGSWTGEAAVCADSAPAARAPQALARASGRGGRVARRGAEESGPPHSPSRRGSASRAGPGRASETMNFLLSWVHWSLALLLYLHHAKWSQAAPMAEGGGQNHHEVVKFMDVYQRSYCHPIETLVDIFQEYPDEIEYIFKPSCVPLMRCGGCCNDEGLECVPTEESNITMQIMRIKPHQGQHIGEMSFLQHNKCECRPKKDRARQENPCGPCSERRKHLFVQDPQTCKCSCKNTDSRCKARQLELNERTCRCDKPRR

SEQ ID NO: 28877 - DNA, 3554 bp, Artificial Sequence
  derived and/or modified sequence
tcgcggaggcttggggcagccgggtagctcggaggtcgtggcgctgggggctagcaccagcgctctgtcgggaggcgcagcggttaggtggaccggtcagcggactcaccggccagggcgctcggtgctggaatttgatattcattgatccgggttttatccctcttcttttttcttaaacatttttttttaaaactgtattgtttctcgttttaatttatttttgcttgccattccccacttgaatcgggccgacggcttggggagattgctctacttccccaaatcactgtggattttggaaaccagcagaaagaggaaagaggtagcaagagctccagagagaagtcgaggaagagagagacggggtcagagagagcgcgcgggcgtgcgagcagcgaaagcgacaggggcaaagtgagtgacctgcttttgggggtgaccgccggagcgcggcgtgagccctcccccttgggatcccgcagctgaccagtcgcgctgacggacagacagacagacaccgcccccagccccagctaccacctcctccccggccggcggcggacagtggacgcggcggcgagccgcgggcaggggccggagcccgcgcccggaggcggggtggagggggtcggggctcgcggcgtcgcactgaaacttttcgtccaacttctgggctgttctcgcttcggaggagccgtggtccgcgcgggggaagccgagccgagcggagccgcgagaagtgctagctcgggccgggaggagccgcagccggaggagggggaggaggaagaagagaaggaagaggagagggggccgcagtggcgactcggcgctcggaagccgggctcatggacgggtgaggcggcggtgtgcgcagacagtgctccagccgcgcgcgctccccaggccctggcccgggcctcgggccggggaggaagagtagctcgccgaggcgccgaggagagcgggccgccccacagcccgagccggagagggagcgcgagccgcgccggccccggtcgggcctccgaaaccatgaactttctgctgtcttgggtgcattggagccttgccttgctgctctacctccaccatgccaagtggtcccaggctgcacccatggcagaaggaggagggcagaatcatcacgaagtggtgaagttcatggatgtctatcagcgcagctactgccatccaatcgagaccctggtggacatcttccaggagtaccctgatgagatcgagtacatcttcaagccatcctgtgtgcccctgatgcgatgcgggggctgctgcaatgacgagggcctggagtgtgtgcccactgaggagtccaacatcaccatgcagattatgcggatcaaacctcaccaaggccagcacataggagagatgagcttcctacagcacaacaaatgtgaatgcagaccaaagaaagatagagcaagacaagaaaatccctgtgggccttgctcagagcggagaaagcatttgtttgtacaagatccgcagacgtgtaaatgttcctgcaaaaacacagactcgcgttgcaaggcgaggcagcttgagttaaacgaacgtacttgcagatgtgacaagccgaggcggtgagccgggcaggaggaaggagcctccctcagggtttcgggaaccagatctctcaccaggaaagactgatacagaacgatcgatacagaaaccacgctgccgccaccacaccatcaccatcgacagaacagtccttaatccagaaacctgaaatgaaggaagaggagactctgcgcagagcactttgggtccggagggcgagactccggcggaagcattcccgggcgggtgacccagcacggtccctcttggaattggattcgccattttatttttcttgctgctaaatcaccgagcccggaagattagagagttttatttctgggattcctgtagacacacccacccacatacatacatttatatatatatatattatatatatataaaaataaatatctctattttatatatataaaatatatatattctttttttaaattaacagtgctaatgttattggtgtcttcactggatgtatttgactgctgtggacttgagttgggaggggaatgttcccactcagatcctgacagggaagaggaggagatgagagactctggcatgatcttttttttgtcccacttggtggggccagggtcctctcccctgcccaggaatgtgcaaggccagggcatgggggcaaatatgacccagttttgggaacaccgacaaacccagccctggcgctgagcctctctaccccaggtcagacggacagaaagacagatcacaggtacagggatgaggacaccggctctgaccaggagtttggggagcttcaggacattgctgtgctttggggattccctccacatgctgcacgcgcatctcgcccccaggggcactgcctggaagattcaggagcctgggcggccttcgcttactctcacctgcttctgagttgcccaggagaccactggcagatgtcccggcgaagagaagagacacattgttggaagaagcagcccatgacagctccccttcctgggactcgccctcatcctcttcctgctccccttcctggggtgcagcctaaaaggacctatgtcctcacaccattgaaaccactagttctgtccccccaggagacctggttgtgtgtgtgtgagtggttgaccttcctccatcccctggtccttcccttcccttcccgaggcacagagagacagggcaggatccacgtgcccattgtggaggcagagaaaagagaaagtgttttatatacggtacttatttaatatccctttttaattagaaattaaaacagttaatttaattaaagagtagggttttttttcagtattcttggttaatatttaatttcaactatttatgagatgtatcttttgctctctcttgctctcttatttgtaccggtttttgtatataaaattcatgtttccaatctctctctccctgatcggtgacagtcactagcttatcttgaacagatatttaattttgctaacactcagctctgccctccccgatcccctggctccccagcacacattcctttgaaataaggtttcaatatacatctacatactatatatatatttggcaacttgtatttgtgtgtatatatatatatatatgtttatgtatatatgtgattctgataaaatagacattgctattctgttttttatatgtaaaaacaaaacaagaaaaaatagagaattctacatactaaatctctctccttttttaattttaatatttgttatcatttatttattggtgctactgtttatccgtaataattgtggggaaaagatattaacatcacgtctttgtctctagtgcagtttttcgagatattccgtagtacatatttatttttaaacaacgacaaagaaatacagatatatcttaaaaaaaaaaaagcattttgtattaaagaatttaattctgatctcaaaaaaaaaaaaaaaaaa

SEQ ID NO: 28878 - DNA, 1113 bp, Artificial Sequence
  derived and/or modified sequence
ctgaccgaccgccagaccgacaccgcccccagccccagctaccacctgctgcccggccgccgccgcaccgtggacgccgccgccagccgcggccagggccccgagcccgcccccggcggcggcgtggagggcgtgggcgcccgcggcgtggccctgaagctgttcgtgcagctgctgggctgcagccgcttcggcggcgccgtggtgcgcgccggcgaggccgagcccagcggcgccgcccgcagcgccagcagcggccgcgaggagccccagcccgaggagggcgaggaggaggaggagaaggaggaggagcgcggcccccagtggcgcctgggcgcccgcaagcccggcagctggaccggcgaggccgccgtgtgcgccgacagcgcccccgccgcccgcgccccccaggccctggcccgcgccagcggccgcggcggccgcgtggcccgccgcggcgccgaggagagcggccccccccacagccccagccgccgcggcagcgccagccgcgccggccccggccgcgccagcgagaccatgaacttcctgctgagctgggtgcactggagcctggccctgctgctgtacctgcaccacgccaagtggagccaggccgcccccatggccgagggcggcggccagaaccaccacgaggtggtgaagttcatggacgtgtaccagcgcagctactgccaccccatcgagaccctggtggacatcttccaggagtaccccgacgagatcgagtacatcttcaagcccagctgcgtgcccctgatgcgctgcggcggctgctgcaacgacgagggcctggagtgcgtgcccaccgaggagagcaacatcaccatgcagatcatgcgcatcaagccccaccagggccagcacatcggcgagatgagcttcctgcagcacaacaagtgcgagtgccgccccaagaaggaccgcgcccgccaggagaacccctgcggcccctgcagcgagcgccgcaagcacctgttcgtgcaggacccccagacctgcaagtgcagctgcaagaacaccgacagccgctgcaaggcccgccagctggagctgaacgagcgcacctgccgctgcgacaagccccgccgc

SEQ ID NO: 28879 - DNA, 1116 bp, Artificial Sequence
  derived and/or modified sequence
ctgaccgacagacagaccgacaccgcccccagccccagctaccacctgctgcccggcagaagaagaaccgtggacgccgccgccagcagaggccagggccccgagcccgcccccggcggcggcgtggagggcgtgggcgccagaggcgtggccctgaagctgttcgtgcagctgctgggctgcagcagattcggcggcgccgtggtgagagccggcgaggccgagcccagcggcgccgccagaagcgccagcagcggcagagaggagccccagcccgaggagggcgaggaggaggaggagaaggaggaggagagaggcccccagtggagactgggcgccagaaagcccggcagctggaccggcgaggccgccgtgtgcgccgacagcgcccccgccgccagagccccccaggccctggccagagccagcggcagaggcggcagagtggccagaagaggcgccgaggagagcggccccccccacagccccagcagaagaggcagcgccagcagagccggccccggcagagccagcgagaccatgaacttcctgctgagctgggtgcactggagcctggccctgctgctgtacctgcaccacgccaagtggagccaggccgcccccatggccgagggcggcggccagaaccaccacgaggtggtgaagttcatggacgtgtaccagagaagctactgccaccccatcgagaccctggtggacatcttccaggagtaccccgacgagatcgagtacatcttcaagcccagctgcgtgcccctgatgagatgcggcggctgctgcaacgacgagggcctggagtgcgtgcccaccgaggagagcaacatcaccatgcagatcatgagaatcaagccccaccagggccagcacatcggcgagatgagcttcctgcagcacaacaagtgcgagtgcagacccaagaaggacagagccagacaggagaacccctgcggcccctgcagcgagagaagaaagcacctgttcgtgcaggacccccagacctgcaagtgcagctgcaagaacaccgacagcagatgcaaggccagacagctggagctgaacgagagaacctgcagatgcgacaagcccagaagatag

SEQ ID NO: 28880 - DNA, 1116 bp, Artificial Sequence
  derived and/or modified sequence
cttaccgacaggcagacggacactgcacctagcccgtcgtaccacctactccccgggagacgacgaactgtggacgctgcagccagtcgggggcaagggccggaacccgcgccagggggcggtgtggagggggtcggggcccgcggtgttgccctgaaattattcgttcaattgcttggttgttctcgattcggcggagcggtggtcagagcgggcgaagccgaaccttcaggcgctgcaaggagcgcaagttccggaagagaggagcctcagccggaggagggagaagaggaagaagagaaggaagaggaacgaggcccacaatggcgcctgggagcaaggaagcccggctcatggaccggagaagcagctgtgtgcgctgacagcgctcccgccgccagggccccacaggccctggcacgtgcatctgggagaggtggccgtgtagcccggagaggagcagaggagtcgggccctccccatagtccttctaggcgcggaagtgcttctcgcgcaggccctggaagggccagcgagaccatgaactttttgttaagctgggtgcactggtccctggccctcttactgtacctacaccacgctaagtggagccaggccgcaccaatggccgaaggggggggacagaatcaccacgaggtggtcaagttcatggacgtgtatcagaggtcctattgtcatccgatcgaaacgctggtggatatatttcaggaataccccgatgaaattgaatacatatttaaaccctcttgtgtgcctctcatgcggtgcggcggatgctgtaacgacgaagggctagagtgtgtacccacagaagagagcaacatcacaatgcagattatgaggattaaaccacaccaaggacagcatattggtgaaatgtcctttctacagcacaataagtgtgaatgtcgcccaaagaaagatagggcaagacaggaaaatccctgcggtccttgctccgagagacgcaaacacctctttgttcaggatcctcaaacatgtaaatgttcatgcaagaacacagacagccgctgcaaagcacgccagctggagctcaacgaaagaacatgtcgctgtgacaagcctcgaaggtag

SEQ ID NO: 28881 - DNA, 1116 bp, Artificial Sequence
  derived and/or modified sequence
ctgacagaccggcagacagacacagcccccagccccagctaccacctgctgcccggcagaagaagaacagtggatgctgctgccagccggggccagggccctgagcccgcccctgggggcggcgtggagggcgtgggcgcccggggcgtggccctgaagctgtttgtgcagctgctgggctgcagcagatttggaggagctgtggtgcgggccggggaggccgagcccagcggggccgcccggagcgccagcagcggccgggaggagccccagcctgaggagggggaggaggaggaggagaaggaggaggagcggggcccccagtggaggctgggcgccaggaagccaggctcctggacaggagaggccgctgtgtgtgccgacagcgccccagctgcccgggccccccaggccctggcccgggccagcggccggggcggccgggtggccaggagaggagctgaggagagcggccccccccacagccccagcagaagaggcagcgccagccgggccggccctggccgggccagcgagaccatgaacttcctgctgtcctgggtgcactggagcctggccctgctgctgtacctgcaccacgccaagtggagccaggccgcccccatggccgagggcggcggccagaaccaccacgaggtggtgaagttcatggatgtgtaccagaggagctactgccaccccatcgagaccctggtggacatcttccaggagtacccagatgaaattgagtacatcttcaagcccagctgtgtgcccctgatgagatgtggcggctgctgcaatgatgagggcctggagtgtgtgcccacagaggagagcaacatcaccatgcagatcatgaggatcaagccccaccagggccagcacatcggggagatgtccttcctgcagcacaacaagtgtgaatgtcggcccaagaaggaccgggcccggcaggagaacccctgtggcccctgcagcgagaggaggaagcacctgtttgtgcaggacccccagacctgcaagtgcagctgcaagaacacagacagccgctgcaaggcccggcagctggagctgaatgaaagaacctgccgctgtgacaagcccaggaggtag

SEQ ID NO: 28882 - DNA, 1116 bp, Artificial Sequence
  derived and/or modified sequence
ctgaccgaccggcagaccgacaccgcccccagccccagctaccacctgttgccgggccgccgtagaacggtagacgcagctgccagccgcgggcaggggcccgagccagctccaggcggcggggtcgaaggagtgggagcaagaggtgttgcacttaagttgtttgtacagttgctcgggtgtagcagatttggtggggctgtggtcagagccggcgaagccgagccctcgggcgcagccaggtcagctagcagcgggagagaggagccccagccggaggagggcgaggaggaggaagagaaagaggaagaacggggcccccagtggcgcttgggagccagaaaacctgggagctggaccggcgaggcggcagtatgcgctgactcggcacctgccgccagggctcctcaggcacttgccagggcatcagggagagggggccgggtggcccgaaggggtgctgaggaatctggacctcctcactccccgagccggagagggtcagcatcccgagcaggccctggtcgcgctagcgagaccatgaacttccttctctcatgggtacactggtccctggctttacttttgtatcttcaccatgcgaagtggagccaggccgccccaatggcagagggaggaggacagaaccaccacgaagttgtcaaatttatggatgtttatcagcggagttactgtcaccccatagaaaccctggtggatatattccaggagtatccagacgagattgagtatatcttcaagccctcatgtgtgcccctcatgaggtgcggtggatgctgcaacgatgaggggctagaatgtgtgcccacggaagagtctaacataactatgcagatcatgcggatcaagcctcaccagggacagcacatcggggaaatgagctttctgcagcataacaaatgtgagtgccggcccaaaaaagacagagcaaggcaggaaaatccgtgcggaccttgtagtgagagacggaagcacctcttcgtccaggatccacagacatgtaaatgtagctgcaaaaacacagattcccgttgcaaagcccgccaactggaactgaacgagcggacatgtaggtgcgacaaacctcgcaggtag

SEQ ID NO: 28883 - DNA, 1116 bp, Artificial Sequence
  derived and/or modified sequence
ctgaccgataggcagaccgataccgctccgtcgcctagttatcacttgttgccgggtagacgcaggactgtcgacgccgctgccagtagagggcagggccctgagccagctcctggaggtggcgtggagggcgtaggcgcacgaggtgtggccctgaaactgttcgtgcaactcctgggctgtagccgcttcggcggagcggtggttagggctggcgaagccgagcccagtggggctgcaagatcggccagcagcggaagggaggagccccagcccgaggaaggtgaagaggaagaggagaaagaggaggagcgaggccctcaatggcgactcggtgcaagaaaacctgggtcatggacaggagaggctgccgtctgcgcggactcagcgccagcggctcgcgcaccacaagcattggcccgagcctccgggagggggggtcgagttgctcgacggggagccgaggagtctggccctccacattcgccatcacgcagaggatctgcgtctcgggctggcccagggagagcctctgagactatgaacttcttactttcctgggtgcactggagcctcgcattactgctgtaccttcaccatgccaagtggagtcaggccgctccaatggcagaagggggtggccagaaccaccacgaagtagtcaagtttatggacgtttaccagagaagctactgccatcctattgaaacccttgtcgacatctttcaggaatatcctgatgaaattgaatacattttcaaacccagctgcgttcctcttatgcgatgtggcggatgctgtaacgatgaagggctggagtgtgtgccaacggaagagtcgaacatcaccatgcaaatcatgcggattaagccacaccagggccaacatataggagaaatgtcattcctccagcacaataagtgtgagtgtagaccaaagaaagatcgcgcaagacaagagaacccttgcggtccttgtagcgagcggcgaaagcatctttttgttcaggacccacagacctgcaaatgcagttgcaagaacactgatagcagatgtaaggccagacagctagaactgaatgagcggacatgtaggtgtgacaaaccaagacgatag

SEQ ID NO: 28884 - DNA, 1116 bp, Artificial Sequence
  derived and/or modified sequence
ctgaccgataggcaaacagataccgccccttccccatcgtatcacttactgccaggtcggcgccggaccgtagacgctgccgcttctcgcgggcagggaccagaacccgcacccgggggcggagtggagggcgtcggggctcgaggagtggcgctaaaacttttcgtacagttgctgggatgtagccggttcgggggcgccgttgtcagagccggggaggcagaacctagtggggccgcccgcagtgcaagcagcggaagggaagagcctcagccagaggaaggagaggaggaggaagagaaggaagaagagagaggaccacagtggcggctgggagcaagaaagccaggctcttggacaggggaagctgcagtttgcgcagactcggcacctgcggcaagggcaccacaagccctcgccagagcctccgggaggggagggagagtggcgcgtaggggggcagaggaaagcgggcccccacactccccttcacggcgcgggtctgccagtcgagcaggccccggcagggcaagcgagacaatgaactttctgttgagttgggtccactggtccctggcgctgctcttgtatctgcaccatgcaaaatggtcccaggccgcacctatggcggaaggcggtggtcagaaccaccacgaggtagttaagttcatggacgtatatcagcgcagctactgtcacccgatcgagacactcgtagacatctttcaggaataccccgacgagatcgaatatatatttaaaccaagttgcgtccctctcatgaggtgtggtggatgctgtaatgatgaaggcttggagtgcgtaccgactgaggagagcaatattaccatgcagattatgagaatcaaaccacaccaaggacagcacataggagagatgagctttctacagcacaacaagtgcgaatgcagacccaaaaaagatcgggctcgccaagagaacccgtgtggaccgtgctcagaacgcagaaagcatcttttcgtgcaggaccctcagacctgtaaatgctcatgtaaaaacacagactcacggtgtaaggctcgtcagctcgagttgaatgagagaacatgtcgctgcgataagcctcgtcgctag

SEQ ID NO: 28885 - DNA, 1116 bp, Artificial Sequence
  derived and/or modified sequence
ctcaccgatagacagacagacactgcgccaagcccatcctaccacttacttccagggaggaggaggaccgtggatgcagccgcttccagaggacaagggccggaacccgctccaggcggcggtgttgagggggttggagcacgcggagtggctctcaagctttttgtacagctgttgggatgtagtcgattcggcggcgcggtcgtgagggctggtgaagctgaaccttcaggggcagcaagaagtgcttccagcggaagggaggagccacaacccgaggagggggaggaagaggaggaaaaagaagaggagcgcggaccacagtggaggcttggcgctcggaagcccggtagctggacaggggaagccgctgtatgcgccgattcagcccctgctgctagggctcctcaagcacttgcccgagcaagcggacggggaggaagagtggcccgcagaggagcggaagaatcaggaccacctcatagcccaagccgcagaggttctgcatcaagagctggaccgggcagagcttccgaaacaatgaactttctcctgtcctgggttcactggtcactagctctcctgctgtatctacatcacgcaaaatggtcacaggccgcccccatggcggaaggcggaggacagaaccaccacgaagttgtcaagttcatggacgtctatcagaggtcctattgtcacccaattgagactctcgtagatatatttcaagaatacccagatgaaatcgaatacatctttaagccttcttgcgtccctctgatgaggtgcggaggatgctgtaatgacgaggggctggagtgtgtgccgactgaggaaagcaatattacgatgcaaattatgagaattaaaccacaccagggacagcacattggagaaatgtcttttctgcagcataataaatgtgaatgtaggccgaagaaagaccgggcccggcaagagaacccatgtggcccctgctcagaaaggagaaagcacctgttcgtccaagatcctcagacatgcaaatgttcatgcaaaaacactgacagcagatgcaaggcgagacaactggagctgaatgaaagaacttgcaggtgcgataaacccagacgctag

SEQ ID NO: 28886 - DNA, 3535 bp, Artificial Sequence
  derived and/or modified sequence
ggaggcttggggcagccgggtagctcggaggtcgtggcgctgggggctagcaccagcgctctgtcgggaggcgcagcggttaggtggaccggtcagcggactcaccggccagggcgctcggtgctggaatttgatattcattgatccgggttttatccctcttcttttttcttaaacatttttttttaaaactgtattgtttctcgttttaatttatttttgcttgccattccccacttgaatcgggccgacggcttggggagattgctctacttccccaaatcactgtggattttggaaaccagcagaaagaggaaagaggtagcaagagctccagagagaagtcgaggaagagagagacggggtcagagagagcgcgcgggcgtgcgagcagcgaaagcgacaggggcaaagtgagtgacctgcttttgggggtgaccgccggagcgcggcgtgagccctcccccttgggatcccgcagctgaccagtcgcgctgacggacagacagacagacaccgcccccagccccagctaccacctcctccccggccggcggcggacagtggacgcggcggcgagccgcgggcaggggccggagcccgcgcccggaggcggggtggagggggtcggggctcgcggcgtcgcactgaaacttttcgtccaacttctgggctgttctcgcttcggaggagccgtggtccgcgcgggggaagccgagccgagcggagccgcgagaagtgctagctcgggccgggaggagccgcagccggaggagggggaggaggaagaagagaaggaagaggagagggggccgcagtggcgactcggcgctcggaagccgggctcatggacgggtgaggcggcggtgtgcgcagacagtgctccagccgcgcgcgctccccaggccctggcccgggcctcgggccggggaggaagagtagctcgccgaggcgccgaggagagcgggccgccccacagcccgagccggagagggagcgcgagccgcgccggccccggtcgggcctccgaaaccatgaactttctgctgtcttgggtgcattggagccttgccttgctgctctacctccaccatgccaagtggtcccaggctgcacccatggcagaaggaggagggcagaatcatcacgaagtggtgaagttcatggatgtctatcagcgcagctactgccatccaatcgagaccctggtggacatcttccaggagtaccctgatgagatcgagtacatcttcaagccatcctgtgtgcccctgatgcgatgcgggggctgctgcaatgacgagggcctggagtgtgtgcccactgaggagtccaacatcaccatgcagattatgcggatcaaacctcaccaaggccagcacataggagagatgagcttcctacagcacaacaaatgtgaatgcagaccaaagaaagatagagcaagacaagaaaatccctgtgggccttgctcagagcggagaaagcatttgtttgtacaagatccgcagacgtgtaaatgttcctgcaaaaacacagactcgcgttgcaaggcgaggcagcttgagttaaacgaacgtacttgcagatgtgacaagccgaggcggtgagccgggcaggaggaaggagcctccctcagggtttcgggaaccagatctctcaccaggaaagactgatacagaacgatcgatacagaaaccacgctgccgccaccacaccatcaccatcgacagaacagtccttaatccagaaacctgaaatgaaggaagaggagactctgcgcagagcactttgggtccggagggcgagactccggcggaagcattcccgggcgggtgacccagcacggtccctcttggaattggattcgccattttatttttcttgctgctaaatcaccgagcccggaagattagagagttttatttctgggattcctgtagacacacccacccacatacatacatttatatatatatatattatatatatataaaaataaatatctctattttatatatataaaatatatatattctttttttaaattaacagtgctaatgttattggtgtcttcactggatgtatttgactgctgtggacttgagttgggaggggaatgttcccactcagatcctgacagggaagaggaggagatgagagactctggcatgatcttttttttgtcccacttggtggggccagggtcctctcccctgcccaggaatgtgcaaggccagggcatgggggcaaatatgacccagttttgggaacaccgacaaacccagccctggcgctgagcctctctaccccaggtcagacggacagaaagacagatcacaggtacagggatgaggacaccggctctgaccaggagtttggggagcttcaggacattgctgtgctttggggattccctccacatgctgcacgcgcatctcgcccccaggggcactgcctggaagattcaggagcctgggcggccttcgcttactctcacctgcttctgagttgcccaggagaccactggcagatgtcccggcgaagagaagagacacattgttggaagaagcagcccatgacagctccccttcctgggactcgccctcatcctcttcctgctccccttcctggggtgcagcctaaaaggacctatgtcctcacaccattgaaaccactagttctgtccccccaggagacctggttgtgtgtgtgtgagtggttgaccttcctccatcccctggtccttcccttcccttcccgaggcacagagagacagggcaggatccacgtgcccattgtggaggcagagaaaagagaaagtgttttatatacggtacttatttaatatccctttttaattagaaattaaaacagttaatttaattaaagagtagggttttttttcagtattcttggttaatatttaatttcaactatttatgagatgtatcttttgctctctcttgctctcttatttgtaccggtttttgtatataaaattcatgtttccaatctctctctccctgatcggtgacagtcactagcttatcttgaacagatatttaattttgctaacactcagctctgccctccccgatcccctggctccccagcacacattcctttgaaataaggtttcaatatacatctacatactatatatatatttggcaacttgtatttgtgtgtatatatatatatatatgtttatgtatatatgtgattctgataaaatagacattgctattctgttttttatatgtaaaaacaaaacaagaaaaaatagagaattctacatactaaatctctctccttttttaattttaatatttgttatcatttatttattggtgctactgtttatccgtaataattgtggggaaaagatattaacatcacgtctttgtctctagtgcagtttttcgagatattccgtagtacatatttatttttaaacaacgacaaagaaatacagatatatcttaaaaaaaaaaaagcattttgtattaaagaatttaattctgatctcaaa

SEQ ID NO: 28887 - RNA, 1116 nt, Artificial Sequence
  derived and/or modified sequence
cugaccgauaggcaaacagauaccgccccuuccccaucguaucacuuacugccaggucggcgccggaccguagacgcugccgcuucucgcgggcagggaccagaacccgcacccgggggcggaguggagggcgucggggcucgaggaguggcgcuaaaacuuuucguacaguugcugggauguagccgguucgggggcgccguugucagagccggggaggcagaaccuaguggggccgcccgcagugcaagcagcggaagggaagagccucagccagaggaaggagaggaggaggaagagaaggaagaagagagaggaccacaguggcggcugggagcaagaaagccaggcucuuggacaggggaagcugcaguuugcgcagacucggcaccugcggcaagggcaccacaagcccucgccagagccuccgggaggggagggagaguggcgcguaggggggcagaggaaagcgggcccccacacuccccuucacggcgcgggucugccagucgagcaggccccggcagggcaagcgagacaaugaacuuucuguugaguuggguccacuggucccuggcgcugcucuuguaucugcaccaugcaaaauggucccaggccgcaccuauggcggaaggcgguggucagaaccaccacgagguaguuaaguucauggacguauaucagcgcagcuacugucacccgaucgagacacucguagacaucuuucaggaauaccccgacgagaucgaauauauauuuaaaccaaguugcgucccucucaugaggugugguggaugcuguaaugaugaaggcuuggagugcguaccgacugaggagagcaauauuaccaugcagauuaugagaaucaaaccacaccaaggacagcacauaggagagaugagcuuucuacagcacaacaagugcgaaugcagacccaaaaaagaucgggcucgccaagagaacccguguggaccgugcucagaacgcagaaagcaucuuuucgugcaggacccucagaccuguaaaugcucauguaaaaacacagacucacgguguaaggcucgucagcucgaguugaaugagagaacaugucgcugcgauaagccucgucgcuag

SEQ ID NO: 28888 - RNA, 1116 nt, Artificial Sequence
  derived and/or modified sequence
cucaccgauagacagacagacacugcgccaagcccauccuaccacuuacuuccagggaggaggaggaccguggaugcagccgcuuccagaggacaagggccggaacccgcuccaggcggcgguguugaggggguuggagcacgcggaguggcucucaagcuuuuuguacagcuguugggauguagucgauucggcggcgcggucgugagggcuggugaagcugaaccuucaggggcagcaagaagugcuuccagcggaagggaggagccacaacccgaggagggggaggaagaggaggaaaaagaagaggagcgcggaccacaguggaggcuuggcgcucggaagcccgguagcuggacaggggaagccgcuguaugcgccgauucagccccugcugcuagggcuccucaagcacuugcccgagcaagcggacggggaggaagaguggcccgcagaggagcggaagaaucaggaccaccucauagcccaagccgcagagguucugcaucaagagcuggaccgggcagagcuuccgaaacaaugaacuuucuccuguccuggguucacuggucacuagcucuccugcuguaucuacaucacgcaaaauggucacaggccgcccccauggcggaaggcggaggacagaaccaccacgaaguugucaaguucauggacgucuaucagagguccuauugucacccaauugagacucucguagauauauuucaagaauacccagaugaaaucgaauacaucuuuaagccuucuugcgucccucugaugaggugcggaggaugcuguaaugacgaggggcuggagugugugccgacugaggaaagcaauauuacgaugcaaauuaugagaauuaaaccacaccagggacagcacauuggagaaaugucuuuucugcagcauaauaaaugugaauguaggccgaagaaagaccgggcccggcaagagaacccauguggccccugcucagaaaggagaaagcaccuguucguccaagauccucagacaugcaaauguucaugcaaaaacacugacagcagaugcaaggcgagacaacuggagcugaaugaaagaacuugcaggugcgauaaacccagacgcuag

SEQ ID NO: 28889 - protein, 354 aa, Artificial Sequence
  derived and/or modified sequence
LTDRQTDTAPSPSYHLLPGRRRTVDAAASRGQGPEPAPGGGVEGVGARGVALKLFVQLLGCSRFGGAVVRAGEAEPSGAARSASSGREEPQPEEGEEEEEKEEERGPQWRLGARKPGSWTGEAAVCADSAPAARAPQALARASGRGGRVARRGAEESGPPHSPSRRGSASRAGPGRASETMNFLLSWVHWSLALLLYLHHAKWSQAAPMAEGGGQNHHEVVKFMDVYQRSYCHPIETLVDIFQEYPDEIEYIFKPSCVPLMRCGGCCNDEGLECVPTEESNITMQIMRIKPHQGQHIGEMSFLQHNKCECRPKKDRARQENPCGPCSERRKHLFVQDPQTCKCSCKNTDSRCKM

SEQ ID NO: 28890 - protein, 174 aa, Artificial Sequence
  derived and/or modified sequence
MNFLLSWVHWSLALLLYLHHAKWSQAAPMAEGGGQNHHEVVKFMDVYQRSYCHPIETLVDIFQEYPDEIEYIFKPSCVPLMRCGGCCNDEGLECVPTEESNITMQIMRIKPHQGQHIGEMSFLQHNKCECRPKKDRARQENPCGPCSERRKHLFVQDPQTCKCSCKNTDSRCKM

SEQ ID NO: 28891 - protein, 354 aa, Artificial Sequence
  derived and/or modified sequence
MTDRQTDTAPSPSYHLLPGRRRTVDAAASRGQGPEPAPGGGVEGVGARGVALKLFVQLLGCSRFGGAVVRAGEAEPSGAARSASSGREEPQPEEGEEEEEKEEERGPQWRLGARKPGSWTGEAAVCADSAPAARAPQALARASGRGGRVARRGAEESGPPHSPSRRGSASRAGPGRASETMNFLLSWVHWSLALLLYLHHAKWSQAAPMAEGGGQNHHEVVKFMDVYQRSYCHPIETLVDIFQEYPDEIEYIFKPSCVPLMRCGGCCNDEGLECVPTEESNITMQIMRIKPHQGQHIGEMSFLQHNKCECRPKKDRARQENPCGPCSERRKHLFVQDPQTCKCSCKNTDSRCKM

SEQ ID NO: 28892 - DNA, 3519 bp, Artificial Sequence
  derived and/or modified sequence
tcgcggaggcttggggcagccgggtagctcggaggtcgtggcgctgggggctagcaccagcgctctgtcgggaggcgcagcggttaggtggaccggtcagcggactcaccggccagggcgctcggtgctggaatttgatattcattgatccgggttttatccctcttcttttttcttaaacatttttttttaaaactgtattgtttctcgttttaatttatttttgcttgccattccccacttgaatcgggccgacggcttggggagattgctctacttccccaaatcactgtggattttggaaaccagcagaaagaggaaagaggtagcaagagctccagagagaagtcgaggaagagagagacggggtcagagagagcgcgcgggcgtgcgagcagcgaaagcgacaggggcaaagtgagtgacctgcttttgggggtgaccgccggagcgcggcgtgagccctcccccttgggatcccgcagctgaccagtcgcgctgacggacagacagacagacaccgcccccagccccagctaccacctcctccccggccggcggcggacagtggacgcggcggcgagccgcgggcaggggccggagcccgcgcccggaggcggggtggagggggtcggggctcgcggcgtcgcactgaaacttttcgtccaacttctgggctgttctcgcttcggaggagccgtggtccgcgcgggggaagccgagccgagcggagccgcgagaagtgctagctcgggccgggaggagccgcagccggaggagggggaggaggaagaagagaaggaagaggagagggggccgcagtggcgactcggcgctcggaagccgggctcatggacgggtgaggcggcggtgtgcgcagacagtgctccagccgcgcgcgctccccaggccctggcccgggcctcgggccggggaggaagagtagctcgccgaggcgccgaggagagcgggccgccccacagcccgagccggagagggagcgcgagccgcgccggccccggtcgggcctccgaaaccatgaactttctgctgtcttgggtgcattggagccttgccttgctgctctacctccaccatgccaagtggtcccaggctgcacccatggcagaaggaggagggcagaatcatcacgaagtggtgaagttcatggatgtctatcagcgcagctactgccatccaatcgagaccctggtggacatcttccaggagtaccctgatgagatcgagtacatcttcaagccatcctgtgtgcccctgatgcgatgcgggggctgctgcaatgacgagggcctggagtgtgtgcccactgaggagtccaacatcaccatgcagattatgcggatcaaacctcaccaaggccagcacataggagagatgagcttcctacagcacaacaaatgtgaatgcagaccaaagaaagatagagcaagacaagaaaatccctgtgggccttgctcagagcggagaaagcatttgtttgtacaagatccgcagacgtgtaaatgttcctgcaaaaacacagactcgcgttgcaagatgtgacaagccgaggcggtgagccgggcaggaggaaggagcctccctcagggtttcgggaaccagatctctcaccaggaaagactgatacagaacgatcgatacagaaaccacgctgccgccaccacaccatcaccatcgacagaacagtccttaatccagaaacctgaaatgaaggaagaggagactctgcgcagagcactttgggtccggagggcgagactccggcggaagcattcccgggcgggtgacccagcacggtccctcttggaattggattcgccattttatttttcttgctgctaaatcaccgagcccggaagattagagagttttatttctgggattcctgtagacacacccacccacatacatacatttatatatatatatattatatatatataaaaataaatatctctattttatatatataaaatatatatattctttttttaaattaacagtgctaatgttattggtgtcttcactggatgtatttgactgctgtggacttgagttgggaggggaatgttcccactcagatcctgacagggaagaggaggagatgagagactctggcatgatcttttttttgtcccacttggtggggccagggtcctctcccctgcccaggaatgtgcaaggccagggcatgggggcaaatatgacccagttttgggaacaccgacaaacccagccctggcgctgagcctctctaccccaggtcagacggacagaaagacagatcacaggtacagggatgaggacaccggctctgaccaggagtttggggagcttcaggacattgctgtgctttggggattccctccacatgctgcacgcgcatctcgcccccaggggcactgcctggaagattcaggagcctgggcggccttcgcttactctcacctgcttctgagttgcccaggagaccactggcagatgtcccggcgaagagaagagacacattgttggaagaagcagcccatgacagctccccttcctgggactcgccctcatcctcttcctgctccccttcctggggtgcagcctaaaaggacctatgtcctcacaccattgaaaccactagttctgtccccccaggagacctggttgtgtgtgtgtgagtggttgaccttcctccatcccctggtccttcccttcccttcccgaggcacagagagacagggcaggatccacgtgcccattgtggaggcagagaaaagagaaagtgttttatatacggtacttatttaatatccctttttaattagaaattaaaacagttaatttaattaaagagtagggttttttttcagtattcttggttaatatttaatttcaactatttatgagatgtatcttttgctctctcttgctctcttatttgtaccggtttttgtatataaaattcatgtttccaatctctctctccctgatcggtgacagtcactagcttatcttgaacagatatttaattttgctaacactcagctctgccctccccgatcccctggctccccagcacacattcctttgaaataaggtttcaatatacatctacatactatatatatatttggcaacttgtatttgtgtgtatatatatatatatatgtttatgtatatatgtgattctgataaaatagacattgctattctgttttttatatgtaaaaacaaaacaagaaaaaatagagaattctacatactaaatctctctccttttttaattttaatatttgttatcatttatttattggtgctactgtttatccgtaataattgtggggaaaagatattaacatcacgtctttgtctctagtgcagtttttcgagatattccgtagtacatatttatttttaaacaacgacaaagaaatacagatatatcttaaaaaaaaaaaagcattttgtattaaagaatttaattctgatctcaaaaaaaaaaaaaaaaaa

SEQ ID NO: 28893 - DNA, 1062 bp, Artificial Sequence
  derived and/or modified sequence
ctgaccgaccgccagaccgacaccgcccccagccccagctaccacctgctgcccggccgccgccgcaccgtggacgccgccgccagccgcggccagggccccgagcccgcccccggcggcggcgtggagggcgtgggcgcccgcggcgtggccctgaagctgttcgtgcagctgctgggctgcagccgcttcggcggcgccgtggtgcgcgccggcgaggccgagcccagcggcgccgcccgcagcgccagcagcggccgcgaggagccccagcccgaggagggcgaggaggaggaggagaaggaggaggagcgcggcccccagtggcgcctgggcgcccgcaagcccggcagctggaccggcgaggccgccgtgtgcgccgacagcgcccccgccgcccgcgccccccaggccctggcccgcgccagcggccgcggcggccgcgtggcccgccgcggcgccgaggagagcggccccccccacagccccagccgccgcggcagcgccagccgcgccggccccggccgcgccagcgagaccatgaacttcctgctgagctgggtgcactggagcctggccctgctgctgtacctgcaccacgccaagtggagccaggccgcccccatggccgagggcggcggccagaaccaccacgaggtggtgaagttcatggacgtgtaccagcgcagctactgccaccccatcgagaccctggtggacatcttccaggagtaccccgacgagatcgagtacatcttcaagcccagctgcgtgcccctgatgcgctgcggcggctgctgcaacgacgagggcctggagtgcgtgcccaccgaggagagcaacatcaccatgcagatcatgcgcatcaagccccaccagggccagcacatcggcgagatgagcttcctgcagcacaacaagtgcgagtgccgccccaagaaggaccgcgcccgccaggagaacccctgcggcccctgcagcgagcgccgcaagcacctgttcgtgcaggacccccagacctgcaagtgcagctgcaagaacaccgacagccgctgcaagatg

SEQ ID NO: 28894 - DNA, 1065 bp, Artificial Sequence
  derived and/or modified sequence
ctgaccgacagacagaccgacaccgcccccagccccagctaccacctgctgcccggcagaagaagaaccgtggacgccgccgccagcagaggccagggccccgagcccgcccccggcggcggcgtggagggcgtgggcgccagaggcgtggccctgaagctgttcgtgcagctgctgggctgcagcagattcggcggcgccgtggtgagagccggcgaggccgagcccagcggcgccgccagaagcgccagcagcggcagagaggagccccagcccgaggagggcgaggaggaggaggagaaggaggaggagagaggcccccagtggagactgggcgccagaaagcccggcagctggaccggcgaggccgccgtgtgcgccgacagcgcccccgccgccagagccccccaggccctggccagagccagcggcagaggcggcagagtggccagaagaggcgccgaggagagcggccccccccacagccccagcagaagaggcagcgccagcagagccggccccggcagagccagcgagaccatgaacttcctgctgagctgggtgcactggagcctggccctgctgctgtacctgcaccacgccaagtggagccaggccgcccccatggccgagggcggcggccagaaccaccacgaggtggtgaagttcatggacgtgtaccagagaagctactgccaccccatcgagaccctggtggacatcttccaggagtaccccgacgagatcgagtacatcttcaagcccagctgcgtgcccctgatgagatgcggcggctgctgcaacgacgagggcctggagtgcgtgcccaccgaggagagcaacatcaccatgcagatcatgagaatcaagccccaccagggccagcacatcggcgagatgagcttcctgcagcacaacaagtgcgagtgcagacccaagaaggacagagccagacaggagaacccctgcggcccctgcagcgagagaagaaagcacctgttcgtgcaggacccccagacctgcaagtgcagctgcaagaacaccgacagcagatgcaagatgtag

SEQ ID NO: 28895 - DNA, 1065 bp, Artificial Sequence
  derived and/or modified sequence
ctaacagacagacagactgacacagcgccttcaccaagctatcacctcctgcctggacggcggaggactgtggacgctgctgccagtcgtggccaggggcccgagcccgcccccggcggaggcgtcgaaggcgtgggggccaggggagtggcgcttaagttattcgtccagctgctgggttgctccagattcggcggggccgtcgtccgagccggagaggctgagccaagcggtgctgcacgctcagcatcttccggccgagaagagccgcaacccgaagagggagaggaggaagaagaaaaggaggaggaacggggaccccagtggaggctcggcgctcggaaacctggctcctggactggagaggccgccgtctgcgcagacagtgcgcctgctgctcgggcgccccaggccctcgcacgggcttctggccgcggcggaagggtggctcgcaggggcgccgaggaatcaggtccaccccatagtccctcaaggaggggctcagcttcccgcgccggccctggcagggcaagtgagactatgaatttcctgcttagttgggtgcattggagcctggccttgcttttgtatcttcaccacgctaagtggtcccaggcggctcctatggccgagggcggggggcagaatcatcacgaggtagttaagttcatggatgtctatcaacgatcctactgccacccaatagagaccttggtggacattttccaggaatatcccgacgaaatcgagtacatctttaaacctagttgtgtccccctgatgcggtgcggcgggtgctgtaatgatgagggtctcgaatgcgtgccaaccgaagaatccaatataaccatgcagattatgaggatcaagccgcatcagggacagcacattggagagatgtccttcctccagcataacaagtgcgaatgtaggcctaagaaggaccgagcaaggcaagaaaatccatgtggaccttgctctgagaggcgcaaacacctgtttgtgcaggaccctcagacatgtaagtgtagttgtaagaacacagacagtcgttgcaagatgtag

SEQ ID NO: 28896 - DNA, 1065 bp, Artificial Sequence
  derived and/or modified sequence
ctgacagaccggcagacagacacagcccccagccccagctaccacctgctgcccggcagaagaagaacagtggatgctgctgccagccggggccagggccctgagcccgcccctgggggcggcgtggagggcgtgggcgcccggggcgtggccctgaagctgtttgtgcagctgctgggctgcagcagatttggaggagctgtggtgcgggccggggaggccgagcccagcggggccgcccggagcgccagcagcggccgggaggagccccagcctgaggagggggaggaggaggaggagaaggaggaggagcggggcccccagtggaggctgggcgccaggaagccaggctcctggacaggagaggccgctgtgtgtgccgacagcgccccagctgcccgggccccccaggccctggcccgggccagcggccggggcggccgggtggccaggagaggagctgaggagagcggccccccccacagccccagcagaagaggcagcgccagccgggccggccctggccgggccagcgagaccatgaacttcctgctgtcctgggtgcactggagcctggccctgctgctgtacctgcaccacgccaagtggagccaggccgcccccatggccgagggcggcggccagaaccaccacgaggtggtgaagttcatggatgtgtaccagaggagctactgccaccccatcgagaccctggtggacatcttccaggagtacccagatgaaattgagtacatcttcaagcccagctgtgtgcccctgatgagatgtggcggctgctgcaatgatgagggcctggagtgtgtgcccacagaggagagcaacatcaccatgcagatcatgaggatcaagccccaccagggccagcacatcggggagatgtccttcctgcagcacaacaagtgtgaatgtcggcccaagaaggaccgggcccggcaggagaacccctgtggcccctgcagcgagaggaggaagcacctgtttgtgcaggacccccagacctgcaagtgcagctgcaagaacacagacagccgctgcaagatgtag

SEQ ID NO: 28897 - DNA, 1065 bp, Artificial Sequence
  derived and/or modified sequence
ctgaccgaccggcagaccgacaccgcccccagccccagctaccacctcctccctggacgcaggagaaccgtggacgctgcagccagcagaggccaggggccagagccagcgccgggcgggggagtggaaggggtgggagcaaggggggtggcactgaagctgttcgttcagcttttaggctgcagccgcttcggtggcgccgttgtgagagctggcgaagcagagccgagtggggcagcccggagtgcctcctccgggcgtgaagaacctcagccagaagagggggaagaggaagaagagaaagaggaagagcgcggacctcaatggcgcctgggcgcaagaaaacctgggagctggacaggcgaggcagccgtgtgcgctgattcagctccggcagctcgggctccccaggcactagcacgcgcatccgggcgcggtggaagagtcgcaagacgcggtgcggaggaatctggaccaccccacagtccgtcacggcgaggcagcgccagtcgcgccggccctggccgcgctagcgaaactatgaacttcctcttgtcctgggttcattggtcactggcactgctcttgtacctgcaccatgcaaagtggagccaggccgctcccatggcagagggcggagggcagaatcatcacgaggtcgtcaaattcatggatgtgtaccagcggagctactgccatcccatcgagactctggttgacatctttcaagaatacccagacgaaatcgagtatatttttaaacctagctgtgtccccctgatgagatgcggtgggtgctgtaacgatgagggtctggagtgtgtacctaccgaagaatctaatatcaccatgcagataatgcgcatcaagccgcaccaggggcagcacataggcgaaatgtcgtttctccagcataacaaatgcgagtgtagacccaagaaggatcgggccaggcaggaaaacccctgtggaccatgctcagagcgtcggaagcacctgtttgtgcaggacccacaaacatgtaaatgcagttgcaaaaatactgatagccgatgcaaaatgtag

SEQ ID NO: 28898 - DNA, 1065 bp, Artificial Sequence
  derived and/or modified sequence
ctgacggatcgtcaaacagacaccgccccttccccctcctatcatcttctccctggcaggcgtagaacggttgatgccgctgcgagtcgcggacagggtccagaacccgctccaggaggcggagtggaaggcgtgggggcaaggggagtcgcccttaagctgtttgtccagctgctgggatgttcacgattcggaggcgcagtcgtgcgcgctggcgaggctgaaccctccggggctgccagaagcgcaagctctggtcgagaagaaccgcaacctgaagaaggcgaggaagaggaagagaaagaagaagagaggggcccacagtggaggttgggggctaggaagcctggttcatggacaggggaagctgctgtgtgcgcggactctgctccggcagctcgggcaccacaggctctggcaagagctagcggccgtggcggacgggtggcccgtcggggtgcagaggagagtggcccaccacattctccctccaggcgcggatccgcctctcgtgcaggaccaggaagagcgtccgagaccatgaactttctcctttcttgggtgcactggtctctcgccctgcttctctatctgcaccacgcgaaatggagtcaggccgctcccatggctgaagggggaggccagaatcaccatgaggtggtcaagttcatggatgtctaccaacggtcttactgccatccaatcgaaactctggtcgacattttccaggagtacccagatgaaattgaatatatttttaagccctcttgcgtgccgctgatgaggtgtgggggatgctgtaatgacgaggggttggaatgtgtcccaaccgaagaaagcaatatcacaatgcagataatgcggatcaaacctcaccaaggtcaacacatcggagagatgagcttcctccagcacaacaaatgcgagtgccgcccaaagaaagaccgcgcacggcaggagaacccgtgtggaccttgcagcgagcgcagaaaacatctgtttgtgcaggatccccagacatgcaaatgcagttgcaagaacacagattctcggtgtaagatgtag

SEQ ID NO: 28899 - DNA, 1065 bp, Artificial Sequence
  derived and/or modified sequence
ctgacagaccgccaaacagacactgctccatctccatcttatcacctgctgcccggacgtagaaggactgtggatgctgcagcgtcacgtggacaaggtccagagcccgcaccagggggtggggttgaaggggttggagcaagaggcgtggcgctgaaactctttgtacaactgcttggctgctcacggttcgggggagctgttgtccgtgccggcgaagctgaaccgagtggtgccgctagaagcgcatcctccggaagggaagagccccagccagaggagggagaggaggaggaggaaaaggaagaggaacgtggaccccaatggcggcttggcgcaaggaagcctggttcctggacaggggaagccgccgtgtgtgcagacagcgccccagcagctagagcacctcaggcccttgccagagcaagtggtcgaggcggccgagtagcccggcgaggagccgaggagagcggacctcctcattccccttcaagaagagggtccgccagtagagctggcccgggccgagccagcgaaacgatgaattttctcctcagctgggtgcactggtcacttgcgctgcttctctacctgcaccatgcaaagtggtcacaggcagcccctatggccgaagggggaggtcagaaccatcatgaagttgtgaaatttatggacgtctaccagcgctcttattgccaccccatcgaaactcttgtcgacatatttcaggagtacccagatgagattgagtacatcttcaagccaagttgcgtgccactgatgcgctgtggaggatgttgcaacgacgaagggcttgaatgtgtgcctacagaagaaagtaacatcacgatgcagataatgagaatcaagccacaccagggccagcatatcggcgagatgagttttctgcaacacaataagtgtgaatgcaggcctaagaaggatcgagctaggcaggaaaacccttgtggaccttgttccgagcgccggaagcatctgtttgtccaggatccacagacctgtaagtgctcgtgcaaaaatacagacagcagatgcaagatgtag

SEQ ID NO: 28900 - DNA, 1065 bp, Artificial Sequence
  derived and/or modified sequence
ctgaccgataggcaaacagacacggcccctagcccatcctatcacttgctgcctgggcgacggcgaactgttgacgcagcagcctcaagaggccaaggacccgaacctgcgcctggaggaggagtcgagggagtgggggcccggggagttgctctgaaacttttcgtgcagttgctgggatgtagccgatttggcggagctgtcgtgcgcgctggcgaggccgagcctagtggtgcagcgaggtcagctagttccggtagggaggaaccacaacctgaagagggagaagaggaagaggagaaagaagaagaacgcggcccacagtggcgcctcggggcaaggaagccgggcagctggactggagaagcagctgtgtgtgcagactctgcccctgctgcacgggcgccacaagctctggcccgcgcatccggacgaggcggaagagttgccaggaggggagcagaagaatccggccctccccacagtccttcccgaagaggaagcgccagtcgcgcaggacctgggcgagcctccgagactatgaacttcctgctcagctgggtccactggtcattagctttgctgctgtacctgcatcacgccaaatggagccaagcagcacctatggccgagggcggcggacaaaatcatcacgaagttgtaaagtttatggatgtatatcagaggtcctattgccacccgattgaaacactagtggatatctttcaggaataccctgatgaaatcgaatacatatttaaaccttcctgtgttccgctgatgcgctgcggcggatgttgtaatgacgaaggattagagtgtgtccctaccgaggagtccaatataaccatgcagatcatgaggataaagccccaccaagggcagcatatcggggaaatgagcttcctccagcataataaatgtgaatgcagaccaaagaaagacagggcgagacaggaaaatccatgcggcccctgcagtgaacgccgcaagcatctattcgtgcaggacccccagacgtgtaaatgtagctgtaagaataccgactcccgatgtaaaatgtag

SEQ ID NO: 28901 - DNA, 1081 bp, Artificial Sequence
  derived and/or modified sequence
ctgacggacagacagacagacaccgcccccagccccagctaccacctcctccccggccggcggcggacagtggacgcggcggcgagccgcgggcaggggccggagcccgcgcccggaggcggggtggagggggtcggggctcgcggcgtcgcactgaaacttttcgtccaacttctgggctgttctcgcttcggaggagccgtggtccgcgcgggggaagccgagccgagcggagccgcgagaagtgctagctcgggccgggaggagccgcagccggaggagggggaggaggaagaagagaaggaagaggagagggggccgcagtggcgactcggcgctcggaagccgggctcatggacgggtgaggcggcggtgtgcgcagacagtgctccagccgcgcgcgctccccaggccctggcccgggcctcgggccggggaggaagagtagctcgccgaggcgccgaggagagcgggccgccccacagcccgagccggagagggagcgcgagccgcgccggccccggtcgggcctccgaaaccatgaactttctgctgtcttgggtgcattggagccttgccttgctgctctacctccaccatgccaagtggtcccaggctgcacccatggcagaaggaggagggcagaatcatcacgaagtggtgaagttcatggatgtctatcagcgcagctactgccatccaatcgagaccctggtggacatcttccaggagtaccctgatgagatcgagtacatcttcaagccatcctgtgtgcccctgatgcgatgcgggggctgctgcaatgacgagggcctggagtgtgtgcccactgaggagtccaacatcaccatgcagattatgcggatcaaacctcaccaaggccagcacataggagagatgagcttcctacagcacaacaaatgtgaatgcagaccaaagaaagatagagcaagacaagaaaatccctgtgggccttgctcagagcggagaaagcatttgtttgtacaagatccgcagacgtgtaaatgttcctgcaaaaacacagactcgcgttgcaagatgtgacaagccgaggcggtga

SEQ ID NO: 28902 - RNA, 1065 nt, Artificial Sequence
  derived and/or modified sequence
cugacagaccgccaaacagacacugcuccaucuccaucuuaucaccugcugcccggacguagaaggacuguggaugcugcagcgucacguggacaagguccagagcccgcaccagggggugggguugaagggguuggagcaagaggcguggcgcugaaacucuuuguacaacugcuuggcugcucacgguucgggggagcuguuguccgugccggcgaagcugaaccgaguggugccgcuagaagcgcauccuccggaagggaagagccccagccagaggagggagaggaggaggaggaaaaggaagaggaacguggaccccaauggcggcuuggcgcaaggaagccugguuccuggacaggggaagccgccgugugugcagacagcgccccagcagcuagagcaccucaggcccuugccagagcaaguggucgaggcggccgaguagcccggcgaggagccgaggagagcggaccuccucauuccccuucaagaagaggguccgccaguagagcuggcccgggccgagccagcgaaacgaugaauuuucuccucagcugggugcacuggucacuugcgcugcuucucuaccugcaccaugcaaaguggucacaggcagccccuauggccgaagggggaggucagaaccaucaugaaguugugaaauuuauggacgucuaccagcgcucuuauugccaccccaucgaaacucuugucgacauauuucaggaguacccagaugagauugaguacaucuucaagccaaguugcgugccacugaugcgcuguggaggauguugcaacgacgaagggcuugaaugugugccuacagaagaaaguaacaucacgaugcagauaaugagaaucaagccacaccagggccagcauaucggcgagaugaguuuucugcaacacaauaagugugaaugcaggccuaagaaggaucgagcuaggcaggaaaacccuuguggaccuuguuccgagcgccggaagcaucuguuuguccaggauccacagaccuguaagugcucgugcaaaaauacagacagcagaugcaagauguag

SEQ ID NO: 28903 - RNA, 1065 nt, Artificial Sequence
  derived and/or modified sequence
cugaccgauaggcaaacagacacggccccuagcccauccuaucacuugcugccugggcgacggcgaacuguugacgcagcagccucaagaggccaaggacccgaaccugcgccuggaggaggagucgagggagugggggcccggggaguugcucugaaacuuuucgugcaguugcugggauguagccgauuuggcggagcugucgugcgcgcuggcgaggccgagccuaguggugcagcgaggucagcuaguuccgguagggaggaaccacaaccugaagagggagaagaggaagaggagaaagaagaagaacgcggcccacaguggcgccucggggcaaggaagccgggcagcuggacuggagaagcagcugugugugcagacucugccccugcugcacgggcgccacaagcucuggcccgcgcauccggacgaggcggaagaguugccaggaggggagcagaagaauccggcccuccccacaguccuucccgaagaggaagcgccagucgcgcaggaccugggcgagccuccgagacuaugaacuuccugcucagcuggguccacuggucauuagcuuugcugcuguaccugcaucacgccaaauggagccaagcagcaccuauggccgagggcggcggacaaaaucaucacgaaguuguaaaguuuauggauguauaucagagguccuauugccacccgauugaaacacuaguggauaucuuucaggaauacccugaugaaaucgaauacauauuuaaaccuuccuguguuccgcugaugcgcugcggcggauguuguaaugacgaaggauuagagugugucccuaccgaggaguccaauauaaccaugcagaucaugaggauaaagccccaccaagggcagcauaucggggaaaugagcuuccuccagcauaauaaaugugaaugcagaccaaagaaagacagggcgagacaggaaaauccaugcggccccugcagugaacgccgcaagcaucuauucgugcaggacccccagacguguaaauguagcuguaagaauaccgacucccgauguaaaauguag

SEQ ID NO: 28904 - protein, 327 aa, Artificial Sequence
  derived and/or modified sequence
LTDRQTDTAPSPSYHLLPGRRRTVDAAASRGQGPEPAPGGGVEGVGARGVALKLFVQLLGCSRFGGAVVRAGEAEPSGAARSASSGREEPQPEEGEEEEEKEEERGPQWRLGARKPGSWTGEAAVCADSAPAARAPQALARASGRGGRVARRGAEESGPPHSPSRRGSASRAGPGRASETMNFLLSWVHWSLALLLYLHHAKWSQAAPMAEGGGQNHHEVVKFMDVYQRSYCHPIETLVDIFQEYPDEIEYIFKPSCVPLMRCGGCCNDEGLECVPTEESNITMQIMRIKPHQGQHIGEMSFLQHNKCECRPKKDRARQEKCDKPRR

SEQ ID NO: 28905 - protein, 147 aa, Artificial Sequence
  derived and/or modified sequence
MNFLLSWVHWSLALLLYLHHAKWSQAAPMAEGGGQNHHEVVKFMDVYQRSYCHPIETLVDIFQEYPDEIEYIFKPSCVPLMRCGGCCNDEGLECVPTEESNITMQIMRIKPHQGQHIGEMSFLQHNKCECRPKKDRARQEKCDKPRR

SEQ ID NO: 28906 - protein, 327 aa, Artificial Sequence
  derived and/or modified sequence
MTDRQTDTAPSPSYHLLPGRRRTVDAAASRGQGPEPAPGGGVEGVGARGVALKLFVQLLGCSRFGGAVVRAGEAEPSGAARSASSGREEPQPEEGEEEEEKEEERGPQWRLGARKPGSWTGEAAVCADSAPAARAPQALARASGRGGRVARRGAEESGPPHSPSRRGSASRAGPGRASETMNFLLSWVHWSLALLLYLHHAKWSQAAPMAEGGGQNHHEVVKFMDVYQRSYCHPIETLVDIFQEYPDEIEYIFKPSCVPLMRCGGCCNDEGLECVPTEESNITMQIMRIKPHQGQHIGEMSFLQHNKCECRPKKDRARQEKCDKPRR

SEQ ID NO: 28907 - DNA, 3422 bp, Artificial Sequence
  derived and/or modified sequence
tcgcggaggcttggggcagccgggtagctcggaggtcgtggcgctgggggctagcaccagcgctctgtcgggaggcgcagcggttaggtggaccggtcagcggactcaccggccagggcgctcggtgctggaatttgatattcattgatccgggttttatccctcttcttttttcttaaacatttttttttaaaactgtattgtttctcgttttaatttatttttgcttgccattccccacttgaatcgggccgacggcttggggagattgctctacttccccaaatcactgtggattttggaaaccagcagaaagaggaaagaggtagcaagagctccagagagaagtcgaggaagagagagacggggtcagagagagcgcgcgggcgtgcgagcagcgaaagcgacaggggcaaagtgagtgacctgcttttgggggtgaccgccggagcgcggcgtgagccctcccccttgggatcccgcagctgaccagtcgcgctgacggacagacagacagacaccgcccccagccccagctaccacctcctccccggccggcggcggacagtggacgcggcggcgagccgcgggcaggggccggagcccgcgcccggaggcggggtggagggggtcggggctcgcggcgtcgcactgaaacttttcgtccaacttctgggctgttctcgcttcggaggagccgtggtccgcgcgggggaagccgagccgagcggagccgcgagaagtgctagctcgggccgggaggagccgcagccggaggagggggaggaggaagaagagaaggaagaggagagggggccgcagtggcgactcggcgctcggaagccgggctcatggacgggtgaggcggcggtgtgcgcagacagtgctccagccgcgcgcgctccccaggccctggcccgggcctcgggccggggaggaagagtagctcgccgaggcgccgaggagagcgggccgccccacagcccgagccggagagggagcgcgagccgcgccggccccggtcgggcctccgaaaccatgaactttctgctgtcttgggtgcattggagccttgccttgctgctctacctccaccatgccaagtggtcccaggctgcacccatggcagaaggaggagggcagaatcatcacgaagtggtgaagttcatggatgtctatcagcgcagctactgccatccaatcgagaccctggtggacatcttccaggagtaccctgatgagatcgagtacatcttcaagccatcctgtgtgcccctgatgcgatgcgggggctgctgcaatgacgagggcctggagtgtgtgcccactgaggagtccaacatcaccatgcagattatgcggatcaaacctcaccaaggccagcacataggagagatgagcttcctacagcacaacaaatgtgaatgcagaccaaagaaagatagagcaagacaagaaaaatgtgacaagccgaggcggtgagccgggcaggaggaaggagcctccctcagggtttcgggaaccagatctctcaccaggaaagactgatacagaacgatcgatacagaaaccacgctgccgccaccacaccatcaccatcgacagaacagtccttaatccagaaacctgaaatgaaggaagaggagactctgcgcagagcactttgggtccggagggcgagactccggcggaagcattcccgggcgggtgacccagcacggtccctcttggaattggattcgccattttatttttcttgctgctaaatcaccgagcccggaagattagagagttttatttctgggattcctgtagacacacccacccacatacatacatttatatatatatatattatatatatataaaaataaatatctctattttatatatataaaatatatatattctttttttaaattaacagtgctaatgttattggtgtcttcactggatgtatttgactgctgtggacttgagttgggaggggaatgttcccactcagatcctgacagggaagaggaggagatgagagactctggcatgatcttttttttgtcccacttggtggggccagggtcctctcccctgcccaggaatgtgcaaggccagggcatgggggcaaatatgacccagttttgggaacaccgacaaacccagccctggcgctgagcctctctaccccaggtcagacggacagaaagacagatcacaggtacagggatgaggacaccggctctgaccaggagtttggggagcttcaggacattgctgtgctttggggattccctccacatgctgcacgcgcatctcgcccccaggggcactgcctggaagattcaggagcctgggcggccttcgcttactctcacctgcttctgagttgcccaggagaccactggcagatgtcccggcgaagagaagagacacattgttggaagaagcagcccatgacagctccccttcctgggactcgccctcatcctcttcctgctccccttcctggggtgcagcctaaaaggacctatgtcctcacaccattgaaaccactagttctgtccccccaggagacctggttgtgtgtgtgtgagtggttgaccttcctccatcccctggtccttcccttcccttcccgaggcacagagagacagggcaggatccacgtgcccattgtggaggcagagaaaagagaaagtgttttatatacggtacttatttaatatccctttttaattagaaattaaaacagttaatttaattaaagagtagggttttttttcagtattcttggttaatatttaatttcaactatttatgagatgtatcttttgctctctcttgctctcttatttgtaccggtttttgtatataaaattcatgtttccaatctctctctccctgatcggtgacagtcactagcttatcttgaacagatatttaattttgctaacactcagctctgccctccccgatcccctggctccccagcacacattcctttgaaataaggtttcaatatacatctacatactatatatatatttggcaacttgtatttgtgtgtatatatatatatatatgtttatgtatatatgtgattctgataaaatagacattgctattctgttttttatatgtaaaaacaaaacaagaaaaaatagagaattctacatactaaatctctctccttttttaattttaatatttgttatcatttatttattggtgctactgtttatccgtaataattgtggggaaaagatattaacatcacgtctttgtctctagtgcagtttttcgagatattccgtagtacatatttatttttaaacaacgacaaagaaatacagatatatcttaaaaaaaaaaaagcattttgtattaaagaatttaattctgatctcaaaaaaaaaaaaaaaaaa

SEQ ID NO: 28908 - DNA, 981 bp, Artificial Sequence
  derived and/or modified sequence
ctgaccgaccgccagaccgacaccgcccccagccccagctaccacctgctgcccggccgccgccgcaccgtggacgccgccgccagccgcggccagggccccgagcccgcccccggcggcggcgtggagggcgtgggcgcccgcggcgtggccctgaagctgttcgtgcagctgctgggctgcagccgcttcggcggcgccgtggtgcgcgccggcgaggccgagcccagcggcgccgcccgcagcgccagcagcggccgcgaggagccccagcccgaggagggcgaggaggaggaggagaaggaggaggagcgcggcccccagtggcgcctgggcgcccgcaagcccggcagctggaccggcgaggccgccgtgtgcgccgacagcgcccccgccgcccgcgccccccaggccctggcccgcgccagcggccgcggcggccgcgtggcccgccgcggcgccgaggagagcggccccccccacagccccagccgccgcggcagcgccagccgcgccggccccggccgcgccagcgagaccatgaacttcctgctgagctgggtgcactggagcctggccctgctgctgtacctgcaccacgccaagtggagccaggccgcccccatggccgagggcggcggccagaaccaccacgaggtggtgaagttcatggacgtgtaccagcgcagctactgccaccccatcgagaccctggtggacatcttccaggagtaccccgacgagatcgagtacatcttcaagcccagctgcgtgcccctgatgcgctgcggcggctgctgcaacgacgagggcctggagtgcgtgcccaccgaggagagcaacatcaccatgcagatcatgcgcatcaagccccaccagggccagcacatcggcgagatgagcttcctgcagcacaacaagtgcgagtgccgccccaagaaggaccgcgcccgccaggagaagtgcgacaagccccgccgc

SEQ ID NO: 28909 - DNA, 984 bp, Artificial Sequence
  derived and/or modified sequence
ctgaccgacagacagaccgacaccgcccccagccccagctaccacctgctgcccggcagaagaagaaccgtggacgccgccgccagcagaggccagggccccgagcccgcccccggcggcggcgtggagggcgtgggcgccagaggcgtggccctgaagctgttcgtgcagctgctgggctgcagcagattcggcggcgccgtggtgagagccggcgaggccgagcccagcggcgccgccagaagcgccagcagcggcagagaggagccccagcccgaggagggcgaggaggaggaggagaaggaggaggagagaggcccccagtggagactgggcgccagaaagcccggcagctggaccggcgaggccgccgtgtgcgccgacagcgcccccgccgccagagccccccaggccctggccagagccagcggcagaggcggcagagtggccagaagaggcgccgaggagagcggccccccccacagccccagcagaagaggcagcgccagcagagccggccccggcagagccagcgagaccatgaacttcctgctgagctgggtgcactggagcctggccctgctgctgtacctgcaccacgccaagtggagccaggccgcccccatggccgagggcggcggccagaaccaccacgaggtggtgaagttcatggacgtgtaccagagaagctactgccaccccatcgagaccctggtggacatcttccaggagtaccccgacgagatcgagtacatcttcaagcccagctgcgtgcccctgatgagatgcggcggctgctgcaacgacgagggcctggagtgcgtgcccaccgaggagagcaacatcaccatgcagatcatgagaatcaagccccaccagggccagcacatcggcgagatgagcttcctgcagcacaacaagtgcgagtgcagacccaagaaggacagagccagacaggagaagtgcgacaagcccagaagatag

SEQ ID NO: 28910 - DNA, 984 bp, Artificial Sequence
  derived and/or modified sequence
ctcactgatcgccaaacagataccgctcctagtccgtcataccacttgcttccaggacggcggaggaccgtggacgctgctgcctcacgaggacagggccccgagcctgctcctgggggaggcgtggaaggagtgggtgccagaggagtcgcactgaagctttttgtgcagctcctcggatgcagcagatttgggggggcagtggtgagggccggtgaggctgagccttccggggccgcaaggagcgcctcgtctggccgagaggagcctcagcccgaagaaggggaggaagaggaggaaaaagaagaagagcggggccctcaatggcgcctcggcgcccgaaagcctggaagttggaccggggaggctgctgtgtgtgctgactctgcgcctgctgcaagagccccacaggctctggccagagctagtggcaggggcggtcgcgttgcccggaggggagcagaggaatcaggcccccctcattcacctagtagaaggggctccgcatcccgcgctggtccggggcgcgcctccgagactatgaatttcctgctttcctgggtgcactggagcctcgctctactgctgtaccttcaccatgccaagtggagccaggcagccccaatggcagaagggggtggccagaaccaccacgaggtagttaagttcatggacgtctatcagcggagctactgccacccaatcgaaaccttggtggatattttccaggagtatcctgacgagatagaatacatctttaaaccctcatgtgtcccgctcatgcgctgtggaggctgttgtaatgacgagggccttgagtgcgttcccactgaagaatctaatataaccatgcagatcatgagaattaaaccccaccaaggccagcacattggggagatgagcttcttacagcataacaaatgcgaatgtaggcccaaaaaggaccgtgctcggcaggagaaatgtgacaagccacggcggtag

SEQ ID NO: 28911 - DNA, 984 bp, Artificial Sequence
  derived and/or modified sequence
ctgacagaccggcagacagacacagcccccagccccagctaccacctgctgcccggcagaagaagaacagtggatgctgctgccagccggggccagggccctgagcccgcccctgggggcggcgtggagggcgtgggcgcccggggcgtggccctgaagctgtttgtgcagctgctgggctgcagcagatttggaggagctgtggtgcgggccggggaggccgagcccagcggggccgcccggagcgccagcagcggccgggaggagccccagcctgaggagggggaggaggaggaggagaaggaggaggagcggggcccccagtggaggctgggcgccaggaagccaggctcctggacaggagaggccgctgtgtgtgccgacagcgccccagctgcccgggccccccaggccctggcccgggccagcggccggggcggccgggtggccaggagaggagctgaggagagcggccccccccacagccccagcagaagaggcagcgccagccgggccggccctggccgggccagcgagaccatgaacttcctgctgtcctgggtgcactggagcctggccctgctgctgtacctgcaccacgccaagtggagccaggccgcccccatggccgagggcggcggccagaaccaccacgaggtggtgaagttcatggatgtgtaccagaggagctactgccaccccatcgagaccctggtggacatcttccaggagtacccagatgaaattgagtacatcttcaagcccagctgtgtgcccctgatgagatgtggcggctgctgcaatgatgagggcctggagtgtgtgcccacagaggagagcaacatcaccatgcagatcatgaggatcaagccccaccagggccagcacatcggggagatgtccttcctgcagcacaacaagtgtgaatgtcggcccaagaaggaccgggcccggcaggagaagtgtgacaagcccaggaggtag

SEQ ID NO: 28912 - DNA, 984 bp, Artificial Sequence
  derived and/or modified sequence
ctgaccgaccggcagaccgacaccgcccccagccccagctaccacctgctgcctgggaggagaagaacggtcgatgctgcggcgtcccgggggcaaggaccggagcctgctcctggcggtggagtggagggtgttggagccaggggtgtggcactcaagctattcgttcaactgcttgggtgtagccggttcggcggagccgttgttagggctggagaggctgagccctccggcgctgcaaggagtgcctcttctggcagagaggagccgcagcctgaagagggagaggaggaagaggaaaaggaagaagaacgcgggcctcaatggcgactgggggcaaggaagccggggtcgtggactggagaggcagccgtctgcgcagactcggctccagctgcccgtgcgccccaggcactcgcccgtgcgagtggcaggggaggccgagtcgctcgccggggtgccgaagaatccgggccgccccacagcccttcacggcgcggtagtgcgagccgtgctgggccaggacgagcatcagagaccatgaactttctgctctcttgggttcactggtcccttgcgctcttactctacctgcatcacgctaagtggtctcaggctgcacccatggccgaggggggcggtcagaatcaccatgaggtggttaagttcatggacgtctaccaacgcagttactgtcatccaattgagaccttggtcgacattttccaggagtaccccgacgagatagaatacatcttcaaacccagttgcgtccctctgatgcggtgcggggggtgctgcaatgatgaaggactggagtgtgtgccgaccgaagaatcaaatattaccatgcaaattatgcgtatcaagccccaccagggacagcatattggtgagatgagcttcctccagcataacaagtgtgagtgtcgtccgaagaaagatcgggcacggcaggagaaatgtgacaaaccccggcggtag

SEQ ID NO: 28913 - DNA, 984 bp, Artificial Sequence
  derived and/or modified sequence
ctgaccgacagacaaaccgatacagccccaagtccttcctatcacctgctgcccggaagaaggcgaaccgtggacgccgctgcgtccaggggacagggacccgagcccgcacccggaggaggggtagagggcgtcggcgctagaggcgtggccttgaaattgtttgtgcagctcctcggatgcagtaggttcggcggtgccgtggtacgcgctggagaggccgaaccgagcggtgctgcccgaagcgccagcagcgggagagaggaaccacagcctgaggagggtgaagaggaagaagagaaagaggaggaaaggggcccacaatggaggctgggggcacggaaacctgggtcatggacaggcgaagccgctgtgtgcgccgactcggccccagctgcccgtgctccccaagccctagcacgagctagtgggcgaggtggcagagttgccaggaggggagccgaggagtctgggcctccccactcaccatctcgacggggaagcgcatctagagccggtcccggacgggcatcagaaacaatgaacttcctcctctcttgggtgcactggagcctggcacttctgttatatctgcaccacgcaaaatggtcccaggctgccccaatggctgaggggggaggtcagaatcatcatgaagtagtcaaattcatggacgtgtaccagcggtcctattgtcatccgatcgagaccctggtcgacatttttcaggaatacccagatgaaattgaatacattttcaaaccaagctgcgttcctctgatgcgctgcgggggttgctgcaacgatgagggtctggaatgtgtgccaacggaagagtcaaacatcactatgcaaatcatgcgcattaagccacatcagggacagcacatcggagagatgtcttttttgcagcacaacaaatgcgaatgccgccctaaaaaggacagggcccgacaggaaaagtgcgacaaaccccgacgttag

SEQ ID NO: 28914 - DNA, 984 bp, Artificial Sequence
  derived and/or modified sequence
ctcacagaccgccaaacagatacagcaccctcaccgtcctatcacctgctaccgggtcgtagacgcacagtagatgcagcagccagtagggggcaggggcccgagcccgctcctggtggaggtgtggaaggtgtgggcgctaggggcgttgccctgaagctattcgtgcagcttcttggctgctcacgatttgggggagccgtagtgcgcgcaggcgaggccgagccctccggggccgcccggtcagcttcaagcggacgggaagaaccacagcctgaggagggtgaggaggaggaagaaaaagaggaggagagaggcccccaatggaggctaggcgcccggaaacctggatcgtggaccggtgaagctgctgtatgcgcagattctgctcctgctgcccgggcgccccaagcgcttgctagagctagcggaagaggaggcagggtcgcccggagaggggccgaggaaagcggtccacctcactcaccctctcgtcgtgggtctgcaagccgtgctggaccaggtcgtgcgagtgaaaccatgaatttcctgctgagctgggtgcattggtctctcgctttgttgctgtatctccatcatgccaagtggtctcaagcggctcccatggctgaggggggcggccagaaccaccacgaagttgtgaagtttatggatgtttatcaaagaagttactgccatcccatagagaccctcgtcgacatctttcaggagtatccagatgagatagaatacatttttaagcccagttgcgtgcccttgatgagatgcggcggttgttgtaacgacgaaggattggaatgcgttcctacagaagagagcaatattactatgcaaattatgcggatcaagccacaccaaggccaacatataggggagatgtcattcctccaacacaacaaatgtgaatgtcggccaaaaaaagacagagcgcgtcaagagaaatgtgacaagccccgaaggtag

SEQ ID NO: 28915 - DNA, 984 bp, Artificial Sequence
  derived and/or modified sequence
ctgacggatcggcagaccgacacagctccatcacctagttaccatttactgccaggtagacggcgcacagtggacgcggcagcgtcaaggggacaaggaccagaaccagctccgggaggcggggtagaaggtgtgggcgctcgtggcgtggctctgaaactgttcgtgcaactgttaggttgttcacgttttggtggcgccgtcgtcagagcaggcgaggccgaaccaagtggtgccgcccgttccgcttcaagcggtcgcgaggaaccacaaccagaagagggcgaagaggaggaggagaaagaggaggagagaggcccccaatggaggctaggcgcccggaaacctggatcgtggaccggtgaagctgctgtatgcgcagattctgctcctgctgcccgggcgccccaagcgcttgctagagctagcggaagaggaggcagggtcgcccggagaggggccgaggaaagcggtccacctcactcaccctctcgtcgtgggtctgcaagccgtgctggaccaggtcgtgcgagtgaaaccatgaatttcctgctgagctgggtgcattggtctctcgctttgttgctgtatctccatcatgcgaaatggagccaagcagcccccatggccgagggcggcggccagaatcaccatgaagttgttaaatttatggacgtataccagcgatcttattgtcaccccattgaaaccctcgtggacatcttccaagaatatcctgatgaaatcgaatatatatttaaaccatcttgtgtgccactaatgagatgcggggggtgttgtaatgacgagggcctggaatgcgttcccactgaagaaagcaatattaccatgcaaataatgagaattaaaccacaccagggtcagcatatcggcgaaatgtccttcctccagcataataaatgcgagtgccgcccaaaaaaggaccgggcccgacaagagaaatgtgataaaccaagacgatag

SEQ ID NO: 28916 - DNA, 2909 bp, Artificial Sequence
  derived and/or modified sequence
ctgacggacagacagacagacaccgcccccagccccagctaccacctcctccccggccggcggcggacagtggacgcggcggcgagccgcgggcaggggccggagcccgcgcccggaggcggggtggagggggtcggggctcgcggcgtcgcactgaaacttttcgtccaacttctgggctgttctcgcttcggaggagccgtggtccgcgcgggggaagccgagccgagcggagccgcgagaagtgctagctcgggccgggaggagccgcagccggaggagggggaggaggaagaagagaaggaagaggagagggggccgcagtggcgactcggcgctcggaagccgggctcatggacgggtgaggcggcggtgtgcgcagacagtgctccagccgcgcgcgctccccaggccctggcccgggcctcgggccggggaggaagagtagctcgccgaggcgccgaggagagcgggccgccccacagcccgagccggagagggagcgcgagccgcgccggccccggtcgggcctccgaaaccatgaactttctgctgtcttgggtgcattggagccttgccttgctgctctacctccaccatgccaagtggtcccaggctgcacccatggcagaaggaggagggcagaatcatcacgaagtggtgaagttcatggatgtctatcagcgcagctactgccatccaatcgagaccctggtggacatcttccaggagtaccctgatgagatcgagtacatcttcaagccatcctgtgtgcccctgatgcgatgcgggggctgctgcaatgacgagggcctggagtgtgtgcccactgaggagtccaacatcaccatgcagattatgcggatcaaacctcaccaaggccagcacataggagagatgagcttcctacagcacaacaaatgtgaatgcagaccaaagaaagatagagcaagacaagaaaaatgtgacaagccgaggcggtgagccgggcaggaggaaggagcctccctcagggtttcgggaaccagatctctcaccaggaaagactgatacagaacgatcgatacagaaaccacgctgccgccaccacaccatcaccatcgacagaacagtccttaatccagaaacctgaaatgaaggaagaggagactctgcgcagagcactttgggtccggagggcgagactccggcggaagcattcccgggcgggtgacccagcacggtccctcttggaattggattcgccattttatttttcttgctgctaaatcaccgagcccggaagattagagagttttatttctgggattcctgtagacacacccacccacatacatacatttatatatatatatattatatatatataaaaataaatatctctattttatatatataaaatatatatattctttttttaaattaacagtgctaatgttattggtgtcttcactggatgtatttgactgctgtggacttgagttgggaggggaatgttcccactcagatcctgacagggaagaggaggagatgagagactctggcatgatcttttttttgtcccacttggtggggccagggtcctctcccctgcccaggaatgtgcaaggccagggcatgggggcaaatatgacccagttttgggaacaccgacaaacccagccctggcgctgagcctctctaccccaggtcagacggacagaaagacagatcacaggtacagggatgaggacaccggctctgaccaggagtttggggagcttcaggacattgctgtgctttggggattccctccacatgctgcacgcgcatctcgcccccaggggcactgcctggaagattcaggagcctgggcggccttcgcttactctcacctgcttctgagttgcccaggagaccactggcagatgtcccggcgaagagaagagacacattgttggaagaagcagcccatgacagctccccttcctgggactcgccctcatcctcttcctgctccccttcctggggtgcagcctaaaaggacctatgtcctcacaccattgaaaccactagttctgtccccccaggagacctggttgtgtgtgtgtgagtggttgaccttcctccatcccctggtccttcccttcccttcccgaggcacagagagacagggcaggatccacgtgcccattgtggaggcagagaaaagagaaagtgttttatatacggtacttatttaatatccctttttaattagaaattaaaacagttaatttaattaaagagtagggttttttttcagtattcttggttaatatttaatttcaactatttatgagatgtatcttttgctctctcttgctctcttatttgtaccggtttttgtatataaaattcatgtttccaatctctctctccctgatcggtgacagtcactagcttatcttgaacagatatttaattttgctaacactcagctctgccctccccgatcccctggctccccagcacacattcctttgaaataaggtttcaatatacatctacatactatatatatatttggcaacttgtatttgtgtgtatatatatatatatatgtttatgtatatatgtgattctgataaaatagacattgctattctgttttttatatgtaaaaacaaaacaagaaaaaatagagaattctacatactaaatctctctccttttttaattttaatatttgttatcatttatttattggtgctactgtttatccgtaataattgtggggaaaagatattaacatcacgtctttgtctctagtgcagtttttcgagatattccgtagtacatatttatttttaaacaacgacaaagaaatacagatatatcttaaaaaaaaaaaagcattttgtattaaagaatttaattctgatctcaaa

SEQ ID NO: 28917 - DNA, 2834 bp, Artificial Sequence
  derived and/or modified sequence
gcggcggcgagccgcgggcaggggccggagcccgcgcccggaggcggggtggagggggtcggggctcgcggcgtcgcactgaaacttttcgtccaacttctgggctgttctcgcttcggaggagccgtggtccgcgcgggggaagccgagccgagcggagccgcgagaagtgctagctcgggccgggaggagccgcagccggaggagggggaggaggaagaagagaaggaagaggagagggggccgcagtggcgactcggcgctcggaagccgggctcatggacgggtgaggcggcggtgtgcgcagacagtgctccagccgcgcgcgctccccaggccctggcccgggcctcgggccggggaggaagagtagctcgccgaggcgccgaggagagcgggccgccccacagcccgagccggagagggagcgcgagccgcgccggccccggtcgggcctccgaaaccatgaactttctgctgtcttgggtgcattggagccttgccttgctgctctacctccaccatgccaagtggtcccaggctgcacccatggcagaaggaggagggcagaatcatcacgaagtggtgaagttcatggatgtctatcagcgcagctactgccatccaatcgagaccctggtggacatcttccaggagtaccctgatgagatcgagtacatcttcaagccatcctgtgtgcccctgatgcgatgcgggggctgctgcaatgacgagggcctggagtgtgtgcccactgaggagtccaacatcaccatgcagattatgcggatcaaacctcaccaaggccagcacataggagagatgagcttcctacagcacaacaaatgtgaatgcagaccaaagaaagatagagcaagacaagaaaaatgtgacaagccgaggcggtgagccgggcaggaggaaggagcctccctcagggtttcgggaaccagatctctcaccaggaaagactgatacagaacgatcgatacagaaaccacgctgccgccaccacaccatcaccatcgacagaacagtccttaatccagaaacctgaaatgaaggaagaggagactctgcgcagagcactttgggtccggagggcgagactccggcggaagcattcccgggcgggtgacccagcacggtccctcttggaattggattcgccattttatttttcttgctgctaaatcaccgagcccggaagattagagagttttatttctgggattcctgtagacacacccacccacatacatacatttatatatatatatattatatatatataaaaataaatatctctattttatatatataaaatatatatattctttttttaaattaacagtgctaatgttattggtgtcttcactggatgtatttgactgctgtggacttgagttgggaggggaatgttcccactcagatcctgacagggaagaggaggagatgagagactctggcatgatcttttttttgtcccacttggtggggccagggtcctctcccctgcccaggaatgtgcaaggccagggcatgggggcaaatatgacccagttttgggaacaccgacaaacccagccctggcgctgagcctctctaccccaggtcagacggacagaaagacagatcacaggtacagggatgaggacaccggctctgaccaggagtttggggagcttcaggacattgctgtgctttggggattccctccacatgctgcacgcgcatctcgcccccaggggcactgcctggaagattcaggagcctgggcggccttcgcttactctcacctgcttctgagttgcccaggagaccactggcagatgtcccggcgaagagaagagacacattgttggaagaagcagcccatgacagctccccttcctgggactcgccctcatcctcttcctgctccccttcctggggtgcagcctaaaaggacctatgtcctcacaccattgaaaccactagttctgtccccccaggagacctggttgtgtgtgtgtgagtggttgaccttcctccatcccctggtccttcccttcccttcccgaggcacagagagacagggcaggatccacgtgcccattgtggaggcagagaaaagagaaagtgttttatatacggtacttatttaatatccctttttaattagaaattaaaacagttaatttaattaaagagtagggttttttttcagtattcttggttaatatttaatttcaactatttatgagatgtatcttttgctctctcttgctctcttatttgtaccggtttttgtatataaaattcatgtttccaatctctctctccctgatcggtgacagtcactagcttatcttgaacagatatttaattttgctaacactcagctctgccctccccgatcccctggctccccagcacacattcctttgaaataaggtttcaatatacatctacatactatatatatatttggcaacttgtatttgtgtgtatatatatatatatatgtttatgtatatatgtgattctgataaaatagacattgctattctgttttttatatgtaaaaacaaaacaagaaaaaatagagaattctacatactaaatctctctccttttttaattttaatatttgttatcatttatttattggtgctactgtttatccgtaataattgtggggaaaagatattaacatcacgtctttgtctctagtgcagtttttcgagatattccgtagtacatatttatttttaaacaacgacaaagaaatacagatatatcttaaaaaaaaaaaagcattttgtattaaagaatttaattctgatctcaaa

SEQ ID NO: 28918 - RNA, 984 nt, Artificial Sequence
  derived and/or modified sequence
cucacagaccgccaaacagauacagcacccucaccguccuaucaccugcuaccgggucguagacgcacaguagaugcagcagccaguagggggcaggggcccgagcccgcuccugguggagguguggaaggugugggcgcuaggggcguugcccugaagcuauucgugcagcuucuuggcugcucacgauuugggggagccguagugcgcgcaggcgaggccgagcccuccggggccgcccggucagcuucaagcggacgggaagaaccacagccugaggagggugaggaggaggaagaaaaagaggaggagagaggcccccaauggaggcuaggcgcccggaaaccuggaucguggaccggugaagcugcuguaugcgcagauucugcuccugcugcccgggcgccccaagcgcuugcuagagcuagcggaagaggaggcagggucgcccggagaggggccgaggaaagcgguccaccucacucacccucucgucgugggucugcaagccgugcuggaccaggucgugcgagugaaaccaugaauuuccugcugagcugggugcauuggucucucgcuuuguugcuguaucuccaucaugccaaguggucucaagcggcucccauggcugaggggggcggccagaaccaccacgaaguugugaaguuuauggauguuuaucaaagaaguuacugccaucccauagagacccucgucgacaucuuucaggaguauccagaugagauagaauacauuuuuaagcccaguugcgugcccuugaugagaugcggcgguuguuguaacgacgaaggauuggaaugcguuccuacagaagagagcaauauuacuaugcaaauuaugcggaucaagccacaccaaggccaacauauaggggagaugucauuccuccaacacaacaaaugugaaugucggccaaaaaaagacagagcgcgucaagagaaaugugacaagccccgaagguag

SEQ ID NO: 28919 - RNA, 984 nt, Artificial Sequence
  derived and/or modified sequence
cugacggaucggcagaccgacacagcuccaucaccuaguuaccauuuacugccagguagacggcgcacaguggacgcggcagcgucaaggggacaaggaccagaaccagcuccgggaggcgggguagaaggugugggcgcucguggcguggcucugaaacuguucgugcaacuguuagguuguucacguuuugguggcgccgucgucagagcaggcgaggccgaaccaaguggugccgcccguuccgcuucaagcggucgcgaggaaccacaaccagaagagggcgaagaggaggaggagaaagaggaggagagaggcccccaauggaggcuaggcgcccggaaaccuggaucguggaccggugaagcugcuguaugcgcagauucugcuccugcugcccgggcgccccaagcgcuugcuagagcuagcggaagaggaggcagggucgcccggagaggggccgaggaaagcgguccaccucacucacccucucgucgugggucugcaagccgugcuggaccaggucgugcgagugaaaccaugaauuuccugcugagcugggugcauuggucucucgcuuuguugcuguaucuccaucaugcgaaauggagccaagcagcccccauggccgagggcggcggccagaaucaccaugaaguuguuaaauuuauggacguauaccagcgaucuuauugucaccccauugaaacccucguggacaucuuccaagaauauccugaugaaaucgaauauauauuuaaaccaucuugugugccacuaaugagaugcgggggguguuguaaugacgagggccuggaaugcguucccacugaagaaagcaauauuaccaugcaaauaaugagaauuaaaccacaccagggucagcauaucggcgaaauguccuuccuccagcauaauaaaugcgagugccgcccaaaaaaggaccgggcccgacaagagaaaugugauaaaccaagacgauag

SEQ ID NO: 28920 - protein, 111 aa, Artificial Sequence
  derived and/or modified sequence
MPRQFPKLNISEVDEQVRLLAEKVFAKVLREEDSKDALSLFTVPEDCPIGQKEAKERELQKELAEQKSVETAKRKKSFKMIRSQSLSLQMPPQQDWKGPPAASPAMSPTTP

SEQ ID NO: 28921 - DNA, 804 bp, Artificial Sequence
  derived and/or modified sequence
atgccaaggcaatttcctaaactgaacatatcagaagttgacgaacaggtgcggcttttggctgagaaggttttcgctaaagtgttacgcgaggaggacagcaaggacgcactctctctctttaccgttcccgaggactgcccgattggacaaaaagaggcgaaggagcgggaactgcagaaagagctcgccgaacagaaatccgtggagacagcaaaacgcaaaaagtcctttaaaatgatccgctctcagtccctctctctgcagatgcccccacaacaggactggaaaggtccgccagccgcctcccccgccatgtcccccacaacccctgtggtgaccggagccaccagcttacccacgcctgcaccctatgctatgcctgaatttcaaagggtaactattagcggcgactattgtgctggtatcaccttggaagactacgagcaagcagcaaagtccctcgcaaaagcgttgatgatcagggaaaaatacgctagactcgcctatcacagattccctcgtattacttcgcagtacttaggtcacccacgtgccgacaccgcccctcctgaggaaggcctcccagatttccaccctcctccccttccgcaggaggatccgtactgtttagacgacgcaccacccaacttggattatttagtgcacatgcagggtggcatactcttcgtatacgataacaagaagatgcttgagcatcaggagcctcattcattgccctaccccgatctcgaaacgtatacagtcgacatgtcccatattctggcattgatcacggattag

SEQ ID NO: 28922 - DNA, 336 bp, Artificial Sequence
  derived and/or modified sequence
atgcctagacagtttccaaaattaaacatatccgaagtggacgaacaggttcggctgctggccgagaaggtgttcgccaaagtcttacgcgaggaggattcaaaggacgccctgagcctgtttaccgtccctgaggactgccccattggccaaaaagaggccaaagaacgggaactgcaaaaggaactggctgaacagaaatccgtcgagactgctaagagaaaaaaatctttcaaaatgatacgaagccaatcactgtctctgcagatgcccccacagcaggactggaagggtccgccggccgcaagccccgctatgtctccaactacaccttag

SEQ ID NO: 28923 - DNA, 804 bp, Artificial Sequence
  derived and/or modified sequence
atgccccggcagttccccaagctgaacatcagcgaggtggatgagcaggtgcggctgctggccgagaaggtgtttgccaaggtgctgcgggaggaggacagcaaggatgccctgagcctcttcaccgtgcctgaggactgccccatcggccagaaggaggccaaggagcgggagctgcagaaggagctggccgagcagaagtctgtggagacagccaagaggaagaagagcttcaagatgatccgcagccagagcctgagcctgcagatgccaccccagcaggactggaagggccccccagctgccagccctgccatgagccccaccacccctgtggtgactggagccaccagcctgcccaccccagccccctatgccatgcctgagttccagagggtgaccatcagcggggactactgtgccggcatcaccctggaggactatgagcaggccgccaagagcctggccaaggccctgatgatccgggagaagtatgcccggctggcctaccaccgcttcccccgcatcaccagccagtacctgggccaccccagggctgacacagcccctcctgaggagggcctgcctgacttccaccccccacccctgccccaggaggacccctactgcctggatgatgccccacccaacctggactacctggtgcacatgcagggcggcatcctgtttgtgtatgacaacaagaagatgctggagcaccaggagccccacagcctgccctacccagacctggagacctacacagtggacatgagccacatcctggccctgatcacagactag

SEQ ID NO: 28924 - DNA, 336 bp, Artificial Sequence
  derived and/or modified sequence
atgccccggcagttccccaagctgaacatcagcgaggtggatgagcaggtgcggctgctggccgagaaggtgtttgccaaggtgctgcgggaggaggacagcaaggatgccctgagcctcttcaccgtgcctgaggactgccccatcggccagaaggaggccaaggagcgggagctgcagaaggagctggccgagcagaagtctgtggagacagccaagaggaagaagagcttcaagatgatccgcagccagagcctgagcctgcagatgccaccccagcaggactggaagggccccccagctgccagccctgccatgagccccaccaccccctag

SEQ ID NO: 28925 - DNA, 804 bp, Artificial Sequence
  derived and/or modified sequence
atgccccggcagttccccaagctgaacatcagcgaggtggacgagcaggttcggctgttggctgaaaaggtcttcgccaaagtccttagagaagaagatagcaaagacgctctgtcactgtttaccgtgcccgaggattgtcctatcggccagaaagaggcgaaggaaagggaactccagaaggagctcgctgaacagaaatccgtcgaaacggcaaagcggaagaagtctttcaaaatgatcaggtctcagagcctgagtctgcagatgcccccgcagcaggactggaaaggtccaccagccgcgagtccggccatgagcccaacaacgcctgtcgtaactggagccactagcctgccgacgcctgcgccctacgccatgcccgaattccagcgagtgaccatttccggggactattgcgccggcatcacactggaggactatgagcaagccgcgaaaagcctcgccaaggcgctcatgataagggagaagtatgcaaggctggcctatcataggttccctcggataacctcccagtacctcggacatccaagggcggataccgccccacccgaggaggggctgccagactttcacccaccacctttacctcaggaggatccttactgcctggatgatgctccgcccaacctggattacctggtgcacatgcagggcgggattctcttcgtatacgataacaagaagatgctggagcaccaagaacctcactcccttccataccccgacctggaaacatacactgttgacatgtcacatattctggcgcttatcactgactag

SEQ ID NO: 28926 - DNA, 336 bp, Artificial Sequence
  derived and/or modified sequence
atgccccggcagttccccaagctgaacatcagcgaggtggacgagcaggtgagactgttagctgaaaaggtcttcgctaaggtactgcgcgaggaggacagtaaggatgcactgtcactgttcactgttccggaagattgtccgatcgggcagaaagaggccaaagagagggaactacaaaaagagcttgctgaacagaaatccgttgagactgctaaaaggaagaagtcattcaaaatgattcgatcacagtcattatctctgcaaatgcctccacaacaggattggaagggcccccccgctgcttccccggctatgtcacctactaccccatag

SEQ ID NO: 28927 - DNA, 804 bp, Artificial Sequence
  derived and/or modified sequence
atgccaagacagtttcccaagctcaatatcagcgaggtcgatgagcaagttcggcttcttgcggaaaaagtgtttgcgaaggtgctgcgtgaggaagattccaaggatgcacttagcttgttcacggtgcctgaggattgtcccatcggacagaaagaggccaaagaacgcgaactgcagaaggaactagcagagcagaaaagtgtggagacagccaaacgtaaaaaaagcttcaaaatgatcagatcacagtctctatctctgcagatgcctcctcagcaggattggaagggcccacctgcggcttctcctgcgatgtcccctaccacgcccgtggtcacaggtgcaacaagcctgcctaccccggctccatatgctatgccagaattccaaagagtaaccatttctggggactactgtgccggaatcacattagaggattatgagcaagccgcaaagagtttagccaaggcccttatgatccgcgagaaatatgccagactggcgtaccaccggtttccgaggattacttcacaatacctggggcacccaagggccgatactgcaccccctgaagagggtcttcccgactttcacccaccaccactccctcaggaggatccatattgtttagatgatgccccaccaaacctggattatctcgtgcacatgcagggaggaattctgtttgtgtatgataataaaaaaatgctagaacatcaggaacctcattcgctgccttatccagacctagagacatataccgtcgatatgtcacacattttggctctcatcacagactag

SEQ ID NO: 28928 - DNA, 336 bp, Artificial Sequence
  derived and/or modified sequence
atgccaaggcaattccctaagttaaatatttccgaggtggatgaacaagtccgccttctcgctgaaaaagtgttcgctaaggtgctgagggaggaggactccaaggatgcactatccctgtttactgtgcccgaagattgcccgataggacagaaggaggctaaggagcgtgagttacagaaagagctggccgagcagaaatccgtggagaccgctaagcggaaaaaaagtttcaagatgattagaagccagagtctttcgctgcagatgccaccacagcaagactggaaagggccacctgccgcatcccccgctatgagccctaccaccccatag

SEQ ID NO: 28929 - DNA, 804 bp, Artificial Sequence
  derived and/or modified sequence
atgcccagacagttccccaagctgaacatcagcgaggtggacgagcaggtgagactgctggccgagaaggtgttcgccaaggtgctgagagaggaggacagcaaggacgccctgagcctgttcaccgtgcccgaggactgccccatcggccagaaggaggccaaggagagagagctgcagaaggagctggccgagcagaagagcgtggagaccgccaagagaaagaagagcttcaagatgatcagaagccagagcctgagcctgcagatgcccccccagcaggactggaagggcccccccgccgccagccccgccatgagccccaccacccccgtggtgaccggcgccaccagcctgcccacccccgccccctacgccatgcccgagttccagagagtgaccatcagcggcgactactgcgccggcatcaccctggaggactacgagcaggccgccaagagcctggccaaggccctgatgatcagagagaagtacgccagactggcctaccacagattccccagaatcaccagccagtacctgggccaccccagagccgacaccgccccccccgaggagggcctgcccgacttccaccccccccccctgccccaggaggacccctactgcctggacgacgccccccccaacctggactacctggtgcacatgcagggcggcatcctgttcgtgtacgacaacaagaagatgctggagcaccaggagccccacagcctgccctaccccgacctggagacctacaccgtggacatgagccacatcctggccctgatcaccgactag

SEQ ID NO: 28930 - DNA, 336 bp, Artificial Sequence
  derived and/or modified sequence
atgcccagacagttccccaagctgaacatcagcgaggtggacgagcaggtgagactgctggccgagaaggtgttcgccaaggtgctgagagaggaggacagcaaggacgccctgagcctgttcaccgtgcccgaggactgccccatcggccagaaggaggccaaggagagagagctgcagaaggagctggccgagcagaagagcgtggagaccgccaagagaaagaagagcttcaagatgatcagaagccagagcctgagcctgcagatgcccccccagcaggactggaagggcccccccgccgccagccccgccatgagccccaccaccccctag

SEQ ID NO: 28931 - protein, 774 aa, Artificial Sequence
  derived and/or modified sequence
MEPGSAEMPRQFPKLNISEVDEQVRLLAEKVFAKVLREEDSKDALSLFTVPEDCPIGQKEAKERELQKELAEQKSVETAKRKKSFKMIRSQSLSLQMPPQQDWKGPPAASPAMSPTTPVVTGATSLPTPAPYAMPEFQRVTISGDYCAGITLEDYEQAAKSLAKALMIREKYARLAYHRFPRITSQYLGHPRADTAPPEEGLPDFHPPPLPQEDPYCLDDAPPNLDYLVHMQGGILFVYDNKKMLEHQEPHSLPYPDLETYTVDMSHILALITDGPTKTYCHRRLNFLESKFSLHEMLNEMSEFKELKSNPHRDFYNVRKVDTHIHAAACMNQKHLLRFIKHTYQTEPDRTVAEKRGRKITLRQVFDGLHMDPYDLTVDSLDVHAGRQTFHRFDKFNSKYNPVGASELRDLYLKTENYLGGEYFARMVKEVARELEESKYQYSEPRLSIYGRSPEEWPNLAYWFIQHKVYSPNMRWIIQVPRIYDIFRSKKLLPNFGKMLENIFLPLFKATINPQDHRELHLFLKYVTGFDSVDDESKHSDHMFSDKSPNPDVWTSEQNPPYSYYLYYMYANIMVLNNLRRERGLSTFLFRPHCGEAGSITHLVSAFLTADNISHGLLLKKSPVLQYLYYLAQIPIAMSPLSNNSLFLEYSKNPLREFLHKGLHVSLSTDDPMQFHYTKEALMEEYAIAAQVWKLSTCDLCEIARNSVLQSGLSHQEKQKFLGQNYYKEGPEGNDIRKTNVAQIRMAFRYETLCNELSFLSDAMKSEEITALTN

SEQ ID NO: 28932 - DNA, 2304 bp, Artificial Sequence
  derived and/or modified sequence
atgcccaggcagtttcctaagctcaacatcagcgaggtcgacgagcaagtgcgccttctggcggaaaaggtcttcgccaaagtcttaagagaggaagattccaaggacgctttaagcttgttcacagtgcctgaagactgccccatagggcaaaaggaggccaaagagagagagcttcagaaagaactcgcggagcagaagtcggttgagaccgcaaagcggaaaaagagctttaaaatgattcgctcccagtctctgtcgctgcagatgccaccacagcaagactggaagggccccccggctgcctcaccggcaatgtctcctactacacccgtggtgactggcgccaccagtctgcccacgcctgccccttatgcaatgcccgagtttcagcgggtcactatctcgggcgactactgcgctggtatcacgctggaggattatgagcaggctgcgaagagcctcgcgaaggcattgatgattcgggaaaagtatgctcggctggcttaccacagattcccacgtattacctctcagtatctcggccacccacgcgccgacaccgcgccacctgaggaaggactccctgattttcacccccctccgctaccacaggaagacccgtattgcctggacgatgccccaccaaacctggattaccttgtgcacatgcaggggggtatacttttcgtatacgataataagaaaatgcttgaacatcaagagcctcacagcttgccctatcctgatctcgaaacgtataccgtagacatgtctcatattttagcactaatcaccgacggtcccacaaaaacctactgccaccggaggctgaacttcctggaaagtaagttttccctccatgaaatgttaaatgagatgtccgagtttaaggagctcaaaagtaatccccacagagatttttacaatgtccggaaggtggatacgcacatccatgccgctgcctgcatgaaccaaaaacacctgttaagattcataaaacatacttaccagactgaaccagaccggaccgtcgctgagaaacgtggcaggaagattacgctacgacaggtatttgatggcttacatatggacccctacgacctgacagtggacagtttagatgtccacgcaggcaggcagacttttcaccgctttgacaagttcaattccaagtataatccagtgggtgcttctgagctccgggacctgtacctcaagacagagaactatctcggaggagaatatttcgccaggatggtgaaggaggtggccagggagctggaagagtctaaataccaatatagcgaacctcgcctgtctatctacggcagatcacccgaagagtggccaaacctggcatattggtttatccaacacaaggtgtactcccctaacatgcgatggataatccaagtgccccgaatctacgatatttttcggagtaagaaattgctgcccaactttgggaaaatgctggagaatattttcctgcccctgttcaaagcgacgatcaatcctcaagatcaccgcgaactccatctttttctgaagtacgtgaccgggtttgatagcgtagatgacgagtcaaaacactctgatcatatgttctccgacaaatccccgaatcccgacgtctggacaagcgaacagaatccgccatactcttattacttgtactacatgtacgccaacataatggtgctcaataacctgagaagggaacgcggcctctctacgttcttgtttagacctcactgcggagaagctggctctattacacaccttgtgtctgcctttcttacagctgacaatatctcacacggcttacttctcaagaagagtccagtcctccaatacttatattaccttgctcagatccctatcgccatgagccctctgtcaaataactcgctgttcctggaatatagtaaaaaccccctacgtgagttccttcataagggattacacgtgtctctatctacagacgaccctatgcaattccactacacaaaggaggccctgatggaagaatatgccatagccgcacaggtgtggaagttgtccacatgcgatctttgcgagatagctagaaactcggtacttcagtctggactcagccaccaggaaaaacagaaatttcttgggcaaaattattataaggaggggccggagggcaacgatatcaggaaaacaaatgttgctcagatcagaatggcatttcgttacgaaactctgtgcaatgaattgtcatttctgtctgatgctatgaagagcgaggagatcactgcactgaccaactag

SEQ ID NO: 28933 - DNA, 1827 bp, Artificial Sequence
  derived and/or modified sequence
atgattcgggagaaatatgccaggctagcataccacagatttcctcggatcacatcacagtacctggggcatccccgggccgataccgcaccacctgaagagggcctgcctgacttccaccccccgcccctcccacaggaagatccctattgtctcgacgacgctccccctaaccttgattacttggtccacatgcaagggggtatcttgtttgtctatgacaacaagaagatgctagagcatcaagaaccccatagtctaccttatcctgatcttgaaacatacaccgtggatatgtctcatatcctggctcttatcactgacggacccaccaaaacctattgccatcgacggctcaacttcctcgagtcaaagtttagcctgcacgaaatgctgaatgaaatgtctgaatttaaagaactcaagagtaatcctcatagagatttttacaacgtcagaaaggtggacacacacatccacgccgccgcatgtatgaaccagaagcacctgctcagatttatcaaacatacatatcaaaccgaaccagaccggacggtcgctgagaaaagagggcgaaaaatcaccctgcgacaggtcttcgacgggctgcacatggatccttatgacctcaccgttgatagcctggacgtgcacgcaggtcggcagacattccatcggtttgataagttcaatagcaagtacaaccctgtaggagccagtgagctcagagatctgtacctgaaaactgaaaactacctgggcggtgaatactttgctcgcatggtgaaggaggtcgccagggagctagaagaaagcaaataccagtactcagagcctcgtctctctatttacggcagatctcctgaggagtggcctaatctcgcctactggttcattcaacacaaggtttactcgcccaacatgcggtggatcatccaggtgccacggatttatgatattttccgctcaaaaaagctgcttcctaatttcgggaagatgttagagaacatcttcctgccgctgtttaaagctacaatcaatccacaggaccatcgagagttgcacctgttcctgaaatacgtgacaggctttgatagcgttgatgatgagtccaagcacagcgaccatatgttctcagacaagagtcctaacccagacgtatggacctccgaacaaaaccctccctattcctactatctctattacatgtacgccaacattatggtgctgaacaacttgagacgtgagagaggcctcagcaccttcttgttccgtcctcattgcggagaggccggctctattacccacttggtcagcgcattcttgaccgcagacaacatttcccacggtctgctccttaaaaagtccccagtgctccaatacctatactacctcgcacagatcccaatagcgatgtctcctctgtctaacaattccttattcctggagtacagcaagaacccactgcgcgagtttctgcacaaaggtctgcacgtgtccctttccaccgatgaccctatgcagtttcactatacgaaagaggcactcatggaggagtacgctatcgccgctcaggtgtggaagcttagcacctgtgacctgtgtgagatagctagaaattcagtcctgcagtccggcctgagtcaccaggagaaacagaagttcctcggacagaactattataaagaaggcccagaaggaaacgatataaggaaaacaaacgtcgcacagatacgtatggcgtttagatacgagaccctatgtaatgagctgtcgtttctttccgatgctatgaagtccgaagagattactgctcttacgaattag

SEQ ID NO: 28934 - DNA, 2325 bp, Artificial Sequence
  derived and/or modified sequence
atggagcccggctccgcagagatgccccggcagttcccgaagttaaacatttctgaagtagacgaacaggtccgacttttagctgagaaagtgttcgccaaagtgcttagggaggaggatagcaaggatgccctctcactgttcactgtgcctgaagattgtcctatcggccaaaaggaggccaaggagagagaactgcaaaaggagttggctgagcagaagagcgtggagaccgctaagcgaaagaagtcttttaaaatgatcagaagccagagcttgtctcttcaaatgcctccgcaacaggactggaaaggcccccctgctgcctcaccggctatgtctcctacgacacccgtcgtgaccggtgccacatccctgccaactcctgccccttatgcgatgcctgagttccaacgcgtaacaatttcaggagattactgtgctggtatcactctcgaggactacgagcaggcagccaagtcactggcaaaagccctgatgattcgagagaagtacgcccgactggcttaccacaggttccccaggatcacttctcaatatttgggccatccacgagccgatacagcaccgcccgaagaggggctacccgattttcatccgcctcctttgcctcaggaggatccctactgccttgacgatgcccctccaaacctcgactacctggtgcacatgcaaggggggattctgttcgtttatgataataaaaaaatgctggagcaccaagaacctcacagcctgccataccctgacctggaaacctatacagtagatatgtctcacattctggcactgatcaccgacggcccaaccaagacatattgtcaccgccggctcaattttttagaatctaagttttccctgcacgagatgctgaatgagatgagcgagttcaaggagctgaagagtaacccgcaccgggacttttacaatgtccggaaagtggatacgcacatccacgccgccgcctgcatgaatcagaagcacttgctgcgcttcatcaaacatacttaccagactgaacccgacaggactgtcgcagagaagagagggaggaagatcactcttagacaggtgtttgacggcttacacatggatccatatgacctgactgtggacagtttggacgtccacgccggccgccaaactttccacagatttgacaaatttaatagtaaatataaccccgtgggcgcctccgaactaagagatttatatctgaaaaccgagaactacctgggcggcgaatattttgctcgaatggtgaaggaggttgcaagagaattggaagagtcaaagtaccagtacagcgaaccgaggctgtcaatttatggtaggagtcccgaagagtggccaaatctggcgtactggtttatccaacacaaggtgtatagccccaatatgcgatggatcatccaggttccgcgaatctacgatattttccggtcaaagaaactccttcctaattttggtaagatgcttgagaacatcttcctgcctttgtttaaggcgaccattaaccctcaggaccatcgggaactccacttgtttctgaagtacgtcacgggctttgactctgttgacgacgaaagcaaacatagcgaccacatgttcagtgacaagtcccctaacccagacgtgtggacctcagaacaaaatcctccctattcatactacttatactacatgtatgccaacattatggttctgaacaacctgaggagggaacggggtctgagcacgttcttgttccgccctcactgcggcgaggccgggtctattacacaccttgtgagcgctttcctgacagctgacaacataagtcacgggctgctgctaaagaagagtcccgtgctgcagtatctgtactatctggctcagatcccaatagcaatgtctccactctcaaacaatagcctgtttttagagtacagtaagaatcctcttagggaatttttgcataaaggtctccacgtgagcttgtccacagatgaccccatgcagttccactataccaaagaagcacttatggaggaatacgctatcgctgcccaggtgtggaagttgtcgacctgtgatctgtgtgagattgcccgaaactccgtgctgcaatctggtctttcccatcaagagaagcagaaattcctgggtcaaaattactataaggaggggccagaaggcaatgacatcaggaaaaccaatgtggcccaaatccgcatggcattccggtacgaaactttatgtaatgaactctccttccttagtgacgctatgaagagtgaagagatcacagctttaaccaattag

SEQ ID NO: 28935 - DNA, 2304 bp, Artificial Sequence
  derived and/or modified sequence
atgcccaggcagtttcctaagctgaatatctcagaggtggatgagcaagttagattgctggctgaaaaggtatttgctaaagtgctgcgggaagaagacagtaaagatgccctatctctgtttacggtaccagaggattgccctatcggccagaaggaagctaaagagagggagctgcaaaaggagttagcagaacaaaaatcagtagagacagccaaaaggaaaaagagcttcaagatgatccgctcacagtccctgtcgctgcagatgcctccacagcaagactggaagggcccccctgccgcctcacccgccatgagccctacaaccccagttgttacaggggccacatccttgcccactcctgccccctacgcgatgcccgaattccaacgcgttaccataagcggggattattgtgcaggcataactttggaagattacgaacaagccgccaaaagtttagcaaaggccttgatgatcagagaaaagtacgccaggctggcctaccaccgttttcctagaattacctcacagtacctcggtcacccccgcgctgacaccgcgccccctgaggagggcctcccagacttccacccgccacccctaccgcaagaggacccatactgtctggacgacgctcctcctaatctggattacctggtccatatgcagggaggaatcctcttcgtgtacgacaataaaaagatgctcgaacaccaggaacctcacagcttgccttacccagatctggagacatatactgtggacatgtcccatatcctggcactgatcaccgatggccccacaaagacctactgtcaccgccgcctgaactttctggagtccaagttttctctgcacgagatgctcaatgaaatgtctgagtttaaggaattaaaatccaatcctcacagggatttctacaacgtgagaaaagtcgacacacacatccatgccgccgcctgcatgaaccagaagcacctcttgcgttttattaaacatacttatcagacagagcccgaccgaacagtagccgagaagagaggccggaagatcactctgcgccaagtctttgatggcctgcatatggacccctacgacctgactgtggatagcctcgacgtccatgctggtcgtcaaacatttcacaggtttgataaattcaacagtaagtacaaccctgtgggggccagcgagctcagggacctctatctaaaaactgagaactatctcgggggagaatatttcgcccggatggttaaggaggtcgccagagaactggaagagagtaagtaccagtacagcgagccacgcttatccatttatggaagaagcccggaagagtggcctaatctggcctattggtttatccagcataaggtttactcacccaatatgagatggatcattcaagtgccacgaatatacgatatttttcgcagtaagaaactcttgcccaattttggaaaaatgttagagaacatctttttgcccctctttaaggccaccataaatcctcaggatcaccgggaactccacttatttttgaagtatgtgaccgggttcgactctgtggacgatgaatctaagcactctgaccatatgttcagcgacaagtccccaaatccagatgtttggactagcgagcagaacccaccgtactcgtattacctgtactatatgtacgccaacattatggtcttgaacaacttaaggagggagcgcggcctgtcaacttttttgttcagacctcattgcggagaggctggctccatcactcacctagtaagcgcctttcttactgctgataatatttctcatggcttgctcctcaaaaaaagccccgtgctgcagtacttatattacctagcccagattccgattgccatgtctccactctcgaataactcactgtttttggagtattcgaagaacccgctgagagaattcctgcacaaaggtctacatgtgagcctgagtacagacgatcccatgcagttccactacactaaagaggcactcatggaggagtatgcgatcgcggcacaggtctggaagctgtcaacctgtgacctgtgtgaaattgctcggaactccgtgctgcaatctggactttcccaccaggaaaaacaaaaatttctcgggcagaattattacaaagagggacctgaagggaatgatatccggaaaactaacgtcgcccagatacgtatggcatttcgttatgagaccctctgcaatgagttgtctttcctttcagacgctatgaagtcagaggagatcacagctctgacgaactag

SEQ ID NO: 28936 - DNA, 3680 bp, Artificial Sequence
  derived and/or modified sequence
tcaaccctgcttggttttagaggattgctcctgtgggtcacttgaggcaggctccaccttccccaggaggagtggcagagtccagccagcgctcggagctggaggcccacgtgggagcagtgagcggctctgagatgccgcggcagtttcccaagctgaacatctctgaagtggatgagcaagtccggctcctggcggagaaggtgtttgctaaagtgctccgagaagaggacagcaaagatgccctgtccctgttcactgtcccagaggactgccccatcgggcaaaaggaagccaaggagagggagctgcagaaggagctggcagagcagaagtctgtggagaccgcaaaaagaaagaaaagtttcaagatgattcggtcccagtccctgtctctgcaaatgccgccacagcaagattggaagggccccccggcagccagtccggccatgtctcccacaacccctgtggtcactggagccacttccctgcccacgccagcaccctatgccatgcctgagttccagcgggtcaccatcagcggagattactgtgccgggatcactttggaggactatgagcaggcagccaagagtctggccaaggccctaatgatccgggagaagtatgcgcggctcgcctaccaccgcttcccgcggatcacatcccagtacctgggtcatccgcgggcggatactgcacctccggaagagggccttccagacttccaccctcctccactgccccaggaagacccctactgcctggatgatgcaccccccaacctggattacttggtccacatgcaggggggcatcctctttgtgtatgataacaagaagatgctggagcaccaggagccgcacagcctaccctaccccgacctggagacctacacggtggacatgagccacatcctggctctcatcaccgatggccccacgaaaacctattgtcaccggcgactgaactttctggaatccaagttcagccttcatgagatgttaaacgaaatgtccgagttcaaagagttgaagagtaacccccaccgggacttctataacgtgagaaaggtggacacacacatccatgcggccgcctgcatgaaccaaaagcatctgctgcgcttcatcaagcacacataccagacggagcctgacaggactgtggcagagaagcggggccggaagatcaccctgcggcaggtgtttgacggcctgcacatggacccctacgacctcactgtggactcactggatgtccacgcgggccggcagacattccaccgctttgacaagttcaactccaaatacaaccctgtgggggccagtgagctgcgtgacctgtatttgaaaactgaaaactatctgggaggagagtactttgctcggatggtcaaggaggttgcccgggagctggaggagagcaagtaccagtactcagagccacggctctccatctacggccgcagtcctgaggagtggcccaacctggcctactggttcatccagcacaaggtctactctcccaacatgcgctggatcatccaggtgccccggatttatgacatatttaggtcaaagaagctgctgccaaactttgggaagatgctggagaacatcttcctgccccttttcaaggccactatcaacccccaagatcatcgagagcttcacctcttccttaaatatgtgacggggtttgacagcgtggatgatgagtccaagcacagcgaccacatgttttccgacaagagcccaaacccggacgtctggaccagtgagcagaacccaccctacagctactacctgtactacatgtatgccaacatcatggtgctcaacaacctccgcagggagcgcggcctgagcacgttcctgttccggccgcactgtggggaagccggctccatcacccacctggtgtctgccttcctcactgctgacaacatttcccacgggctgctcctcaagaagagtccggtattgcagtatctctactaccttgctcagatccccattgccatgtctcctcttagcaacaacagtttgttcctcgaatattccaagaaccctctgagggaattcctacacaagggactgcatgtttctctttccaccgatgaccccatgcagttccactacacgaaggaagcacttatggaagaatatgccattgcagctcaagtgtggaagctgagcacctgcgacctgtgtgagatcgccaggaacagcgtgctgcagagcggcctctcgcatcaggaaaagcaaaagtttctgggacaaaattattataaagaaggacctgaaggaaatgatattcgaaagacaaatgtggctcagatccggatggcattccgatatgagaccttatgcaatgagctcagcttcctgtctgatgctatgaaatcagaagagatcaccgccttgaccaactaggtccagcatttgacatgcattttaactttttggttcaatttcaagtctgctgtggctaatagtggtcaagattccgaactaggactttcctctgtgaagaggatgcctctgaagaaattttaaactggtgattttggttgcactgctcactttaagagttaacatgctcacttgttagtatttctgagtaacaagatggtgacttctccttggggatctgggagctgagcacttgtctatacttgttcctaattttccaagtatttctcttgaaactgccagtgcctgaactgttggggccaggattttccctggtcagatgccaagtaacatgtggttttctgccatacttttctccattggcccaggtaggctaattggtagttgttcatttcagcctctggatggctggctgccttaaacacaatcaatttcaaagctccatttcataaaggggctactttgaaggagttaagatggaagacttccttcttgacaaattgtgtttttagtgaatttcttaaaccgttttatttagccctccttccctctttctagttggaagccaaatgtactcatgaaaacagccactcctattctgagtcttggtttcttcacctagaaagtgagggtttggactagatgagtggctttcagggtgttctgtgaatctcctcatgaatactttagggtaggggagggaagggagtgagtgatgctcaggggctgtcaaagtgactgcgttcatcagttttacactggggctgctacataatattttcatttgaacgaagaacttcaaaaagcacaggactagatgatctctgttccttttggctctaatatgctacaactgtaggccaattatcactttaccaattaagagttaggccagataagtgaaatttaacttaagggcacacagctaataagtaataggcctaaactggatttccttattccaaatcctgtcttttccccactattccattagaccccacaaatgttagttgtgtgtgtgtgtgtgtgtgtttttaatcactgtaaccggatgcatttttttaaggcaaaatttctcccttatctactatgatgacttcagaagatacaatggtcccaggggccaagtagaaagcatttttaaagattaatctgaattaagctttatcagtgtactctttatctgtgttactagtgcctggtatgtagtaggtgctcaataaatgcatattgaataactaa

SEQ ID NO: 28937 - DNA, 3994 bp, Artificial Sequence
  derived and/or modified sequence
gtggacggttggcgagggagtgtgtgtgtgtgtgtgtgtgtgtgtgtgtgtgtgtatccaagtgaccagaaggacgcctggaagaaaccaatgcttgcgggttgctgcaactacagggagcaagtcacctgtgcggggccgagacccccagagtctcgcgctgggaaaagttgtgcggggaggggaggacgtcggctgagatgccgcggcagtttcccaagctgaacatctctgaagtggatgagcaagtccggctcctggcggagaaggtgtttgctaaagtgctccgagaagaggacagcaaagatgccctgtccctgttcactgtcccagaggactgccccatcgggcaaaaggaagccaaggagagggagctgcagaaggagctggcagagcagaagtctgtggagaccgcaaaaagatcactttggaggactatgagcaggcagccaagagtctggccaaggccctaatgatccgggagaagtatgcgcggctcgcctaccaccgcttcccgcggatcacatcccagtacctgggtcatccgcgggcggatactgcacctccggaagagggccttccagacttccaccctcctccactgccccaggaagacccctactgcctggatgatgcaccccccaacctggattacttggtccacatgcaggggggcatcctctttgtgtatgataacaagaagatgctggagcaccaggagccgcacagcctaccctaccccgacctggagacctacacggtggacatgagccacatcctggctctcatcaccgatggccccacgaaaacctattgtcaccggcgactgaactttctggaatccaagttcagccttcatgagatgttaaacgaaatgtccgagttcaaagagttgaagagtaacccccaccgggacttctataacgtgagaaaggtggacacacacatccatgcggccgcctgcatgaaccaaaagcatctgctgcgcttcatcaagcacacataccagacggagcctgacaggactgtggcagagaagcggggccggaagatcaccctgcggcaggtgtttgacggcctgcacatggacccctacgacctcactgtggactcactggatgtccacgcgggccggcagacattccaccgctttgacaagttcaactccaaatacaaccctgtgggggccagtgagctgcgtgacctgtatttgaaaactgaaaactatctgggaggagagtactttgctcggatggtcaaggaggttgcccgggagctggaggagagcaagtaccagtactcagagccacggctctccatctacggccgcagtcctgaggagtggcccaacctggcctactggttcatccagcacaaggtctactctcccaacatgcgctggatcatccaggtgccccggatttatgacatatttaggtcaaagaagctgctgccaaactttgggaagatgctggagaacatcttcctgccccttttcaaggccactatcaacccccaagatcatcgagagcttcacctcttccttaaatatgtgacggggtttgacagcgtggatgatgagtccaagcacagcgaccacatgttttccgacaagagcccaaacccggacgtctggaccagtgagcagaacccaccctacagctactacctgtactacatgtatgccaacatcatggtgctcaacaacctccgcagggagcgcggcctgagcacgttcctgttccggccgcactgtggggaagccggctccatcacccacctggtgtctgccttcctcactgctgacaacatttcccacgggctgctcctcaagaagagtccggtattgcagtatctctactaccttgctcagatccccattgccatgtctcctcttagcaacaacagtttgttcctcgaatattccaagaaccctctgagggaattcctacacaagggactgcatgtttctctttccaccgatgaccccatgcagttccactacacgaaggaagcacttatggaagaatatgccattgcagctcaagtgtggaagctgagcacctgcgacctgtgtgagatcgccaggaacagcgtgctgcagagcggcctctcgcatcaggaaaagcaaaagtttctgggacaaaattattataaagaaggacctgaaggaaatgatattcgaaagacaaatgtggctcagatccggatggcattccgatatgagaccttatgcaatgagctcagcttcctgtctgatgctatgaaatcagaagagatcaccgccttgaccaactaggtccagcatttgacatgcattttaactttttggttcaatttcaagtctgctgtggctaatagtggtcaagattccgaactaggactttcctctgtgaagaggatgcctctgaagaaattttaaactggtgattttggttgcactgctcactttaagagttaacatgctcacttgttagtatttctgagtaacaagatggtgacttctccttggggatctgggagctgagcacttgtctatacttgttcctaattttccaagtatttctcttgaaactgccagtgcctgaactgttggggccaggattttccctggtcagatgccaagtaacatgtggttttctgccatacttttctccattggcccaggtaggctaattggtagttgttcatttcagcctctggatggctggctgccttaaacacaatcaatttcaaagctccatttcataaaggggctactttgaaggagttaagatggaagacttccttcttgacaaattgtgtttttagtgaatttcttaaaccgttttatttagccctccttccctctttctagttggaagccaaatgtactcatgaaaacagccactcctattctgagtcttggtttcttcacctagaaagtgagggtttggactagatgagtggctttcagggtgttctgtgaatctcctcatgaatactttagggtaggggagggaagggagtgagtgatgctcaggggctgtcaaagtgactgcgttcatcagttttacactggggctgctacataatattttcatttgaacgaagaacttcaaaaagcacaggactagatgatctctgttccttttggctctaatatgctacaactgtaggccaattatcactttaccaattaagagttaggccagataagtgaaatttaacttaagggcacacagctaataagtaataggcctaaactggatttccttattccaaatcctgtcttttccccactattccattagaccccacaaatgttagttgtgtgtgtgtgtgtgtgtgtttttaatcactgtaaccggatgcatttttttaaggcaaaatttctcccttatctactatgatgacttcagaagatacaatggtcccaggggccaagtagaaagcatttttaaagattaatctgaattaagctttatcagtgtactctttatctgtgttactagtgcctggtatgtagtaggtgctcaataaatgcatattgaataactaagtgaatttcttttggcaactttttaaggacatgtgctcttagtacttaagaggctgctcaaggaccttcctatctatttctgtggtcaaattcagactacaggaggtctttttgaatcattatagttagaagaagaatccagtttctgcctgtgaacttatttgactttagattgtctcatcttgtgactttataatgcctgtcccctccactggtcaattcagcatatggaagtataaatgcagtctttttactaggcagatatatatgctatcttacagctaattatgaaattgaatgaaaatccattgttatcttagggattagttttgaaaagcccccgtttatatacatttgccctaacataggaagtattgtgtagtttctcattgtcattttatctgtatcaagtatctttttttaaattgttaaataaagtcagctaggactgtg

SEQ ID NO: 28938 - DNA, 980 bp, Artificial Sequence
  derived and/or modified sequence
gttggcggcgcggcccgggcgcttcaggtagcctctcggctctctctgctccgctccgcgcccagaggattgctcctgtgggtcacttgaggcaggctccaccttccccaggaggagtggcagagtccagccagcgctcggagctggaggcccacgtgggagcagtgagcggctctgagatgccgcggcagtttcccaagctgaacatctctgaagtggatgagcaagtccggctcctggcggagaaggtgtttgctaaagtgctccgagaagaggacagcaaagatgccctgtccctgttcactgtcccagaggactgccccatcgggcaaaaggaagccaaggagagggagctgcagaaggagctggcagagcagaagtctgtggagaccgcaaaaagaaagaaaagtttcaagatgattcggtcccagtccctgtctctgcaaatgccgccacagcaagattggaagggccccccggcagccagtccggccatgtctcccacaacccctgtggtcactggagccacttccctgcccacgccagcaccctatgccatgcctgagttccagcgggtcaccatcagcggagattactgtgccgggatcactttggaggactatgagcaggcagccaagagtctggccaaggccctaatgatccgggagaagtatgcgcggctcgcctaccaccgcttcccgcggatcacatcccagtacctgggtcatccgcgggcggatactgcacctccggaagagggccttccagacttccaccctcctccactgccccaggaagacccctactgcctggatgatgcaccccccaacctggattacttggtccacatgcaggggggcatcctctttgtgtatgataacaagaagatgctggagcaccaggagccgcacagcctaccctaccccgacctggagacctacacggtggacatgagccacatcctggctctcatcaccgat

SEQ ID NO: 28939 - DNA, 2753 bp, Artificial Sequence
  derived and/or modified sequence
attcacgagagaatttccagcccaggcttttcctgctctggctcactgctgctcacagatatgcaaaacagagacctcctactccagccggcagacaggacccagccagctgcacgcacgcactgactcagctgagcctcctgggtggcaggcagcacctcacccgggtgcatcacttgagtggcatcttcaggaccagtcatggagccaggctcagctgagatgccgcggcagtttcccaagctgaacatctctgaagtggatgagcaagtccggctcctggcggagaaggtgtttgctaaagtgctccgagaagaggacagcaaagatgccctgtccctgttcactgtcccagaggactgccccatcgggcaaaaggaagccaaggagagggagctgcagaaggagctggcagagcagaagtctgtggagaccgcaaaaagaaagaaaagtttcaagatgattcggtcccagtccctgtctctgcaaatgccgccacagcaagattggaagggccccccggcagccagtccggccatgtctcccacaacccctgtggtcactggagccacttccctgcccacgccagcaccctatgccatgcctgagttccagcgggtcaccatcagcggagattactgtgccgggatcactttggaggactatgagcaggcagccaagagtctggccaaggccctaatgatccgggagaagtatgcgcggctcgcctaccaccgcttcccgcggatcacatcccagtacctgggtcatccgcgggcggatactgcacctccggaagagggccttccagacttccaccctcctccactgccccaggaagacccctactgcctggatgatgcaccccccaacctggattacttggtccacatgcaggggggcatcctctttgtgtatgataacaagaagatgctggagcaccaggagccgcacagcctaccctaccccgacctggagacctacacggtggacatgagccacatcctggctctcatcaccgatggccccacgaaaacctattgtcaccggcgactgaactttctggaatccaagttcagccttcatgagatgttaaacgaaatgtccgagttcaaagagttgaagagtaacccccaccgggacttctataacgtgagaaaggtggacacacacatccatgcggccgcctgcatgaaccaaaagcatctgctgcgcttcatcaagcacacataccagacggagcctgacaggactgtggcagagaagcggggccggaagatcaccctgcggcaggtgtttgacggcctgcacatggacccctacgacctcactgtggactcactggatgtccacgcgggccggcagacattccaccgctttgacaagttcaactccaaatacaaccctgtgggggccagtgagctgcgtgacctgtatttgaaaactgaaaactatctgggaggagagtactttgctcggatggtcaaggaggttgcccgggagctggaggagagcaagtaccagtactcagagccacggctctccatctacggccgcagtcctgaggagtggcccaacctggcctactggttcatccagcacaaggtctactctcccaacatgcgctggatcatccaggtgccccggatttatgacatatttaggtcaaagaagctgctgccaaactttgggaagatgctggagaacatcttcctgccccttttcaaggccactatcaacccccaagatcatcgagagcttcacctcttccttaaatatgtgacggggtttgacagcgtggatgatgagtccaagcacagcgaccacatgttttccgacaagagcccaaacccggacgtctggaccagtgagcagaacccaccctacagctactacctgtactacatgtatgccaacatcatggtgctcaacaacctccgcagggagcgcggcctgagcacgttcctgttccggccgcactgtggggaagccggctccatcacccacctggtgtctgccttcctcactgctgacaacatttcccacgggctgctcctcaagaagagtccggtattgcagtatctctactaccttgctcagatccccattgccatgtctcctcttagcaacaacagtttgttcctcgaatattccaagaaccctctgagggaattcctacacaagggactgcatgtttctctttccaccgatgaccccatgcagttccactacacgaaggaagcacttatggaagaatatgccattgcagctcaagtgtggaagctgagcacctgcgacctgtgtgagatcgccaggaacagcgtgctgcagagcggcctctcgcatcaggaaaagcaaaagtttctgggacaaaattattataaagaaggacctgaaggaaatgatattcgaaagacaaatgtggctcagatccggatggcattccgatatgagaccttatgcaatgagctcagcttcctgtctgatgctatgaaatcagaagagatcaccgccttgaccaactaggtccagcatttgacatgcattttaactttttggttcaatttcaagtctgctgtggctaatagtggtcaagattccgaactaggactttcctctgtgaagaggatgcctctgaagaaattttaaactggtgattttggttgcactgctcactttaagagttaacatgctcacttgttagtatttctgagtaacaagatggtgacttctccttggggatctgggagctg

SEQ ID NO: 28940 - DNA, 576 bp, Artificial Sequence
  derived and/or modified sequence
cacagagaggaggacatcagcatggagagactgcagatcagtcccagcaaacctgtggaggccagttaaatgcctggagctcatcccctgccattcaaacggggtcttgctctgttgcctggctggagtgcagtggtgctaacatgactcactgcacccttgacctcctggactcaagtgatcctcccacctcagcctcccaagtagctgggactccaagtgggtgccactacagccactgagatgccgcggcagtttcccaagctgaacatctctgaagtggatgagcaagtccggctcctggcggagaaggtgtttgctaaagtgctccgagaagaggacagcaaagatgccctgtccctgttcactgtcccagaggactgccccatcgggcaaaaggaagccaaggagagggagctgcagaaggagctggcagagcagaagtctgtggagaccgcaaaaagaaagaaaagtttcaagatgattcggtcccagtccctgtctctgcaaatgccgccacagcaagattggaagggccccccggcagccagtccggccatgtctcccacaacccct

SEQ ID NO: 28941 - DNA, 2304 bp, Artificial Sequence
  derived and/or modified sequence
atgccccggcagttccccaagctgaacatcagcgaggtggatgagcaggtgcggctgctggccgagaaggtgtttgccaaggtgctgcgggaggaggacagcaaggatgccctgagcctcttcaccgtgcctgaggactgccccatcggccagaaggaggccaaggagcgggagctgcagaaggagctggccgagcagaagtctgtggagacagccaagaggaagaagagcttcaagatgatccgcagccagagcctgagcctgcagatgccaccccagcaggactggaagggccccccagctgccagccctgccatgagccccaccacccctgtggtgactggagccaccagcctgcccaccccagccccctatgccatgcctgagttccagagggtgaccatcagcggggactactgtgccggcatcaccctggaggactatgagcaggccgccaagagcctggccaaggccctgatgatccgggagaagtatgcccggctggcctaccaccgcttcccccgcatcaccagccagtacctgggccaccccagggctgacacagcccctcctgaggagggcctgcctgacttccaccccccacccctgccccaggaggacccctactgcctggatgatgccccacccaacctggactacctggtgcacatgcagggcggcatcctgtttgtgtatgacaacaagaagatgctggagcaccaggagccccacagcctgccctacccagacctggagacctacacagtggacatgagccacatcctggccctgatcacagatggccccaccaagacctactgccaccggcggctgaacttcctggagagcaagttcagcctgcacgagatgctgaatgagatgtctgagttcaaggagctgaagagcaacccccaccgggacttctacaacgtgaggaaggtggacacccacatccacgccgccgcctgcatgaaccagaagcacctgctgcgcttcatcaagcacacctaccagacagagccagacagaacagtggccgagaagaggggcaggaagatcaccctgcggcaggtgtttgatggcctgcacatggacccctatgacctgactgtggacagcctggatgtgcacgccggccggcagaccttccacagatttgacaagttcaacagcaagtacaaccctgtgggcgccagcgagctgcgggacctgtacctgaagacagagaactacctgggcggggagtactttgccaggatggtgaaggaggtggcccgggagctggaggagagcaagtaccagtacagcgagccccggctgagcatctacggccgcagccctgaggagtggcccaacctggcctactggttcatccagcacaaggtgtacagccccaacatgcgctggatcatccaggtgccccgcatctatgacatcttccgcagcaagaagctgctgcccaactttgggaagatgctggagaacatcttcctgcccctcttcaaggccaccatcaacccccaggaccaccgggagctgcacctgttcctgaagtatgtgactggatttgattctgtggatgatgagagcaagcacagcgaccacatgttcagtgacaagagccccaacccagatgtgtggaccagcgagcagaaccccccctacagctactacctgtactacatgtatgccaacatcatggtgctgaacaacctgcggcgggagcggggcctgagcaccttcctgttccggccccactgtggggaggccggcagcatcacccacctggtgtctgccttcctgacagctgacaacatcagccacggcctgctgctgaagaagagccctgtgctgcagtacctgtactacctggcccagatccccatcgccatgagccccctgagcaacaacagcctcttcctggagtacagcaagaaccccctgcgggagttcctgcacaagggcctgcacgtgtccctgagcacagatgaccccatgcagttccactacaccaaggaggccctgatggaggagtatgccatcgccgcccaggtgtggaagctgagcacctgtgacctgtgtgagatcgccaggaacagcgtgctgcagagcggcctgagccaccaggagaagcagaagttcctgggccagaactactacaaggagggccctgagggcaatgacatcaggaagaccaacgtggcccagatccgcatggccttccgctatgagaccctgtgcaatgagctgtccttcctgagtgatgccatgaagtctgaggagatcacagccctgaccaactag

SEQ ID NO: 28942 - DNA, 1827 bp, Artificial Sequence
  derived and/or modified sequence
atgatccgggagaagtatgcccggctggcctaccaccgcttcccccgcatcaccagccagtacctgggccaccccagggctgacacagcccctcctgaggagggcctgcctgacttccaccccccacccctgccccaggaggacccctactgcctggatgatgccccacccaacctggactacctggtgcacatgcagggcggcatcctgtttgtgtatgacaacaagaagatgctggagcaccaggagccccacagcctgccctacccagacctggagacctacacagtggacatgagccacatcctggccctgatcacagatggccccaccaagacctactgccaccggcggctgaacttcctggagagcaagttcagcctgcacgagatgctgaatgagatgtctgagttcaaggagctgaagagcaacccccaccgggacttctacaacgtgaggaaggtggacacccacatccatgctgctgcctgcatgaaccagaagcacctgctgcgcttcatcaagcacacctaccagacagagccagacagaacagtggccgagaagaggggcaggaagatcaccctgcggcaggtgtttgatggcctgcacatggacccctatgacctgactgtggacagcctggatgtgcatgctggccggcagaccttccacagatttgacaagttcaacagcaagtacaaccctgtgggcgccagcgagctgcgggacctgtacctgaagacagagaactacctgggcggggagtactttgccaggatggtgaaggaggtggcccgggagctggaggagagcaagtaccagtacagcgagccccggctgagcatctacggccgcagccctgaggagtggcccaacctggcctactggttcatccagcacaaggtgtacagccccaacatgcgctggatcatccaggtgccccgcatctatgacatcttccgcagcaagaagctgctgcccaactttgggaagatgctggagaacatcttcctgcccctcttcaaggccaccatcaacccccaggaccaccgggagctgcacctgttcctgaagtatgtgacaggctttgacagcgtggatgatgagagcaagcacagcgaccacatgttcagtgacaagagccccaacccagatgtgtggaccagcgagcagaaccccccctacagctactacctgtactacatgtatgccaacatcatggtgctgaacaacctgcggcgggagcggggcctgagcaccttcctgttccggccccactgtggggaggccggcagcatcacccacctggtgtctgccttcctgacagctgacaacatcagccacggcctgctgctgaagaagagccctgtgctgcagtacctgtactacctggcccagatccccatcgccatgagccccctgagcaacaacagcctcttcctggagtacagcaagaaccccctgcgggagttcctgcacaagggcctgcacgtgtccctgagcacagatgaccccatgcagttccactacaccaaggaggccctgatggaggagtatgccatcgccgcccaggtgtggaagctgagcacctgtgacctgtgtgaaattgccagaaattctgtgctgcagagcggcctgagccaccaggagaagcagaagttcctgggccagaactactacaaggagggccctgagggcaatgacatcaggaagaccaacgtggcccagatccgcatggccttccgctatgagaccctgtgcaatgagctgtccttcctgagtgatgccatgaagtctgaggagatcacagccctgaccaactag

SEQ ID NO: 28943 - DNA, 2325 bp, Artificial Sequence
  derived and/or modified sequence
atggagcccggcagcgctgagatgccccggcagttccccaagctgaacatcagcgaggtggatgagcaggtgcggctgctggccgagaaggtgtttgccaaggtgctgcgggaggaggacagcaaggatgccctgagcctcttcaccgtgcctgaggactgccccatcggccagaaggaggccaaggagcgggagctgcagaaggagctggccgagcagaagtctgtggagacagccaagaggaagaagagcttcaagatgatccgcagccagagcctgagcctgcagatgccaccccagcaggactggaagggccccccagctgccagccctgccatgagccccaccacccctgtggtgactggagccaccagcctgcccaccccagccccctatgccatgcctgagttccagagggtgaccatcagcggggactactgtgccggcatcaccctggaggactatgagcaggccgccaagagcctggccaaggccctgatgatccgggagaagtatgcccggctggcctaccaccgcttcccccgcatcaccagccagtacctgggccaccccagggctgacacagcccctcctgaggagggcctgcctgacttccaccccccacccctgccccaggaggacccctactgcctggatgatgccccacccaacctggactacctggtgcacatgcagggcggcatcctgtttgtgtatgacaacaagaagatgctggagcaccaggagccccacagcctgccctacccagacctggagacctacacagtggacatgagccacatcctggccctgatcacagatggccccaccaagacctactgccaccggcggctgaacttcctggagagcaagttcagcctgcacgagatgctgaatgagatgtctgagttcaaggagctgaagagcaacccccaccgggacttctacaacgtgaggaaggtggacacccacatccatgctgctgcctgcatgaaccagaagcacctgctgcgcttcatcaagcacacctaccagacagagccagacagaacagtggccgagaagaggggcaggaagatcaccctgcggcaggtgtttgatggcctgcacatggacccctatgacctgactgtggacagcctggatgtgcatgctggccggcagaccttccacagatttgacaagttcaacagcaagtacaaccctgtgggcgccagcgagctgcgggacctgtacctgaagacagagaactacctgggcggggagtactttgccaggatggtgaaggaggtggcccgggagctggaggagagcaagtaccagtacagcgagccccggctgagcatctacggccgcagccctgaggagtggcccaacctggcctactggttcatccagcacaaggtgtacagccccaacatgcgctggatcatccaggtgccccgcatctatgacatcttccgcagcaagaagctgctgcccaactttgggaagatgctggagaacatcttcctgcccctcttcaaggccaccatcaacccccaggaccaccgggagctgcacctgttcctgaagtatgtgacaggctttgacagcgtggatgatgagagcaagcacagcgaccacatgttcagtgacaagagccccaacccagatgtgtggaccagcgagcagaaccccccctacagctactacctgtactacatgtatgccaacatcatggtgctgaacaacctgcggcgggagcggggcctgagcaccttcctgttccggccccactgtggggaggccggcagcatcacccacctggtgtctgccttcctgacagctgacaacatcagccacggcctgctgctgaagaagagccctgtgctgcagtacctgtactacctggcccagatccccatcgccatgagccccctgagcaacaacagcctcttcctggagtacagcaagaaccccctgcgggagttcctgcacaagggcctgcacgtgtccctgagcacagatgaccccatgcagttccactacaccaaggaggccctgatggaggagtatgccatcgccgcccaggtgtggaagctgagcacctgtgacctgtgtgaaattgccagaaattctgtgctgcagagcggcctgagccaccaggagaagcagaagttcctgggccagaactactacaaggagggccctgagggcaatgacatcaggaagaccaacgtggcccagatccgcatggccttccgctatgagaccctgtgcaatgagctgtccttcctgagtgatgccatgaagtctgaggagatcacagccctgaccaactag

SEQ ID NO: 28944 - DNA, 2304 bp, Artificial Sequence
  derived and/or modified sequence
atgccccggcagttccccaagctgaacatcagcgaggtggacgagcaggtgcgcctgttggccgagaaggtgtttgcaaaggtgctacgcgaagaagactctaaggacgcccttagcctgtttaccgttccagaagactgccctatcggacagaaggaggccaaagaacgagagctgcagaaggaacttgcagagcagaagtccgtggagactgccaaacgcaaaaaatcatttaagatgattagaagtcagtccctgtcccttcagatgccacctcagcaggattggaaggggcccccggccgcctcgccagctatgtctcccaccacacccgtggtaaccggggcaacctcattaccaacacctgctccttatgcaatgcctgagttccagcgagtaaccatatccggcgactattgcgctggtatcacactcgaagactacgaacaggccgccaagagtctggccaaagcgctgatgatccgggagaagtacgccaggctagcatatcaccggttcccccgaatcacgtcacagtacctgggccatcccagggcagacacagcccccccagaagagggcttgcccgacttccacccgccacccctgccccaggaagacccatattgccttgatgatgccccccctaatttggattacctggtgcatatgcagggagggatcctctttgtgtacgacaacaaaaagatgctggaacaccaggagccccactctctcccctaccccgatctcgagacatacaccgttgacatgagccacatcctggctctgataaccgacgggcctacgaaaacatactgtcacagacgcctgaatttcctagaatcaaagttcagtctccacgagatgctgaacgaaatgtctgaatttaaggagctgaagtctaatccgcacagggacttttacaatgtccgaaaagtcgatactcatattcatgctgctgcttgcatgaaccagaaacatctccttaggtttattaagcacacctaccagacggagcccgatcgtaccgtcgctgaaaaaagaggcaggaaaatcacactgcgccaggtgttcgacggactccacatggacccttacgaccttacagttgacagcctggacgtgcacgccggccggcagacatttcaccggtttgacaaattcaattctaaatacaatccagttggagcctcggagctgcgcgatctgtatttgaagacggaaaactatctcggcggcgagtacttcgcgaggatggtgaaggaagtggctagggagctcgaagaaagtaagtaccagtacagcgagcccaggctgtcaatttatgggaggtccccagaggagtggccgaatctggcctactggttcatccaacataaagtgtattctcctaacatgcgttggataattcaagtgcctaggatttacgacattttcagaagtaaaaagctcctccccaattttggaaaaatgctcgagaacatttttctgcccctgttcaaggccacaatcaaccctcaggaccatcgagagttgcatctgtttttgaaatatgtgacgggatttgattccgtggatgatgagtccaagcactctgaccatatgttctccgacaagagtcctaacccagacgtgtggacgagcgagcaaaatccgccatattcctactatctgtattatatgtacgctaacatcatggtgttgaacaatctgagaagagagaggggcctatccactttcctttttcgccctcattgcggcgaggccgggtccataacacatctcgtcagcgcttttctcaccgccgacaatatttcacatggcctgctgctgaagaagagcccagtgctgcagtatctgtactacctggctcagatccccattgctatgtcccctttgtcaaacaacagcttgttcctggaatactccaaaaatcccttaagagagtttcttcataaaggcctgcacgtttctctgagtaccgacgaccccatgcagtttcactatacaaaagaggccctaatggaggaatacgccatcgcggctcaggtgtggaagttgagtacgtgtgacctgtgcgaaatagccaggaactctgtactgcagtcaggactgagccaccaggaaaaacagaagttcctgggccaaaactattacaaggagggccccgagggcaatgatatcaggaagacgaatgtggctcagattagaatggcctttagatatgagacgctgtgcaatgaactgagctttctttcagacgctatgaaatctgaagagataacagccctcacaaattag

SEQ ID NO: 28945 - DNA, 1827 bp, Artificial Sequence
  derived and/or modified sequence
atgatccgggagaagtacgcccggctggcctaccaccggttcccccgcattacaagccagtacctggggcatccgcgagcggataccgcaccacctgaagaaggcttgcctgattttcaccctccacccctgcctcaagaggacccatattgtctagacgacgcccccccaaacctggattaccttgtccacatgcagggtgggatcctctttgtctacgacaacaaaaagatgttggagcatcaggaaccacactccctgccctaccctgatctggaaacttacacagttgatatgagtcacatcctcgccctgattacggatggcccgacaaaaacttactgtcatcgccgtctaaacttccttgaatccaagtttagcttgcacgaaatgctgaatgaaatgtctgaattcaaagaactgaagtccaatccacaccgagatttctacaacgtgagaaaagtagatactcatatccacgccgccgcatgtatgaatcagaaacacctcctgcggttcataaaacacacctaccagactgagcccgatcggaccgttgcagaaaaacgggggagaaaaatcacactacgccaggttttcgatggactgcatatggacccttatgatctgactgtggactccctggatgtccatgcgggccgccagaccttccaccgctttgataagtttaatagcaaatacaaccccgtcggggccagcgagcttagagacttatatctgaagacagagaattatctgggcggcgaatactttgctcggatggttaaagaggtggccagggaactggaggaatctaagtaccagtattctgaaccacggctcagcatctacgggagaagtccagaggaatggcccaacctggcctactggtttatccagcacaaagtgtattccccaaacatgcggtggataatccaagtgccccggatctacgatatatttcggtccaagaaactgttacctaattttggcaagatgctggagaacatctttcttcccctcttcaaggcaacaattaatccccaagaccacagagaactccatctctttctcaagtacgtcacaggcttcgacagtgtggacgacgaatctaagcattccgaccacatgttcagcgataaaagccccaaccccgatgtgtggaccagcgagcaaaaccccccttactcttactatctttactatatgtacgcgaatatcatggtcctcaacaatttgcggagggaaagagggctcagtacgttcctgtttcgcccccactgcggagaggcaggaagcataacacatcttgtgtctgcctttcttacagccgacaatatcagtcacggactgcttctcaaaaagagcccagtgttgcagtacctttactacttagcccagattcccatcgctatgtcaccccttagtaacaatagcctgtttctggaatattctaaaaaccccctgagggagtttctccacaagggactgcacgtctctttgtccactgacgaccctatgcagttccattacacaaaagaagcgctgatggaggaatacgccattgctgcccaggtatggaagctgagcacgtgcgacctgtgtgagatcgctagaaatagcgtcttacagtccggcctgtcccaccaagagaaacagaaatttctaggtcagaattactacaaagagggaccagagggcaatgacatcagaaaaaccaacgtcgcccagatccggatggcattccggtacgaaactctgtgtaacgagctcagcttcctcagcgatgccatgaagagtgaggagattaccgccctaacaaattag

SEQ ID NO: 28946 - DNA, 2325 bp, Artificial Sequence
  derived and/or modified sequence
atggagcccggcagcgccgagatgccccggcagttccccaagctgaatataagcgaagtggacgaacaggtccggttattggcagaaaaggtgttcgcgaaggtactgagggaagaagatagtaaagacgcactgtccctgttcaccgtaccggaggattgccccataggacagaaagaggccaaagaaagggagcttcagaaggagctggccgaacagaaatctgtagaaactgcaaagagaaaaaagtctttcaagatgatccgatcccagtcactttccctgcagatgcccccccaacaggactggaagggccctccagctgccagcccagccatgtccccaaccacacccgtcgtgaccggcgccacctccctgcccactcccgcgccctacgccatgccggagttccagcgtgtgacaatttcaggtgactattgtgctggaattactctagaagactatgaacaggctgcaaagagcctggcaaaggcgttgatgatccgagagaagtacgcacggctggcttatcaccggtttccccgtataacgagccagtatctgggtcatccccgggctgatactgcaccccccgaagaagggctacctgactttcatccgccaccgctgcctcaggaagacccctattgtctggacgatgctccacccaacttagattatctagtccacatgcaggggggcatcctcttcgtttacgataataagaagatgcttgagcaccaggagccacattcactcccctatcccgatctagaaacgtatacagttgatatgtctcacatcttggctctcatcactgatggaccaacaaagacatattgccaccggagactcaacttcctcgaaagcaagtttagcttgcacgaaatgctgaacgagatgagcgagtttaaagaacttaagtctaacccacatagggacttctataatgtgcgcaaggtagacacacatattcatgccgcagcgtgcatgaatcagaaacacctgctcagatttatcaagcacacataccaaactgaacccgaccggacagtggcagagaagcgcggtcggaagatcactctgcgtcaggtgtttgacgggctgcatatggatccctacgacctgacagtcgacagtctcgatgttcatgccggtcgacagacctttcaccgattcgacaaatttaactctaagtataacccggtgggcgctagtgaactgcgggatctctacctaaaaacagagaattacctagggggcgagtacttcgctcgcatggtgaaagaagtggctcgggaactggaagaatctaagtaccagtacagcgaacccagattgtctatctacgggagatcccctgaggagtggccaaatctggcttattggtttatccagcataaggtctacagtcccaacatgagatggattattcaggttccaagaatttacgacatttttaggtctaagaagctgctccccaacttcggtaagatgcttgagaacattttcctccctttgttcaaagccactatcaaccctcaggatcacagagagttacatttatttttgaagtacgtgactggcttcgattcagttgacgacgagtccaaacattcggaccatatgttctctgataagagccctaaccctgatgtctggacatccgagcaaaacccgccctattcttattacctgtactacatgtatgctaacataatggtcttgaacaatctgcgccgcgaaagagggctcagcaccttcttattcaggccccactgtggagaggccggcagcataacccaccttgtgtccgctttcctgactgctgataatatatcccacggattgctcttgaagaagagcccagtcctgcagtatttatattatctggcccagatccccatagccatgtcccctctgtcaaacaacagcctgtttctggagtatagcaaaaatcctttgcgtgagttcctccataagggtctgcatgtctctttgagcaccgacgatcccatgcagttccattacactaaagaggctctaatggaggagtacgccatcgcagcgcaagtctggaaactgtctacttgcgacctctgcgaaattgcaaggaacagtgtgctccagtccggattgtcacaccaggagaagcaaaaatttctaggacagaattactataaagagggcccagagggcaacgatataagaaaaaccaacgttgcccaaattcgtatggcctttagatatgaaacgctttgcaacgagctgtccttcctgagcgacgctatgaagagcgaggagatcactgccctaaccaattag

SEQ ID NO: 28947 - DNA, 2304 bp, Artificial Sequence
  derived and/or modified sequence
atgccccggcagttccccaagctgaacatcagcgaggtggacgagcaggtacgacttctggcggagaaagtgtttgcaaaggttctgcgcgaggaggacagtaaagacgccctatcgctattcacagtccctgaggattgtcccatcggccagaaggaggcaaaggagcgagagctccagaaggagctggcagagcagaaatcagtggaaactgcaaaacgcaaaaaaagtttcaagatgatcaggtcgcagtctctctctctgcagatgcctcctcagcaggactggaagggcccccctgctgcgtctcccgccatgtcacccacaaccccggtcgtgaccggcgccacctctcttccaaccccagcaccttacgccatgcccgaatttcagagggtgactatcagtggagattactgcgcaggcatcaccctggaggactatgagcaagcggcaaaaagcctcgcaaaagccctcatgatcagagaaaagtatgccagactcgcgtatcaccgattcccaaggatcacaagccagtacttgggccatcctagggcagacactgccccacccgaagaagggctgccggattttcatcctccccctctgcctcaggaggacccgtactgcttggacgacgccccccctaacctcgactacttagtgcacatgcagggtggaatcttgttcgtatacgacaataagaaaatgctggagcaccaggaaccacactcgctcccttaccccgaccttgagacctacactgtagacatgtcgcacatccttgccttaatcaccgacggcccaaccaagacttactgccatcgaagactgaactttctagagtctaagttctccttacatgaaatgctcaacgagatgagtgaatttaaggagctaaagagcaaccctcatcgggatttttacaacgtgcggaaagtggatactcatatccacgccgcagcctgcatgaaccagaaacacctactacgcttcattaagcatacgtaccagaccgagccagatcgtaccgtggctgagaagagaggccgcaagataaccttgcgacaagtcttcgatggacttcacatggacccatacgatttgacagtggactcactcgacgtgcatgctggccgccagacatttcacaggttcgacaagttcaactccaagtacaaccccgtcggagcttctgaattgagggacctgtacttgaaaacagagaattatctggggggcgaatacttcgctcgcatggtcaaggaagtagctcgggaactcgaagagagtaaatatcaatatagcgagccacgcctgagcatttacgggcgatctcccgaggagtggccaaacttggcctactggttcattcagcacaaagtctactcgcccaacatgagatggataattcaggtgcctcgcatttacgatatatttcgctccaaaaaacttctgccaaatttcgggaagatgttggaaaacatcttcctgccactgtttaaggccaccatcaacccacaagatcatagggaactccacttatttctcaagtatgtcaccggattcgacagcgtcgacgacgaatctaagcattcagaccacatgttctcggacaagtctccaaatccagatgtctggacttccgagcagaatccgccatatagctactacttgtactacatgtacgcaaacattatggtgctgaataacttgcgtagagaacgtgggcttagtacattcctgttccgcccacactgcggtgaagctggcagtatcacgcatctggtgtccgcttttctgacagctgataacattagtcatggcctcttgctcaaaaagtctcctgtgctgcagtatctgtattacctcgcacagatcccaatcgctatgtcccccttgtcaaacaattctttgtttttggagtactccaagaatcctctgagggaattcctacacaaaggcttgcacgtttccttgtcaactgacgacccgatgcagtttcactacaccaaagaagcactaatggaggaatatgctatcgcagcccaggtctggaagctgagcacatgcgatctttgcgaaatcgctcgcaactcggtgctgcagtcgggcctctctcatcaggaaaagcagaaattccttggacaaaactattataaggaggggcccgaggggaacgatatccgaaagactaatgtggctcagatcagaatggccttccgctatgaaaccttgtgcaatgagctgagcttccttagtgacgccatgaagagtgaagaaattacagccctgaccaactag

SEQ ID NO: 28948 - DNA, 2304 bp, Artificial Sequence
  derived and/or modified sequence
atgcccaggcaatttcccaagctgaacatttccgaggtcgacgagcaggtccgactactggccgagaaagttttcgcgaaagtactccgcgaagaagattccaaggatgccttgagtttattcaccgtgccagaggactgtcctattggccagaaagaagcaaaggagagagagctccagaaggagttagcagagcagaagtcggttgagactgccaagcgaaagaagtccttcaagatgattcgatcgcagtcactgagtttgcagatgccaccccagcaggattggaagggacctcccgctgcgtccccagctatgtcaccaaccacccctgtggtgaccggtgctacaagccttcccactcccgcaccctacgccatgcctgaattccagcgagtgactatttcaggagactattgtgccggtatcaccctggaggactacgagcaagcggctaagtctctcgcgaaagcactgatgattagggagaagtatgctcgactggcttatcaccggttccccaggattacgtcccagtaccttggccacccacgagccgacaccgcccctcctgaagaaggacttccagatttccaccctccacctctaccccaggaagacccatactgcctggatgacgcccctccgaacctcgactaccttgtccatatgcagggcggaatcctcttcgtgtacgataacaaaaagatgctcgaacaccaggagccgcattctctgccttatcccgaccttgagacgtatacagtcgacatgtctcatattctagccctgatcaccgacggtcctacaaagacatattgccaccggaggttgaattttctggagagcaagttttcacttcatgaaatgctgaatgaaatgtctgaattcaaggaattgaagagcaatccacatagggatttttacaatgttagaaaagtcgatacacacatccatgccgcagcttgtatgaaccagaagcatcttcttcgatttatcaaacacacctatcagactgaacctgatcggactgttgccgagaaaaggggacgaaaaatcaccctgcggcaggtttttgacgggctgcatatggacccatatgatctcactgtcgattctctagacgtgcatgctggacgtcagaccttccaccggtttgacaaattcaacagtaagtataacccagttggcgcttccgagcttagagatctgtatttgaaaacagagaattacctgggtggtgagtacttcgccagaatggttaaggaagtcgccagggagctggaagagtctaagtaccagtacagtgagcctaggctctccatttatggacgatcgccagaggagtggcctaacttggcctattggtttatccagcataaagtgtacagtcctaatatgcggtggatcatccaggtacccagaatttatgatatctttcgaagcaagaaactattacctaacttcggaaagatgctggaaaatatattcctgccactgttcaaagctacaatcaacccccaagatcatcgggaattacatttgtttctcaagtacgtgacaggcttcgactcagtggatgatgagtctaaacactccgaccacatgtttagcgacaagtctcccaatcccgacgtctggacctccgagcagaacccaccttattcttactacctgtattacatgtatgctaatattatggtgctcaataatttaagacgcgaaagagggctatccacctttctgttccggcctcattgcggtgaggcaggaagcatcacacatttggtgagcgcattcctgaccgctgacaatatctctcacggcttactgttaaagaaaagcccggtccttcaatacctgtactacttagctcaaattcctatcgccatgtctccgttatcaaacaattccctgtttctcgaatacagcaagaatccgctgagggagttcttgcacaagggattgcatgtttctctttcaacagacgacccaatgcagttccactacacaaaagaggctcttatggaggagtatgctatagctgcccaagtttggaaactaagcacatgtgatctgtgtgaaattgcccgtaatagcgtcctgcaatctggcttgtcacatcaggaaaagcaaaaattccttggacagaactactataaagaaggtccagagggcaacgacatcagaaagactaacgtggcccagataaggatggccttccgatatgagacgctatgtaacgagctgtctttcctgtccgacgccatgaaatcagaagaaatcactgctctgacaaattag

SEQ ID NO: 28949 - DNA, 1827 bp, Artificial Sequence
  derived and/or modified sequence
atgataagagagaagtacgcacgcctggcataccatcggttcccccgaatcactagtcagtacctaggacacccacgcgcagacaccgcccctccagaagagggattgcctgattttcacccacctccactgccccaagaggacccctattgtctggacgatgctcctccaaatctcgactaccttgtgcacatgcagggaggcattctgtttgtctatgacaataagaaaatgctggagcatcaagaaccgcattctctcccatatcccgacttggagacatacacagtcgacatgtctcatattttggctctcatcactgatggcccaacaaagacctactgccatcgacggctgaatttcctcgagtctaaattctcccttcacgaaatgcttaacgaaatgagcgagttcaaagaattgaagagtaaccctcatcgggatttctataacgtgagaaaggtcgacactcacatccatgctgcagcttgcatgaatcagaagcacctcctaaggttcataaagcacacgtaccaaactgaacctgaccggaccgtggctgaaaagagaggacggaaaatcactctgcgtcaggtttttgatggcctccacatggacccctatgatctgactgtggattccctcgatgtgcacgcaggccgacaaacatttcatcgctttgacaaatttaactctaagtataatcccgtcggggcaagtgaactccgtgatctgtacttgaagaccgagaactaccttgggggagagtatttcgctcgaatggtgaaagaggtcgccagagaattggaggaaagtaagtatcagtactccgaaccacgactgagcatatacgggaggtctccggaagagtggcctaacctggcgtattggttcattcagcataaggtgtatagtcctaatatgcgttggatcatccaagtcccccgaatatacgacatttttcgtagcaagaaactactcccaaactttggaaaaatgctggagaatattttcctgcctttgttcaaagcgactatcaatccccaggaccatcgggaattacatctctttcttaagtacgtaactggctttgacagcgtcgatgatgagtcaaagcattccgaccacatgttttcagataaatccccgaacccggacgtgtggaccagcgaacaaaaccctccctattcgtattatctgtactacatgtacgccaacattatggtgctcaacaacctgaggcgggaaagaggtctgtctacctttttgttcagaccccactgcggcgaagcaggctccataacacatctggtgtccgcctttctcacagcagataacatttcccatggactgttgctgaagaagtcacctgttctccagtatctgtattatctcgcacagatacccattgccatgtcacctttgtctaataactctctttttctagaatattccaaaaacccacttagagaattcctccacaagggtctccatgttagcctctccaccgatgacccaatgcagtttcactacactaaagaggccttgatggaggagtacgccatcgcagcccaggtctggaaacttagcacttgtgacctatgcgagattgctagaaactccgtgctgcagtcaggattgagccaccaggagaaacagaagttcctggggcaaaactactacaaagaaggcccagagggcaatgacatccggaaaacaaatgttgctcagatccgcatggcgttccggtacgaaactctgtgcaatgagctgagctttctgagcgacgcgatgaaaagtgaagaaatcacagccctcaccaactag

SEQ ID NO: 28950 - DNA, 2325 bp, Artificial Sequence
  derived and/or modified sequence
atggaacctgggagcgcagagatgccaaggcagtttcctaagctgaatatttccgaggtggatgaacaagtgcgtctgctggcagagaaggtgttcgccaaagtgctccgggaggaggactcaaaggacgccttgtcgctgtttaccgtacccgaggattgccctataggccaaaaagaggcaaaagagcgggaactgcagaaggaacttgccgaacaaaagtccgtggagacagccaaacgaaagaaatcctttaagatgattcggtcccagtccctctctcttcagatgcctccacagcaggattggaaaggtccaccggcagcatctccagccatgagccctacaacccccgtggtcaccggtgctactagtctgccgacgccagcaccatacgccatgcctgagttccaacgggtgacaatctcgggggattattgtgcgggaatcaccctggaagattatgaacaggcagccaagtctctcgctaaagccctcatgatcagggaaaaatacgctcgactcgcctaccatcggtttccacgtattacttcgcagtacctcggccaccctagagctgataccgctccaccagaggaaggtttgccagatttccatccacctcccttgccccaggaggatccttactgtctggatgacgctccgcctaatttagactatctcgtgcatatgcagggaggcattctcttcgtttatgacaacaagaagatgcttgaacaccaggagccacactccctgccatacccagacctggagacctataccgtggacatgtctcatatactggctcttattacagacggccctactaaaacctactgtcatcgcaggctgaattttctggagtctaagttctcccttcacgaaatgttgaatgagatgtctgagttcaaggaactgaagtcaaacccgcacagagacttctataacgtccggaaagtggacacccatattcacgctgctgcctgtatgaatcagaagcacttactaaggtttatcaagcacacatatcagacagaacccgacagaaccgtagctgagaaacgagggcgtaaaatcacactgcggcaggtcttcgacggcctacacatggatccctatgatctgactgtggacagcctggacgtgcatgctgggagacaaacctttcacaggtttgataagtttaacagtaagtacaatccagttggtgccagcgagcttcgagacttatatctgaaaacggagaattacttaggcggtgaatacttcgcacgcatggtgaaggaggttgcaagggaattagaagaatcgaaataccagtattcagagcccagactgtccatctatggaaggtctcctgaagagtggcctaacctggcctattggttcatccagcacaaagtgtactccccaaatatgaggtggatcatccaggtgcccaggatctatgatatttttcgaagcaagaagttactaccaaatttcggaaaaatgctggagaacatttttttgccactgttcaaggcgaccatcaatccacaggatcacagggagctgcacttgttcttaaagtacgttaccggattcgacagcgtggacgatgaaagcaaacactcagaccacatgttcagtgacaaatcccctaaccccgacgtatggacatcagagcaaaacccgccttactcttactacttgtattatatgtacgccaacataatggtgctgaacaacctcaggagggagagaggcctgagtacgttcttgtttcgaccccattgtggagaagccggtagcataacccacttagttagcgcatttctgacagccgataatattagccacgggcttcttctgaagaaaagccctgtgctgcagtacttgtattacctggcccagatcccaattgcaatgagtcccttatcaaataactctcttttcctcgagtactccaagaaccctttgagggagtttctccacaaaggacttcacgtctcactgagtaccgatgatcccatgcagttccactataccaaagaagccctgatggaggagtatgccatcgcagctcaggtgtggaagctgagcacgtgcgatttatgcgagatcgccagaaatagcgtgttacaatctggcctgagtcatcaggagaaacaaaagtttctgggacagaattattacaaggagggacctgagggcaatgatattcgtaaaaccaatgttgctcagattagaatggcctttcgctacgagaccctgtgcaacgaactgtcttttctttcggacgccatgaagtctgaggagatcacagccttgaccaattag

SEQ ID NO: 28951 - DNA, 2304 bp, Artificial Sequence
  derived and/or modified sequence
atgcccagacagttccccaaactcaacatttctgaggttgatgagcaggttagattactcgctgaaaaggtatttgctaaggtgctgagagaagaggacagtaaggacgcactgtccctcttcacagtgccggaagactgccccatcggccagaaggaagccaaggagagggagctgcagaaagagttggcagaacaaaaatcggtggagacagctaaacgtaagaaaagttttaagatgatacgctcccaatcactttccttgcagatgccccctcagcaggattggaaaggaccacctgctgcgtcccctgctatgtctccgactactcccgtcgtgactggcgctacaagtctgcccaccccagcgccatatgccatgccagagttccagagagttaccatctctggcgattattgcgctggaattaccctcgaggattacgaacaggctgcaaaatcgcttgctaaggccctgatgattcgggaaaagtacgccaggctggcttatcacaggttccctcgaatcacaagccagtaccttggccacccgcgagcagatacggcccctccagaagaggggctgccagatttccatccccctcctcttccccaggaggacccctattgcctggacgacgccccacccaatctggactatctggtgcatatgcagggaggcatcctctttgtttatgacaataagaagatgttagagcaccaggagccgcatagtttgccgtatccagaccttgaaacttacaccgtggatatgtctcacatcctggccctcattacggacgggccaactaaaacctactgccaccgcagactgaatttcctcgaaagtaagtttagcctccatgaaatgctgaacgaaatgagtgaattcaaggagctcaaatcaaacccacatcgagacttttataacgtgcggaaggtagacacccacattcatgctgcggcatgtatgaaccagaagcatcttctgagatttatcaagcacacctaccagacggaaccagataggacagtcgctgagaagcggggacgcaagatcaccttgcggcaggtcttcgacggcttgcacatggatccttatgacttgaccgtcgactccctggacgtccacgccggtcgccagacttttcaccgctttgacaagtttaattccaagtataaccctgtgggcgcatcggagctgagggatctgtatctgaagaccgaaaactacctggggggtgagtatttcgcccgaatggtgaaggaagttgcaagggaactggaagagtccaaatatcagtatagtgagccacgattgtcaatctatgggcgatcccccgaggaatggcctaatcttgcatactggttcattcagcacaaggtgtacagtccgaatatgcgatggattattcaggtcccccgtatttacgatatcttccgctccaaaaaactgctgcccaacttcggcaaaatgctcgaaaatatatttctacccttgtttaaggctactataaatccacaggaccacagggaactgcatcttttcctgaagtatgtgaccggcttcgattccgttgatgacgaatccaagcattctgatcacatgttcagtgataagagtcccaacccagacgtgtggacctccgagcaaaatccaccttattcctactacctgtactatatgtacgctaatatcatggtgctgaacaacctcaggagagagagaggcctatcaacctttctatttcgtccgcactgtggagaagcaggaagtataacacacctggtctctgctttcctcactgctgataacatttctcacggacttcttctcaaaaaaagcccagttctgcagtacctgtactatttggcccagattcccatagccatgtcccccctcagtaataactcgctgtttctcgaatattctaagaaccccctcagggagttcttgcacaagggactacacgtgagtctgtcgaccgacgaccccatgcagttccattataccaaggaagcactgatggaagaatacgctatcgccgcacaggtttggaagttgtcaacctgcgatttgtgcgaaattgctaggaactctgtattgcagtccggccttagccaccaagaaaagcaaaagttcctggggcaaaattactacaaggagggcccagagggaaatgatattaggaagaccaacgtggcacagatccgtatggccttccgctacgagactttgtgtaacgagctttccttcttgagtgacgccatgaaatcggaggagatcacagcactgaccaactag

SEQ ID NO: 28952 - DNA, 2304 bp, Artificial Sequence
  derived and/or modified sequence
atgcccagacagttccccaagctgaacatcagcgaggtggacgagcaggtgagactgctggccgagaaggtgttcgccaaggtgctgagagaggaggacagcaaggacgccctgagcctgttcaccgtgcccgaggactgccccatcggccagaaggaggccaaggagagagagctgcagaaggagctggccgagcagaagagcgtggagaccgccaagagaaagaagagcttcaagatgatcagaagccagagcctgagcctgcagatgcccccccagcaggactggaagggcccccccgccgccagccccgccatgagccccaccacccccgtggtgaccggcgccaccagcctgcccacccccgccccctacgccatgcccgagttccagagagtgaccatcagcggcgactactgcgccggcatcaccctggaggactacgagcaggccgccaagagcctggccaaggccctgatgatcagagagaagtacgccagactggcctaccacagattccccagaatcaccagccagtacctgggccaccccagagccgacaccgccccccccgaggagggcctgcccgacttccaccccccccccctgccccaggaggacccctactgcctggacgacgccccccccaacctggactacctggtgcacatgcagggcggcatcctgttcgtgtacgacaacaagaagatgctggagcaccaggagccccacagcctgccctaccccgacctggagacctacaccgtggacatgagccacatcctggccctgatcaccgacggccccaccaagacctactgccacagaagactgaacttcctggagagcaagttcagcctgcacgagatgctgaacgagatgagcgagttcaaggagctgaagagcaacccccacagagacttctacaacgtgagaaaggtggacacccacatccacgccgccgcctgcatgaaccagaagcacctgctgagattcatcaagcacacctaccagaccgagcccgacagaaccgtggccgagaagagaggcagaaagatcaccctgagacaggtgttcgacggcctgcacatggacccctacgacctgaccgtggacagcctggacgtgcacgccggcagacagaccttccacagattcgacaagttcaacagcaagtacaaccccgtgggcgccagcgagctgagagacctgtacctgaagaccgagaactacctgggcggcgagtacttcgccagaatggtgaaggaggtggccagagagctggaggagagcaagtaccagtacagcgagcccagactgagcatctacggcagaagccccgaggagtggcccaacctggcctactggttcatccagcacaaggtgtacagccccaacatgagatggatcatccaggtgcccagaatctacgacatcttcagaagcaagaagctgctgcccaacttcggcaagatgctggagaacatcttcctgcccctgttcaaggccaccatcaacccccaggaccacagagagctgcacctgttcctgaagtacgtgaccggcttcgacagcgtggacgacgagagcaagcacagcgaccacatgttcagcgacaagagccccaaccccgacgtgtggaccagcgagcagaaccccccctacagctactacctgtactacatgtacgccaacatcatggtgctgaacaacctgagaagagagagaggcctgagcaccttcctgttcagaccccactgcggcgaggccggcagcatcacccacctggtgagcgccttcctgaccgccgacaacatcagccacggcctgctgctgaagaagagccccgtgctgcagtacctgtactacctggcccagatccccatcgccatgagccccctgagcaacaacagcctgttcctggagtacagcaagaaccccctgagagagttcctgcacaagggcctgcacgtgagcctgagcaccgacgaccccatgcagttccactacaccaaggaggccctgatggaggagtacgccatcgccgcccaggtgtggaagctgagcacctgcgacctgtgcgagatcgccagaaacagcgtgctgcagagcggcctgagccaccaggagaagcagaagttcctgggccagaactactacaaggagggccccgagggcaacgacatcagaaagaccaacgtggcccagatcagaatggccttcagatacgagaccctgtgcaacgagctgagcttcctgagcgacgccatgaagagcgaggagatcaccgccctgaccaactag

SEQ ID NO: 28953 - DNA, 1827 bp, Artificial Sequence
  derived and/or modified sequence
atgatcagagagaagtacgccagactggcctaccacagattccccagaatcaccagccagtacctgggccaccccagagccgacaccgccccccccgaggagggcctgcccgacttccaccccccccccctgccccaggaggacccctactgcctggacgacgccccccccaacctggactacctggtgcacatgcagggcggcatcctgttcgtgtacgacaacaagaagatgctggagcaccaggagccccacagcctgccctaccccgacctggagacctacaccgtggacatgagccacatcctggccctgatcaccgacggccccaccaagacctactgccacagaagactgaacttcctggagagcaagttcagcctgcacgagatgctgaacgagatgagcgagttcaaggagctgaagagcaacccccacagagacttctacaacgtgagaaaggtggacacccacatccacgccgccgcctgcatgaaccagaagcacctgctgagattcatcaagcacacctaccagaccgagcccgacagaaccgtggccgagaagagaggcagaaagatcaccctgagacaggtgttcgacggcctgcacatggacccctacgacctgaccgtggacagcctggacgtgcacgccggcagacagaccttccacagattcgacaagttcaacagcaagtacaaccccgtgggcgccagcgagctgagagacctgtacctgaagaccgagaactacctgggcggcgagtacttcgccagaatggtgaaggaggtggccagagagctggaggagagcaagtaccagtacagcgagcccagactgagcatctacggcagaagccccgaggagtggcccaacctggcctactggttcatccagcacaaggtgtacagccccaacatgagatggatcatccaggtgcccagaatctacgacatcttcagaagcaagaagctgctgcccaacttcggcaagatgctggagaacatcttcctgcccctgttcaaggccaccatcaacccccaggaccacagagagctgcacctgttcctgaagtacgtgaccggcttcgacagcgtggacgacgagagcaagcacagcgaccacatgttcagcgacaagagccccaaccccgacgtgtggaccagcgagcagaaccccccctacagctactacctgtactacatgtacgccaacatcatggtgctgaacaacctgagaagagagagaggcctgagcaccttcctgttcagaccccactgcggcgaggccggcagcatcacccacctggtgagcgccttcctgaccgccgacaacatcagccacggcctgctgctgaagaagagccccgtgctgcagtacctgtactacctggcccagatccccatcgccatgagccccctgagcaacaacagcctgttcctggagtacagcaagaaccccctgagagagttcctgcacaagggcctgcacgtgagcctgagcaccgacgaccccatgcagttccactacaccaaggaggccctgatggaggagtacgccatcgccgcccaggtgtggaagctgagcacctgcgacctgtgcgagatcgccagaaacagcgtgctgcagagcggcctgagccaccaggagaagcagaagttcctgggccagaactactacaaggagggccccgagggcaacgacatcagaaagaccaacgtggcccagatcagaatggccttcagatacgagaccctgtgcaacgagctgagcttcctgagcgacgccatgaagagcgaggagatcaccgccctgaccaactag

SEQ ID NO: 28954 - DNA, 2325 bp, Artificial Sequence
  derived and/or modified sequence
atggagcccggcagcgccgagatgcccagacagttccccaagctgaacatcagcgaggtggacgagcaggtgagactgctggccgagaaggtgttcgccaaggtgctgagagaggaggacagcaaggacgccctgagcctgttcaccgtgcccgaggactgccccatcggccagaaggaggccaaggagagagagctgcagaaggagctggccgagcagaagagcgtggagaccgccaagagaaagaagagcttcaagatgatcagaagccagagcctgagcctgcagatgcccccccagcaggactggaagggcccccccgccgccagccccgccatgagccccaccacccccgtggtgaccggcgccaccagcctgcccacccccgccccctacgccatgcccgagttccagagagtgaccatcagcggcgactactgcgccggcatcaccctggaggactacgagcaggccgccaagagcctggccaaggccctgatgatcagagagaagtacgccagactggcctaccacagattccccagaatcaccagccagtacctgggccaccccagagccgacaccgccccccccgaggagggcctgcccgacttccaccccccccccctgccccaggaggacccctactgcctggacgacgccccccccaacctggactacctggtgcacatgcagggcggcatcctgttcgtgtacgacaacaagaagatgctggagcaccaggagccccacagcctgccctaccccgacctggagacctacaccgtggacatgagccacatcctggccctgatcaccgacggccccaccaagacctactgccacagaagactgaacttcctggagagcaagttcagcctgcacgagatgctgaacgagatgagcgagttcaaggagctgaagagcaacccccacagagacttctacaacgtgagaaaggtggacacccacatccacgccgccgcctgcatgaaccagaagcacctgctgagattcatcaagcacacctaccagaccgagcccgacagaaccgtggccgagaagagaggcagaaagatcaccctgagacaggtgttcgacggcctgcacatggacccctacgacctgaccgtggacagcctggacgtgcacgccggcagacagaccttccacagattcgacaagttcaacagcaagtacaaccccgtgggcgccagcgagctgagagacctgtacctgaagaccgagaactacctgggcggcgagtacttcgccagaatggtgaaggaggtggccagagagctggaggagagcaagtaccagtacagcgagcccagactgagcatctacggcagaagccccgaggagtggcccaacctggcctactggttcatccagcacaaggtgtacagccccaacatgagatggatcatccaggtgcccagaatctacgacatcttcagaagcaagaagctgctgcccaacttcggcaagatgctggagaacatcttcctgcccctgttcaaggccaccatcaacccccaggaccacagagagctgcacctgttcctgaagtacgtgaccggcttcgacagcgtggacgacgagagcaagcacagcgaccacatgttcagcgacaagagccccaaccccgacgtgtggaccagcgagcagaaccccccctacagctactacctgtactacatgtacgccaacatcatggtgctgaacaacctgagaagagagagaggcctgagcaccttcctgttcagaccccactgcggcgaggccggcagcatcacccacctggtgagcgccttcctgaccgccgacaacatcagccacggcctgctgctgaagaagagccccgtgctgcagtacctgtactacctggcccagatccccatcgccatgagccccctgagcaacaacagcctgttcctggagtacagcaagaaccccctgagagagttcctgcacaagggcctgcacgtgagcctgagcaccgacgaccccatgcagttccactacaccaaggaggccctgatggaggagtacgccatcgccgcccaggtgtggaagctgagcacctgcgacctgtgcgagatcgccagaaacagcgtgctgcagagcggcctgagccaccaggagaagcagaagttcctgggccagaactactacaaggagggccccgagggcaacgacatcagaaagaccaacgtggcccagatcagaatggccttcagatacgagaccctgtgcaacgagctgagcttcctgagcgacgccatgaagagcgaggagatcaccgccctgaccaactag

SEQ ID NO: 28955 - protein, 240 aa, Artificial Sequence
  derived and/or modified sequence
MVGRRALIVLAHSERTSFNYAMKEAAAAALKKKGWEVVESDLYAMNFNPIISRKDITGKLKDPANFQYPAESVLAYKEGHLSPDIVAEQKKLEAADLVIFQFPLQWFGVPAILKGWFERVFIGEFAYTYAAMYDKGPFRSGILHFCGFQVLEPQLTYSIGHTPADARIQILEGWKKRLENIWDETPLYFAPSSLFDLNFQAGFLMKKEVQDEEKNKKFGLSVGHHLGKSIPTDNQIKARK

SEQ ID NO: 28956 - DNA, 723 bp, Artificial Sequence
  derived and/or modified sequence
atggtgggaaggcgtgcactcattgttttagcccattctgaacgaactagcttcaattacgcaatgaaggaggctgcagctgcggccctaaagaaaaagggatgggaggtcgtagaatctgacctctatgctatgaactttaaccctatcatttcccgaaaggacatcacaggtaaattgaaagatcctgcaaacttccagtatcctgccgaatccgtcctggcgtacaaggaggggcatctgtcaccagacatcgtggctgaacagaagaagctcgaagctgccgatctggtcatattccaatttccgctccagtggttcggagtacccgccattctaaaagggtggttcgagcgggtttttatcggggagttcgcttacacctacgccgccatgtatgataaaggccctttccgaagcgggatcctgcatttctgtgggttccaggtcctagagccacagctcacctatagtattggtcacactccagctgacgctcggatacagattctcgaaggttggaagaaaagactggagaatatatgggatgagacccctctttacttcgccccttcatccctgtttgacctgaactttcaggctggattcttgatgaagaaagaggttcaggacgaagagaaaaataaaaaattcggactgtctgtggggcaccatctcgggaagagtatccctaccgacaaccaaataaaagcccggaagtag

SEQ ID NO: 28957 - DNA, 723 bp, Artificial Sequence
  derived and/or modified sequence
atggtgggccggcgggccctgattgtgctggcccacagcgagaggaccagcttcaactatgccatgaaggaggccgctgctgctgccctgaagaagaagggctgggaggtggtggagagtgacctgtatgccatgaacttcaaccccatcatcagcaggaaggacatcaccgggaagctgaaggaccctgccaacttccagtacccagctgagagcgtgctggcctacaaggagggccacctgagcccagacatcgtggccgagcagaagaagctggaggccgctgacctggtgatcttccagttccccctgcagtggtttggagtgcctgccatcctgaagggctggtttgagagggtcttcatcggggagtttgcctacacctacgccgccatgtatgacaagggccccttccgcagcggcatcctgcacttctgtggcttccaggtgctggagccccagctgacctacagcatcggccacaccccagcagatgcccgcatccagatcctggagggctggaagaagaggctggagaacatctgggatgagacccccctgtactttgcccccagcagcctgtttgacctgaacttccaggccggcttcctgatgaagaaggaggtgcaggatgaggagaagaacaagaagtttggcctgtctgtgggccaccacctgggcaagagcatccccacagacaaccagatcaaggccaggaagtag

SEQ ID NO: 28958 - DNA, 2405 bp, Artificial Sequence
  derived and/or modified sequence
caaggttgcagccggagccgcccagctcaccgagagcctagttccggccagggtcgccccggcaaccacgagcccagccaatcagcgccccggactgcaccagagccatggtcggcagaagagcactgatcgtactggctcactcagagaggacgtccttcaactatgccatgaaggaggctgctgcagcggctttgaagaagaaaggatgggaggtggtggagtcggacctctatgccatgaacttcaatcccatcatttccagaaaggacatcacaggtaaactgaaggaccctgcgaactttcagtatcctgccgagtctgttctggcttataaagaaggccatctgagcccagatattgtggctgaacaaaagaagctggaagccgcagaccttgtgatattccagttccccctgcagtggtttggagtccctgccattctgaaaggctggtttgagcgagtgttcataggagagtttgcttacacttacgctgccatgtatgacaaaggacccttccggagtggcattctgcatttctgtggcttccaagtcttagaacctcaactgacatatagcattgggcacactccagcagacgcccgaattcaaatcctggaaggatggaagaaacgcctggagaatatttgggatgagacaccactgtattttgctccaagcagcctctttgacctaaacttccaggcaggattcttaatgaaaaaagaggtacaggatgaggagaaaaacaagaaatttggcctttctgtgggccatcacttgggcaagtccatcccaactgacaaccagatcaaagctagaaaatgagattccttagcctggatttccttctaacatgttatcaaatctgggtatctttccaggcttccctgacttgctttagtttttaagatttgtgtttttctttttccacaaggaataaatgagagggaatcgactgtattcgtgcatttttggatcatttttaactgattcttatgattactatcatggcatataaccaaaatccgactgggctcaagaggccacttagggaaagatgtagaaagatgctagaaaaatgttctttaaaggcatctacacaatttaattcctctttttagggctaaagttttagggtacagtttggctaggtatcattcaactctccaatgttctattaatcacctctctgtagtttatggcagaagggaattgctcagagaaggaaaagactgaatctacctgccctaagggacttaacttgtttggtagttagccatctaatgcttgtttatgatatttcttgctttcaattacaaagcagttactaatatgcctagcacaagtaccactcttggtcagcttttgttgtttatatacagtacacagataccttgaaaggaagagctaataaatctcttctttgctgcagtcatctactttttttttaattaaaaaaaatttttttttgaagcagtcttgctctgttacccaggctggagtgcagtggtgtgatctcggctcactgcaacctctgcctcccaggttccagcaattctcctgcctcagcctccctagtagctgggatgacaggcgcctgccatcatgcctgactaatttttgtatttttagtagagacggcgtttcaccatgttggccaggctggtctcaaactcctgacctcaggtgatccgcctacctcagcctcccaaagtgctgggattacaggcgtgatccaccacacctggcccttgcaatcttctactttaaggtttgcagagataaaccaataaatccacaccgtacatctgcaatatgaattcaagaaaggaaatagtaccttcaatacttaaaaatagtcttccacaaaaaatactttatttctgatctatacaaattttcagaaggttattttctttatcattgctaaactgatgacttactatgggatggggtccagtcccatgaccttggggtacaattgtaaacctagagttttatcaactttggtgaacagttttggcataatagtcaatttctacttctggaagtcatctcattccactgttggtattatataattcaaggagaatatgataaaacactgccctcttgtggtgcattgaaagaagagatgagaaatgatgaaaaggttgcctgaaaaatgggagacagcctcttacttgccaagaaaatgaagggattggaccgagctggaaaacctcctttaccagatgctgactggcactggtggtttttgctctcgacagtatccacaatagctgacggctgggtgtttcagtttgaaaatattttgttgccttcatcttcactgcaattttgtgtaaatttctcaaagatctgaattaaataaataaaattcatttctacagacccaca

SEQ ID NO: 28959 - DNA, 723 bp, Artificial Sequence
  derived and/or modified sequence
atggtgggccggcgggccctgatcgtgctggcccacagcgagcggacctccttcaactacgctatgaaagaagccgccgccgccgccctgaagaagaagggctgggaagtagttgagagtgacctgtatgctatgaactttaaccccatcatctctcggaaagatatcacgggcaagctgaaagatccagcgaatttccaataccccgcggaatcagtgctggcgtataaggaaggtcacttgagccccgatatcgttgccgaacaaaagaaactcgaagccgctgatctggtgatatttcaattcccactccagtggttcggtgtgcctgcaattctgaagggttggtttgaacgagttttcattggcgaattcgcttatacctacgctgccatgtatgacaaaggacctttccgatcagggatcttgcacttttgcgggttccaggtgctggaacctcaactaacttattctatcggccatacacccgcagacgctcgcattcaaatactggagggctggaagaaaaggcttgagaatatatgggacgagacgcccttatattttgctccctctagcttattcgatctcaatttccaggcaggattcctgatgaaaaaagaggtccaagatgaagaaaaaaataagaaattcggcctgtctgtaggtcatcatttaggaaaatcaattcccacagacaaccagatcaaggccagaaaatag

SEQ ID NO: 28960 - DNA, 723 bp, Artificial Sequence
  derived and/or modified sequence
atggtcggacgccgtgcattaattgtgcttgcccattcggagcggacttcctttaactatgcaatgaaggaggcagcagccgcagcactgaagaagaagggctgggaagtggtggaatccgatctttatgcaatgaactttaacccgatcattagcaggaaagacatcaccggtaaactgaaggacccggcaaactttcagtaccccgctgagtccgtcctggcatataaagagggccatctcagccccgatattgtcgccgagcaaaaaaaacttgaagctgcggatctcgttatcttccagtttccccttcagtggtttggtgtgccagccatcctgaagggctggttcgagcgcgtgttcattggggaatttgcctatacctacgctgctatgtacgataagggcccattcagaagcgggatcctgcatttctgtggctttcaggtgcttgaacctcaacttacctacagcattggacatactcccgctgatgctagaatccaaattctggagggatggaagaagcgtcttgaaaacatctgggacgaaacacccttatactttgctccttcttccttgtttgatctgaactttcaggccggtttcctgatgaagaaggaggtccaagatgaggagaaaaataagaaatttggattaagtgtcggtcatcacctgggcaaatcaatacccactgacaaccaaatcaaagctcggaaatag

SEQ ID NO: 28961 - DNA, 723 bp, Artificial Sequence
  derived and/or modified sequence
atggtgggcagaagagccctgatcgtgctggcccacagcgagagaaccagcttcaactacgccatgaaggaggccgccgccgccgccctgaagaagaagggctgggaggtggtggagagcgacctgtacgccatgaacttcaaccccatcatcagcagaaaggacatcaccggcaagctgaaggaccccgccaacttccagtaccccgccgagagcgtgctggcctacaaggagggccacctgagccccgacatcgtggccgagcagaagaagctggaggccgccgacctggtgatcttccagttccccctgcagtggttcggcgtgcccgccatcctgaagggctggttcgagagagtgttcatcggcgagttcgcctacacctacgccgccatgtacgacaagggccccttcagaagcggcatcctgcacttctgcggcttccaggtgctggagccccagctgacctacagcatcggccacacccccgccgacgccagaatccagatcctggagggctggaagaagagactggagaacatctgggacgagacccccctgtacttcgcccccagcagcctgttcgacctgaacttccaggccggcttcctgatgaagaaggaggtgcaggacgaggagaagaacaagaagttcggcctgagcgtgggccaccacctgggcaagagcatccccaccgacaaccagatcaaggccagaaagtag

SEQ ID NO: 28962 - protein, 236 aa, Artificial Sequence
  derived and/or modified sequence
MVGRRALIVLAHSERTSFNYAMKEAAAAALKKKGWEVVESDLYAMNFNPIISRKDITGKLKDPANFQYPAESVLAYKEGHLSPDIVAEQKKLEAADLVIFQSKKAVLSITTGGSGSMYSLQGIHGDMNVILWPIQSGILHFCGFQVLEPQLTYSIGHTPADARIQILEGWKKRLENIWDETPLYFAPSSLFDLNFQAGFLMKKEVQDEEKNKKFGLSVGHHLGKSIPTDNQIKARK

SEQ ID NO: 28963 - DNA, 711 bp, Artificial Sequence
  derived and/or modified sequence
atggtgggtcgtcgcgctctgattgttctggcccatagcgagcgcacctcattcaattatgctatgaaagaggcagccgcagccgccttgaagaaaaaggggtgggaagttgtggagtccgacttgtacgccatgaactttaaccccatcatcagtcggaaggatataaccggaaagctgaaagatcccgcaaactttcaataccctgctgagtctgtgctggcatataaggaaggccacttgtctccggacatcgttgcagagcagaagaagctggaggccgccgacctcgtcatctttcagtcaaagaaggccgtactatctataacaacaggcggctccggcagcatgtactcattacagggcattcatggggacatgaacgtaatactgtggcccattcagtctggcatccttcatttttgtggattccaagtgcttgagcctcagctcacttatagcatcggtcacacccccgccgacgcccgtattcagatcctcgagggatggaagaaacgactggagaatatatgggatgaaacaccactatactttgccccgtcgtctctgtttgatctgaattttcaagctggttttctaatgaaaaaggaggtccaggatgaggagaagaacaaaaagtttggattgagcgttgggcaccatctcggcaagtcgatcccaacagacaaccagattaaggcccgcaaatag

SEQ ID NO: 28964 - DNA, 711 bp, Artificial Sequence
  derived and/or modified sequence
atggtgggccggcgggccctgattgtgctggcccacagcgagaggaccagcttcaactatgccatgaaggaggccgctgctgctgccctgaagaagaagggctgggaggtggtggagagtgacctgtatgccatgaacttcaaccccatcatcagcaggaaggacatcaccgggaagctgaaggaccctgccaacttccagtacccagctgagagcgtgctggcctacaaggagggccacctgagcccagacatcgtggccgagcagaagaagctggaggccgctgacctggtgatcttccagagcaagaaggctgtgctgagcatcaccactggaggcagcggctccatgtacagcctgcagggcatccacggggacatgaatgtcatcctgtggcccatccagagcggcatcctgcacttctgtggcttccaggtgctggagccccagctgacctacagcatcggccacaccccagcagatgcccgcatccagatcctggagggctggaagaagaggctggagaacatctgggatgagacccccctgtactttgcccccagcagcctgtttgacctgaacttccaggccggcttcctgatgaagaaggaggtgcaggatgaggagaagaacaagaagtttggcctgtctgtgggccaccacctgggcaagagcatccccacagacaaccagatcaaggccaggaagtag

SEQ ID NO: 28965 - DNA, 2474 bp, Artificial Sequence
  derived and/or modified sequence
ccgcccttgtaggctgtccacctcaaacgggccggacaggatatataagagagaatgcaccgtgcactacacacgcgactcccacaaggttgcagccggagccgcccagctcaccgagagcctagttccggccagggtcgccccggcaaccacgagcccagccaatcagcgccccggactgcaccagagccatggtcggcagaagagcactgatcgtactggctcactcagagaggacgtccttcaactatgccatgaaggaggctgctgcagcggctttgaagaagaaaggatgggaggtggtggagtcggacctctatgccatgaacttcaatcccatcatttccagaaaggacatcacaggtaaactgaaggaccctgcgaactttcagtatcctgccgagtctgttctggcttataaagaaggccatctgagcccagatattgtggctgaacaaaagaagctggaagccgcagaccttgtgatattccagagtaagaaggcagtgctttccatcaccactggtggcagtggctccatgtactctctgcaagggatccacggggacatgaatgtcattctctggccaattcagagtggcattctgcatttctgtggcttccaagtcttagaacctcaactgacatatagcattgggcacactccagcagacgcccgaattcaaatcctggaaggatggaagaaacgcctggagaatatttgggatgagacaccactgtattttgctccaagcagcctctttgacctaaacttccaggcaggattcttaatgaaaaaagaggtacaggatgaggagaaaaacaagaaatttggcctttctgtgggccatcacttgggcaagtccatcccaactgacaaccagatcaaagctagaaaatgagattccttagcctggatttccttctaacatgttatcaaatctgggtatctttccaggcttccctgacttgctttagtttttaagatttgtgtttttctttttccacaaggaataaatgagagggaatcgactgtattcgtgcatttttggatcatttttaactgattcttatgattactatcatggcatataaccaaaatccgactgggctcaagaggccacttagggaaagatgtagaaagatgctagaaaaatgttctttaaaggcatctacacaatttaattcctctttttagggctaaagttttagggtacagtttggctaggtatcattcaactctccaatgttctattaatcacctctctgtagtttatggcagaagggaattgctcagagaaggaaaagactgaatctacctgccctaagggacttaacttgtttggtagttagccatctaatgcttgtttatgatatttcttgctttcaattacaaagcagttactaatatgcctagcacaagtaccactcttggtcagcttttgttgtttatatacagtacacagataccttgaaaggaagagctaataaatctcttctttgctgcagtcatctactttttttttaattaaaaaaaatttttttttgaagcagtcttgctctgttacccaggctggagtgcagtggtgtgatctcggctcactgcaacctctgcctcccaggttccagcaattctcctgcctcagcctccctagtagctgggatgacaggcgcctgccatcatgcctgactaatttttgtatttttagtagagacggcgtttcaccatgttggccaggctggtctcaaactcctgacctcaggtgatccgcctacctcagcctcccaaagtgctgggattacaggcgtgatccaccacacctggcccttgcaatcttctactttaaggtttgcagagataaaccaataaatccacaccgtacatctgcaatatgaattcaagaaaggaaatagtaccttcaatacttaaaaatagtcttccacaaaaaatactttatttctgatctatacaaattttcagaaggttattttctttatcattgctaaactgatgacttactatgggatggggtccagtcccatgaccttggggtacaattgtaaacctagagttttatcaactttggtgaacagttttggcataatagtcaatttctacttctggaagtcatctcattccactgttggtattatataattcaaggagaatatgataaaacactgccctcttgtggtgcattgaaagaagagatgagaaatgatgaaaaggttgcctgaaaaatgggagacagcctcttacttgccaagaaaatgaagggattggaccgagctggaaaacctcctttaccagatgctgactggcactggtggtttttgctctcgacagtatccacaatagctgacggctgggtgtttcagtttgaaaatattttgttgccttcatcttcactgcaattttgtgtaaatttctcaaagatctgaattaaataaataaaattcatttctacagaccc

SEQ ID NO: 28966 - DNA, 711 bp, Artificial Sequence
  derived and/or modified sequence
atggtgggccggcgggccctgatcgtgctggcccacagcgagcggactagctttaactacgctatgaaagaggctgccgcagctgcgctgaagaagaaaggctgggaagttgttgagtcagatttgtacgcaatgaactttaatccaatcatcagtcgaaaggatatcacaggcaaactcaaggacccggcaaattttcaatatcccgcggagtcagtgctggcatacaaagaggggcacctgtcacctgatatagtggcagagcagaaaaagctggaagcagctgacttggtcatcttccagtctaagaaagcagttctgtctataaccacaggtggatctgggagcatgtactcactccagggaatccacggtgatatgaatgtgattctgtggccaattcagagcgggattctacacttctgcggattccaggtcctggagccgcagctgacttactcaatcgggcacacaccagccgacgcccgcatacagatcctggagggatggaaaaagagacttgagaacatctgggatgagactccactgtactttgcccccagttctctctttgatctcaatttccaggctggcttccttatgaagaaagaggttcaggatgaagagaagaataagaaatttgggctttctgttggtcaccatctcggcaagagcatccctacagacaatcagatcaaggccaggaagtag

SEQ ID NO: 28967 - DNA, 711 bp, Artificial Sequence
  derived and/or modified sequence
atggtgggccgtcgggcactgatcgttcttgcccatagcgaacggactagcttcaattatgccatgaaggaagcagcagccgctgccctgaaaaaaaagggctgggaagtggtggagagcgatctatacgccatgaattttaaccctattataagcagaaaagacatcacagggaaactgaaggacccagcgaactttcagtacccagccgaaagtgtgctggcttataaggaaggtcacctatctccggacattgtggctgagcagaagaagctggaagccgctgacctcgttatctttcagtcgaaaaaagcggtcctatctattacaaccggcggatctggaagtatgtattctctgcaggggatccacggcgacatgaatgtgatactctggcctattcagtccggtatcctccacttctgcggctttcaggtgttggagccccagctgacttattccatcggacatacaccagccgatgctcggatccagatacttgagggatggaagaagaggttggagaatatttgggacgaaactccgctgtattttgctccctcttctttgtttgatctgaatttccaagccggatttctcatgaaaaaagaagtgcaagacgaggagaagaacaaaaagttcggcttgtccgtggggcaccacctgggaaaatctatccctactgacaaccagatcaaagccagaaaatag

SEQ ID NO: 28968 - DNA, 711 bp, Artificial Sequence
  derived and/or modified sequence
atggtgggcagaagagccctgatcgtgctggcccacagcgagagaaccagcttcaactacgccatgaaggaggccgccgccgccgccctgaagaagaagggctgggaggtggtggagagcgacctgtacgccatgaacttcaaccccatcatcagcagaaaggacatcaccggcaagctgaaggaccccgccaacttccagtaccccgccgagagcgtgctggcctacaaggagggccacctgagccccgacatcgtggccgagcagaagaagctggaggccgccgacctggtgatcttccagagcaagaaggccgtgctgagcatcaccaccggcggcagcggcagcatgtacagcctgcagggcatccacggcgacatgaacgtgatcctgtggcccatccagagcggcatcctgcacttctgcggcttccaggtgctggagccccagctgacctacagcatcggccacacccccgccgacgccagaatccagatcctggagggctggaagaagagactggagaacatctgggacgagacccccctgtacttcgcccccagcagcctgttcgacctgaacttccaggccggcttcctgatgaagaaggaggtgcaggacgaggagaagaacaagaagttcggcctgagcgtgggccaccacctgggcaagagcatccccaccgacaaccagatcaaggccagaaagtag

SEQ ID NO: 28969 - protein, 183 aa, Artificial Sequence
  derived and/or modified sequence
MAAQRGMPSSAVRVLEEALGMGLTAAGDARDTADAVAAEGAYYLEQVTITEASEDDYEYEEIPDDNFSIPEGEEDLAKAIQMAQEQATDTEILERKTVLPSKHAVPEVIEDFLCNFLIKMGMTRTLDCFQSEWYELIQKGVTELRTVGNVPDVYTQIMLLENENKNLKKDLKHYKQAAEYVIF

SEQ ID NO: 28970 - DNA, 552 bp, Artificial Sequence
  derived and/or modified sequence
atggccgcccagagaggcatgcccagcagcgccgtgagagtgctggaggaggccctgggcatgggcctgaccgccgccggcgacgccagagacaccgccgacgccgtggccgccgagggcgcctactacctggagcaggtgaccatcaccgaggccagcgaggacgactacgagtacgaggagatccccgacgacaacttcagcatccccgagggcgaggaggacctggccaaggccatccagatggcccaggagcaggccaccgacaccgagatcctggagagaaagaccgtgctgcccagcaagcacgccgtgcccgaggtgatcgaggacttcctgtgcaacttcctgatcaagatgggcatgaccagaaccctggactgcttccagagcgagtggtacgagctgatccagaagggcgtgaccgagctgagaaccgtgggcaacgtgcccgacgtgtacacccagatcatgctgctggagaacgagaacaagaacctgaagaaggacctgaagcactacaagcaggccgccgagtacgtgatcttctag

SEQ ID NO: 28971 - DNA, 552 bp, Artificial Sequence
  derived and/or modified sequence
atggcggcccaacgaggtatgccgagttccgccgttcgagtcctcgaagaagcccttgggatgggcctcactgccgcgggtgacgcccgcgacacagctgatgcagtcgcagccgaaggggcatactatctcgaacaggtgacgatcacagaggccagcgaggatgattacgagtatgaagaaattcccgacgataattttagtatccccgagggagaagaggacctggccaaggctatccaaatggcgcaggagcaggcaacggatactgagatactcgagcgcaaaaccgttctgccaagcaagcacgccgtgccagaggttattgaagatttcttatgtaatttcctgatcaaaatggggatgacaaggaccctggactgttttcagtctgagtggtatgagctgatacagaagggggttacagagttgcgcaccgtgggcaacgttcccgatgtctacacccagatcatgctcctggagaatgagaacaagaatttgaagaaggatctcaagcattacaagcaagctgcagagtacgtcattttttag

SEQ ID NO: 28972 - DNA, 552 bp, Artificial Sequence
  derived and/or modified sequence
atggccgcccagaggggcatgcccagcagcgctgtgcgggtgctggaggaggccctgggcatgggcctgacagctgctggagatgcccgggacacagcagatgctgtggccgctgagggcgcctactacctggagcaggtgaccatcacagaggcctctgaagatgattatgaatatgaggagatcccagatgacaacttcagcatccctgagggggaggaggacctggccaaggccatccagatggcccaggagcaggccacagacacagagatcctggagaggaagacagtgctgcccagcaagcatgctgtgcctgaggtgattgaggacttcctgtgcaacttcctgatcaagatgggcatgaccaggaccctggactgcttccagagcgagtggtatgagctgatccagaagggcgtgacagagctgaggacagtgggcaatgtgcctgatgtgtacacccagatcatgctgctggagaatgaaaacaagaacctgaagaaggacctgaagcactacaagcaggccgcagaatatgtgatcttctag

SEQ ID NO: 28973 - DNA, 552 bp, Artificial Sequence
  derived and/or modified sequence
atggccgcccagcggggcatgcccagcagcgccgtgcgggtgctggaggaagcactcggcatgggtttgaccgcagcaggagatgctcgggacactgctgacgctgtggctgcagagggcgcctactatctagagcaagttacgatcactgaggcaagcgaggatgactacgagtacgaagaaatcccagacgacaacttttcaattccagaaggggaagaagaccttgcaaaggccatacagatggctcaggagcaggctacagacaccgagatcctggaacgaaagactgtccttccatccaagcatgcggttcccgaagtcatcgaagatttcctgtgtaacttcctgattaagatgggaatgacacgcactctggattgcttccaatccgaatggtacgaactgatccagaagggggtcactgaactcaggactgtggggaatgttccagatgtatatactcagatcatgcttcttgagaatgagaataagaatctaaagaaagacctgaagcactacaagcaggcagcagagtatgtgatcttttag

SEQ ID NO: 28974 - DNA, 552 bp, Artificial Sequence
  derived and/or modified sequence
atggcagctcagaggggcatgccatcttctgccgtgagagtgcttgaggaagccctggggatgggactgaccgctgccggagacgcacgggatactgctgatgccgtggcagctgagggcgcatactacctggaacaggtgacaataactgaggcctcagaagacgattatgagtacgaggaaattccagacgacaactttagtatcccggagggcgaagaggatctggccaaggctatacagatggctcaggagcaggccactgacactgaaatcctggaacgcaaaacagttttacccagcaagcatgcagtgcctgaggtgattgaagactttctctgcaactttctgatcaagatgggcatgacccggacactggactgctttcagtccgagtggtacgaattgattcaaaaaggcgtcaccgagctacgtaccgtggggaacgtccccgatgtgtacacgcagatcatgcttctcgaaaatgagaacaagaatctgaagaaagacttgaagcattacaaacaggctgcagaatatgtcatcttctag

SEQ ID NO: 28975 - DNA, 1250 bp, Artificial Sequence
  derived and/or modified sequence
gagagctcccgggggccgttgggtagcgtcttcgctgttgcccttagggacggctgtgggcctgctgggggtgggggcccgaagcgccagagatggctgctcagcgagggatgcccagctccgccgtgagggtcctggaagaggcgttgggcatgggtttgacggcagccggggacgcgagggacacggcggacgcggtggcggctgagggcgcctactacctggaacaggtcaccataactgaagcatctgaagatgactatgaatatgaagagataccagatgacaattttagcatcccagaaggtgaagaagatctggcaaaagcaattcagatggcccaagaacaggctacagatactgaaattttggaacggaaaacagttcttccttcaaagcatgcagtacctgaagtaatagaagactttctctgcaatttcttgatcaaaatgggaatgaccagaactcttgattgctttcagtctgaatggtatgagttaatacagaaaggagtgactgaacttagaactgttgggaatgttccagatgtctacacccagattatgcttttggaaaatgagaacaaaaatttaaagaaagatttgaagcactacaaacaagcagctgagtatgttattttttaaatgacattttcttctttttcttttggactaaataaaagagttgagtgaagctgatatatgtaatataccagagccttaatttttgaaaactgaatttttctagttgtaaagaatgtgagaggcttcattagcaaattaattaaacagatgatcagaactatcacaattataacttaccaacaagaagggaatgcaggtagttgtttaggagatggtacattttttatataacattcacttccttgtgtatttgatagtcttttcatggtttataacattttctcctgtaaagataggctaatttctgaaataataattaaatttatagaaagccgagaggaaattgctagtttattcctggtagaggaatttctgtatttgaaaattctccagaaggaataatataaactgtggactttgggtgataatgatatgtaggttcgtcagttgttaacaaatgtatccctctgttgggggctattgataatggggaaggctgtgcatgtgtgggagtaggaggtgtatgggacatctctgtaccttctaatcaattttgctatgaacttaaaactgctctaaaaataaagtttattaaaaaaaagttaa

SEQ ID NO: 28976 - protein, 328 aa, Artificial Sequence
  derived and/or modified sequence
MDGEDIPDFSSLKEETAYWKELSLKYKQSFQEARDELVEFQEGSRELEAELEAQLVQAEQRNRDLQADNQRLKYEVEALKEKLEHQYAQSYKQVSVLEDDLSQTRAIKEQLHKYVRELEQANDDLERAKRATIVSLEDFEQRLNQAIERNAFLESELDEKESLLVSVQRLKDEARDLRQELAVRERQQEVTRKSAPSSPTLDCEKMDSAVQASLSLPATPVGKGTENTFPSPKAIPNGFGTSPLTPSARISALNIVGDLLRKVGALESKLAACRNFAKDQASRKSYISGNVNCGVLNGNGTKFSRSGHTSFFDKGQEKVIFPTLFMGQ

SEQ ID NO: 28977 - DNA, 987 bp, Artificial Sequence
  derived and/or modified sequence
atggacggcgaggacatccccgacttcagcagcctgaaggaggagaccgcctactggaaggagctgagcctgaagtacaagcagagcttccaggaggccagagacgagctggtggagttccaggagggcagcagagagctggaggccgagctggaggcccagctggtgcaggccgagcagagaaacagagacctgcaggccgacaaccagagactgaagtacgaggtggaggccctgaaggagaagctggagcaccagtacgcccagagctacaagcaggtgagcgtgctggaggacgacctgagccagaccagagccatcaaggagcagctgcacaagtacgtgagagagctggagcaggccaacgacgacctggagagagccaagagagccaccatcgtgagcctggaggacttcgagcagagactgaaccaggccatcgagagaaacgccttcctggagagcgagctggacgagaaggagagcctgctggtgagcgtgcagagactgaaggacgaggccagagacctgagacaggagctggccgtgagagagagacagcaggaggtgaccagaaagagcgcccccagcagccccaccctggactgcgagaagatggacagcgccgtgcaggccagcctgagcctgcccgccacccccgtgggcaagggcaccgagaacaccttccccagccccaaggccatccccaacggcttcggcaccagccccctgacccccagcgccagaatcagcgccctgaacatcgtgggcgacctgctgagaaaggtgggcgccctggagagcaagctggccgcctgcagaaacttcgccaaggaccaggccagcagaaagagctacatcagcggcaacgtgaactgcggcgtgctgaacggcaacggcaccaagttcagcagaagcggccacaccagcttcttcgacaagggccaggagaaggtgatcttccccaccctgttcatgggccagtag

SEQ ID NO: 28978 - DNA, 1104 bp, Artificial Sequence
  derived and/or modified sequence
atggatggtgaagacatccctgatttttcttccctgaaagaagagactgcttactggaaggagttgtctttgaagtataaacagagttttcaagaagcccgagatgaactggtcgaattccaggagggctctcgagaactggaagccgagttggaggcacagctggttcaagccgaacagcggaatagagatctgcaggcagacaaccaacggcttaagtatgaggtggaagctctcaaagaaaagctggagcatcagtatgcccagtcctacaagcaggtgagcgtgctcgaggacgacttgtctcaaacaagagccataaaggaacagctccacaagtatgtgcgcgaactcgagcaggcaaacgacgatctggagagggcaaaacgggccacaatagttagtttggaggacttcgagcagagactcaatcaggccatcgagaggaatgccttcctcgaatccgagcttgatgagaaagaatcattactggtctccgtccagagacttaaggatgaggcccgcgatctcaggcaggagctggctgtcagagagagacagcaggaggtaactcgaaaaagcgcgcccagttccccgactttggactgcgaaaagatggattctgcagtgcaggcctccctaagtttgcccgccacgccagtaggaaagggaactgagaacacttttccatctcctaaggctatccctaatggcttcggcacgagcccacttacacccagcgcacgcattagtgctcttaatatagtgggagacctcctccggaaggttggcgccctcgagtcaaaactcgctgcttgccgtaatttcgccaaagatcaggcatcacggaagtcctacatctctggtaacgtcaactgtggtgtgctgaacggcaacggtactaagttttcacggtccgggcacaccagcttttttgacaagggaagttcatcatcttgcgccataagagccagccgccggaggttttctagttcaagcgcagaccttgccggtcggggcggcggtgatgggagtatcccagcacagcatagtacaggcgcctccggtaaggcccctccacccactctcctgctcgagacctag

SEQ ID NO: 28979 - DNA, 987 bp, Artificial Sequence
  derived and/or modified sequence
atggacggcgaggacatcccggacttcagctcgctgaaggaagagactgcatattggaaagagttgagcctgaagtataagcaaagcttccaggaagcaagagacgagctggtagagttccaggagggatctcgtgagctcgaggccgaactggaggcccagctggttcaggccgagcagcgaaaccgtgatctgcaggcagacaatcagagattgaagtacgaagtagaagctttaaaggaaaaactggagcatcagtatgcccagagctataagcaggtgtctgtactcgaagatgacctgagccaaacccgcgcgatcaaagagcagcttcacaagtatgtgcgggaactggaacaggccaacgatgacctcgagcgtgcaaaaagagccactattgtgtcattagaggatttcgaacaacgcctcaatcaagccatcgaacgaaatgcttttcttgaaagtgagctagatgaaaaggagtcactcctggttagtgtccagagattaaaggatgaggcccgagacctgcgtcaggagctggcagtcagagaaagacaacaagaggtgacccgcaaatctgctcccagcagcccaaccttagactgcgagaaaatggattcagctgtgcaggcatccctgtctctgcctgcgacacctgtcggcaaagggaccgaaaatacattcccttcccccaaggccatccccaatgggttcgggacaagcccactgacgccctctgcgcgcatctccgctctgaatatcgtgggagacctgctgcggaaagtgggtgctctggaatccaagctagctgcttgtcggaactttgccaaggatcaggcttccaggaagagctacattagcgggaacgtgaactgcggagtgctgaacggaaatggaacaaaattctcccggtccggacacacatcctttttcgataagggtcaggagaaagtgattttccccaccttgttcatgggacagtag

SEQ ID NO: 28980 - DNA, 1104 bp, Artificial Sequence
  derived and/or modified sequence
atggatggagaggacatcccagacttcagcagcctgaaggaggagacagcctactggaaggagctgagcctgaagtacaagcagagcttccaggaggccagagatgagctggtggagttccaggagggcagccgggagctggaggccgagctggaggcccagctggtgcaggccgagcagaggaacagagacctgcaggccgacaaccagaggctgaagtatgaggtggaggccctgaaggagaagctggagcaccagtatgcccagagctacaagcaggtgtctgtgctggaggatgacctgagccagacccgggccatcaaggagcagctgcacaagtatgtgcgggagctggagcaggccaatgatgacctggagcgggccaagagggccaccatcgtgtccctggaggactttgagcagaggctgaaccaggccattgaaagaaatgccttcctggagagcgagctggatgagaaggagagcctgctggtgtctgtgcagaggctgaaggatgaggcccgggacctgcggcaggagctggccgtgcgggagcggcagcaggaggtgaccaggaagagcgcccccagcagccccaccctggactgtgagaagatggacagcgctgtgcaggccagcctgagcctgcctgccacccctgtgggcaaaggaacagagaacaccttccccagccccaaggccatccccaatggatttggcaccagccccctgaccccatctgcccgcatcagcgccctgaacatcgtgggggacctgctgaggaaggtgggcgccctggagagcaagctggccgcctgcaggaactttgccaaggaccaggccagcaggaagagctacatctctggaaatgtgaactgtggggtgctgaatggaaatggcaccaagttcagccgcagcggccacaccagcttctttgacaagggcagcagcagcagctgtgccatccgggccagcagaagacgcttcagcagcagcagcgctgacctggccggccggggcggcggagatggcagcatcccagcccagcacagcactggagccagcggcaaggcccccccacccaccctgctgctggagacctag

SEQ ID NO: 28981 - DNA, 987 bp, Artificial Sequence
  derived and/or modified sequence
atggatggagaggacatcccagacttcagcagcctgaaggaggagacagcctactggaaggagctgagcctgaagtacaagcagagcttccaggaggccagagatgagctggtggagttccaggagggcagccgggagctggaggccgagctggaggcccagctggtgcaggccgagcagaggaacagagacctgcaggccgacaaccagaggctgaagtatgaggtggaggccctgaaggagaagctggagcaccagtatgcccagagctacaagcaggtgtctgtgctggaggatgacctgagccagacccgggccatcaaggagcagctgcacaagtatgtgcgggagctggagcaggccaatgatgacctggagcgggccaagagggccaccatcgtgtccctggaggactttgagcagaggctgaaccaggccattgaaagaaatgccttcctggagagcgagctggatgagaaggagagcctgctggtgtctgtgcagaggctgaaggatgaggcccgggacctgcggcaggagctggccgtgcgggagcggcagcaggaggtgaccaggaagagcgcccccagcagccccaccctggactgtgagaagatggacagcgctgtgcaggccagcctgagcctgcctgccacccctgtgggcaaaggaacagagaacaccttccccagccccaaggccatccccaatggatttggcaccagccccctgaccccatctgcccgcatcagcgccctgaacatcgtgggggacctgctgaggaaggtgggcgccctggagagcaagctggccgcctgcaggaactttgccaaggaccaggccagcaggaagagctacatctctggaaatgtgaactgtggggtgctgaatggaaatggcaccaagttcagccgcagcggccacaccagcttctttgacaagggccaggagaaggtgatcttccccaccctcttcatgggccagtag

SEQ ID NO: 28982 - DNA, 2398 bp, Artificial Sequence
  derived and/or modified sequence
agaatggcctcggacacccaggcagtccctgacgtgtcggggaggagccgggcgcggaggtacgctgagtggagctcggggctgcgtaggggagctgagccgagcggctgggcgggcctggccgggccggcggaggggagacgtcggttgagcggcggcgaacatgcgcttttgacacattggaggctttcttgatcatggatggtgaagatataccagatttttcaagtttaaaggaggaaactgcttattggaaggaactttccttgaagtataagcaaagcttccaggaagctcgggatgagctagttgaattccaggaaggaagcagagaattagaagcagagttggaggcacaattagtacaggctgaacaaagaaatagagacttgcaggctgataaccaaagactgaaatatgaagtggaggcattaaaggagaagctagagcatcaatatgcacagagctataagcaggtctcagtgttagaagatgatttaagtcagactcgggccattaaggagcagttgcataagtatgtgagagagctggagcaggccaacgacgacctggagcgagccaaaagggcaacaatagtttcactggaagactttgaacaaaggctaaaccaggccattgaacgaaatgcatttttagaaagtgaacttgatgaaaaggaatctttgttggtctctgtacagaggttaaaggatgaagcaagagatttaaggcaagaactagcagttcgggaaagacaacaggaagtaactagaaagtcggctcctagctctccaactctagactgtgaaaagatggactccgccgtccaagcatcactttctttgccagctacccctgttggcaaaggaacggagaacacttttccttcaccgaaagctataccaaatggttttggtaccagtccactaactccctctgctaggatatcagcactaaacatcgtgggggatctcttacggaaagtaggggctttagaatccaaattagcagcttgcaggaattttgcaaaggaccaagcatcacgaaaatcctatatttcagggaatgttaactgtggggtgctgaatggcaatggcacaaagttctctcgatcagggcatacatctttcttcgacaaagggcaagaaaaagtcatatttcccacgttgttcatggggcagtaaacggctttgaccccgctcctcctcctcctggtctgggctcctcgcgtccatcgtcagcgccgggtatgctgcctctcagtgtgtgagtgcctagcctccaggtgggggctcctgccctcctccaacaacccaggacacccacgcctcacccctcggtgcctgggcccagccccgtgcccctccgtctgcctccgcacggctggcagagggcaggctgcatgcagtggcggctactgggccctgcccagccccggaactctgcgcgatatcaatactggctattttctcttctcgccgtagtgccgttggtttcacatgattgcacttttgtgggtcgcaaggtgatacatacgtgtattacttggtcactggatgcagaagtacccattcatcacacctgccccatagcccccactctgctgtactgataggatttagttgtgttttaggacattgcaaatcttctagaagttctcccccaaatcaggtcaatgtgtgccctcctgagctcccacccaggcatctccagtgctcatgatcatgtgtcccccaactccacccctcacagtttgggcctgtttctggcaaagagtcaggaaggttactgaattagggaacattttctgcaccttctgattttacttaagcagctaccattccatggacttgcctcccagagcagcacaatgcccgtctgagccccacgtggcaggagcctctgggacggggcacacacaggcccagcctctgtgctgtctcctcctccgtgcgcctcagactcggggtgagggaggcgggcagcctctcgccagccttcccgtccttcagttcaacgacatctttggagtgtttttgttttctcttccaagggccgtcccgttgtgttaggaagggtgagtggctggttccagggtgggccggtgccagctccggggtggactgaacagcggcggctgtccctgtgcatcctttgattactctcatgctgcatttactgtttacatttgttttattgtacataggtttgtaaacattattgcctgagatatttgtatataacttgggctttgtagcttttatttattcagaacgcatacggcatgttaatgactctgatggtgtcctcctctgggcagctgtataggatcatcatgtggttacaaaaaatacttccctcaaaaaaattcttttaatgtggaaacaataaatttcac

SEQ ID NO: 28983 - DNA, 1104 bp, Artificial Sequence
  derived and/or modified sequence
atggacggcgaggacatccccgacttcagcagcctgaaggaggagacagcttattggaaagagctttcccttaaatacaaacaatcgttccaggaggctagagatgaattagttgagtttcaggaagggagtagagaactcgaagccgagcttgaggcccagctggttcaagctgagcagcggaatcgtgatttacaagccgacaaccagcggcttaagtatgaagtggaggccctgaaggagaagctggagcaccaatacgcccagagttacaaacaggtcagcgtgcttgaggacgatctcagccagacgcgagctattaaagagcagctccacaagtatgtccgcgaactagaacaggctaatgatgacctggaacgtgccaaaagggctaccattgtaagtttagaggacttcgaacagcgactgaaccaggccatcgagagaaacgcgtttcttgaatcagaactggacgaaaaggagtcgctcctggtcagtgtacagcgattaaaggatgaggcacgcgacctgcgacaggaactggccgtccgggagaggcagcaagaagtgactcggaaatctgctccctcttcaccaaccctcgattgcgaaaaaatggacagtgctgtacaagcctctctcagcctgcccgccactccggtcgggaagggtaccgaaaatacatttccatccccaaaggctattccaaatgggttcggcacgtcacccctcacaccttcagctcggatcagcgccctgaacatcgtcggtgatttgctacggaaggtgggcgccctggaatctaaattggcagcttgcagaaactttgcaaaagaccaagcctctagaaagagttatattagcggcaacgtaaactgcggggtactcaatggaaacggaaccaagttcagccgttctgggcacacctccttttttgataaagggtctagctctagttgcgcgatccgcgcatccagacgccgattttcgtcgtcctctgctgatctggcagggagaggggggggtgacggctcgatcccggcgcaacatagcaccggggcatctggtaaggcccccccccctactctgctactggaaacctag

SEQ ID NO: 28984 - DNA, 987 bp, Artificial Sequence
  derived and/or modified sequence
atggacggcgaggacatccccgacttcagcagcctgaaggaggagacagcatactggaaggagctctcactcaagtacaaacagtccttccaagaggcgagggacgagctggtagaatttcaagaaggctcccgagagctcgaagctgaactagaagctcagctcgtgcaggccgagcagaggaaccgggaccttcaggcagacaaccaaaggctcaaatatgaggtggaggccctcaaagagaaattggagcaccaatacgcccagtcttataaacaggtaagcgttttagaggatgaccttagtcagactcgtgctatcaaggagcaactccacaaatacgtccgggagctggagcaggctaacgacgatctggaacgggctaagcgcgcgaccatagtgagtctcgaggacttcgaacagagactgaaccaagctatcgaacgcaacgccttcttagaaagcgagttagacgagaaagagagcctcctcgtgtccgtgcagcgactgaaggacgaggcgcgagatcttcgacaggagctggcagtgagggagagacagcaggaagtgaccaggaaatcagccccatccagcccaacattggactgtgagaagatggacagtgcggtccaggccagccttagcctgcccgctacccctgttgggaagggcactgagaataccttccctagccccaaggctataccaaacggtttcgggacaagcccacttacaccttctgcccgaatctctgccctcaacatagtcggcgacttgctgcggaaggttggggccctggaatctaaactggccgcgtgccggaactttgccaaggatcaggcatcccggaagtcgtacatcagcgggaatgtaaattgcggggtgctcaatggaaatggtactaaattttcaagaagcggacacacgtcctttttcgacaaaggacaggaaaaggtcatctttcccactctgttcatgggacagtag

SEQ ID NO: 28985 - DNA, 1104 bp, Artificial Sequence
  derived and/or modified sequence
atggatggtgaggacatcccagatttctcatcactcaaggaggaaaccgcttattggaaagaactgtccttgaagtataagcagtcattccaggaggcaagggatgagctggtggaatttcaagaaggaagcagggagctggaggcagaactcgaagcccagcttgtgcaggctgagcagcgaaatagagacctgcaggctgacaaccagcggctgaagtatgaggttgaggcactgaaggagaagctagaacatcagtatgcacagtcttataaacaagtgtctgtcctggaggatgacctttcccagacacgagccattaaagaacagcttcataagtatgtcagagagttggaacaagcaaatgatgacctagaacgggctaaacgtgccacaatcgtgtcattggaagattttgagcagagactgaatcaggcaatcgaaaggaatgcttttctggagtccgaactcgacgagaaggagtctctgctggttagcgtgcagcgcctcaaggacgaggcccgagatctacggcaagaactggccgtgcgcgagagacagcaggaagtgactcgcaagtccgctccctcatcccccaccctggattgcgagaaaatggattccgctgtgcaggcctccctgagccttcctgccactccagtcgggaaggggacagagaacactttcccatcaccgaaggccattcccaacggattcggtacttcgcctctgaccccctctgcacggatctccgctctgaatatcgtgggagatctactgcgtaaggtcggggctttggaatctaagctggctgcatgccgcaactttgcgaaagaccaggcatctcgcaaatcatatatcagtgggaacgtgaactgtggggtgttgaacggcaacgggacgaagttttcaaggtccggacacacctcttttttcgacaagggctcatcaagcagctgcgccatacgagcaagcagaaggcggttttcctcctctagtgctgacttagccggtcgagggggaggggacgggtctatccccgcacagcacagtacgggcgcaagtggcaaggccccacctcccacccttctccttgagacttag

SEQ ID NO: 28986 - DNA, 987 bp, Artificial Sequence
  derived and/or modified sequence
atggatggagaggatatccctgatttttcttcactaaaggaggagaccgcctactggaaggagctcagccttaagtacaaacaatcattccaggaggcacgggatgagctggtggaatttcaagagggatctagagagctggaagccgagttagaggcccaactcgtacaggccgaacagaggaacagagacttacaggccgacaatcagcggctgaaatatgaggtggaggctttgaaagaaaaacttgaacaccagtatgcccagtcctacaaacaggttagcgtgcttgaggatgatctgtcccagacacgagccatcaaggagcagctgcataaatacgtacgcgagctggaacaggccaatgatgatctggaacgggctaagagggcgaccatagtgagcctggaagactttgagcaacgtctgaaccaggcaatcgaacggaacgctttcctagaatccgaattagacgagaaagagtccttactggtttccgtccagcggctcaaagatgaggcacgcgatcttagacaggagttggccgttcgcgaaaggcagcaggaggtaaccaggaagtcagctccatcctcgcctaccttggattgtgagaagatggactccgcagttcaggcttccttgtccttacctgccacacctgtcggaaagggcacagagaacacattcccatcaccgaaggctattccaaatggttttggaacctctccattgacccccagcgctcgcatcagcgccctcaacatagtgggggacttactgaggaaagtgggcgcactcgagtcaaagttggcggcttgcagaaacttcgccaaggatcaggcctcccgtaagtcctatatctccggtaacgttaattgtggagttctgaatggaaacgggactaagtttagtaggtcagggcacacaagttttttcgacaaaggtcaggaaaaagtgattttccccacccttttcatgggccaatag

SEQ ID NO: 28987 - DNA, 1301 bp, Artificial Sequence
  derived and/or modified sequence
agaatggcctcggacacccaggcagtccctgacgtgtcggggaggagccgggcgcggaggtacgctgagtggagctcggggctgcgtaggggagctgagccgagcggctgggcgggcctggccgggccggcggaggggagacgtcggttgagcggcggcgaacatgcgcttttgacacattggaggctttcttgatcatggatggtgaagatataccagatttttcaagtttaaaggaggaaactgcttattggaaggaactttccttgaagtataagcaaagcttccaggaagctcgggatgagctagttgaattccaggaaggaagcagagaattagaagcagagttggaggcacaattagtacaggctgaacaaagaaatagagacttgcaggctgataaccaaagactgaaatatgaagtggaggcattaaaggagaagctagagcatcaatatgcacagagctataagcaggtctcagtgttagaagatgatttaagtcagactcgggccattaaggagcagttgcataagtatgtgagagagctggagcaggccaacgacgacctggagcgagccaaaagggcaacaatagtttcactggaagactttgaacaaaggctaaaccaggccattgaacgaaatgcatttttagaaagtgaacttgatgaaaaggaatctttgttggtctctgtacagaggttaaaggatgaagcaagagatttaaggcaagaactagcagttcgggaaagacaacaggaagtaactagaaagtcggctcctagctctccaactctagactgtgaaaagatggactccgccgtccaagcatcactttctttgccagctacccctgttggcaaaggaacggagaacacttttccttcaccgaaagctataccaaatggttttggtaccagtccactaactccctctgctaggatatcagcactaaacatcgtgggggatctcttacggaaagtaggggctttagaatccaaattagcagcttgcaggaattttgcaaaggaccaagcatcacgaaaatcctatatttcagggaatgttaactgtggggtgctgaatggcaatggcacaaagttctctcgatcagggcatacatctttcttcgacaaaggctcctcctccagctgtgcgatccgagcttccagacgccgcttctcatccagcagcgcggacctggcggggagaggaggaggggacggttcaatcccagctcagcacagcacaggagcctcagggaaggctcctccacccaccctgttgctggaaacctga

SEQ ID NO: 28988 - DNA, 1104 bp, Artificial Sequence
  derived and/or modified sequence
atggacggcgaggacatccccgacttcagcagcctgaaggaggagaccgcctactggaaggagctgagcctgaagtacaagcagagcttccaggaggccagagacgagctggtggagttccaggagggcagcagagagctggaggccgagctggaggcccagctggtgcaggccgagcagagaaacagagacctgcaggccgacaaccagagactgaagtacgaggtggaggccctgaaggagaagctggagcaccagtacgcccagagctacaagcaggtgagcgtgctggaggacgacctgagccagaccagagccatcaaggagcagctgcacaagtacgtgagagagctggagcaggccaacgacgacctggagagagccaagagagccaccatcgtgagcctggaggacttcgagcagagactgaaccaggccatcgagagaaacgccttcctggagagcgagctggacgagaaggagagcctgctggtgagcgtgcagagactgaaggacgaggccagagacctgagacaggagctggccgtgagagagagacagcaggaggtgaccagaaagagcgcccccagcagccccaccctggactgcgagaagatggacagcgccgtgcaggccagcctgagcctgcccgccacccccgtgggcaagggcaccgagaacaccttccccagccccaaggccatccccaacggcttcggcaccagccccctgacccccagcgccagaatcagcgccctgaacatcgtgggcgacctgctgagaaaggtgggcgccctggagagcaagctggccgcctgcagaaacttcgccaaggaccaggccagcagaaagagctacatcagcggcaacgtgaactgcggcgtgctgaacggcaacggcaccaagttcagcagaagcggccacaccagcttcttcgacaagggcagcagcagcagctgcgccatcagagccagcagaagaagattcagcagcagcagcgccgacctggccggcagaggcggcggcgacggcagcatccccgcccagcacagcaccggcgccagcggcaaggcccccccccccaccctgctgctggagacctag

SEQ ID NO: 28989 - protein, 296 aa, Artificial Sequence
  derived and/or modified sequence
MAAGCCGVKKQKLSSSPPSGSGGGGGASSSSHCSGESQCRAGELGLGGAGTRLNGLGGLTGGGSGSGCTLSPPQGCGGGGGGIALSPPPSCGVGTLLSTPAAATSSSPSSSSAASSSSPGSRKMVVSAEMCCFCFDVLYCHLYGYQQPRTPRFTNEPYALKDSRFPPMTRDELPRLFCSVSLLTNFEDVCDYLDWEVGVHGIRIEFINEKGSKRTATYLPEVAKEQGWDHIQTIDSLLRKGGYKAPITNEFRKTIKLTRYRSEKMTLSYAEYLAHRQHHHFQNGIGHPLPPYNHYS

SEQ ID NO: 28990 - DNA, 510 bp, Artificial Sequence
  derived and/or modified sequence
atggtgccacgggctccaccctgtgcctggctgaggccaggaagacgagcccaggctggcgaggggcctagagatccaggcaatgctgcatggaggactcgaaggacaggattccccgaggccaccgggcccgccagacatcttcagctactctacgtggactttggtcgctggacccacggacggcctgttcctctgtgccgcgccggttggagaccccagtgtcctggagcagcggcagccctagggctggctgggctgggggatcacatatggcctcccggacgtactgtgccgcaggacccaccagcctgggcaccccccagttcgctggcacattcactcggcgcgcctgtgggtgccggggctgcgggctgtccctgtgggccagccattcaccgccccgctcatgcggcatcgccgtcaacatgcctgcccactcctccccagccgcccacctcccacctggaggaaacaatggggcccgctcctcctgcacctggctgttag

SEQ ID NO: 28991 - DNA, 891 bp, Artificial Sequence
  derived and/or modified sequence
atggccgccggctgctgtggggtgaagaaacagaaactaagttcttcaccaccctcaggttctggtggaggaggaggggcttcttccagtagccattgcagtggcgaatcccagtgcagagcgggcgaacttggcctcggcggagctggaaccaggctgaacggactcggagggctgaccggcggcggatcaggcagtgggtgcactctgagcccaccccaaggatgcggcgggggtggaggggggatagctctgagcccgccgccgagctgtggggtgggcactctcttatccaccccggccgccgccacttctagctctccatcgtcatctagtgcggccagcagtagttctcctggatcaagaaagatggttgtgagcgcagaaatgtgttgcttctgtttcgatgtgctctattgccacctgtacggctaccagcagcctcggacacccaggtttacaaatgaaccttacgctctgaaagacagcaggttccccccaatgacgagggacgaactacctaggctgttctgctccgttagcctgctgactaacttcgaagacgtttgtgattacttggattgggaggttggggtgcatggcattcggattgaattcataaacgaaaaaggaagtaaaaggaccgccacctacctcccagaggtcgccaaagaacaaggatgggatcatatccagactattgactccttgctccgaaagggtggctataaagcacccatcacaaatgagttcaggaaaacaatcaagctgacaagatacagatccgagaagatgactctgtcgtacgccgagtacctcgcgcataggcaacatcatcacttccaaaacgggatcgggcacccattgcccccgtacaatcactatagctag

SEQ ID NO: 28992 - DNA, 891 bp, Artificial Sequence
  derived and/or modified sequence
atggctgctggctgctgcggcgtgaagaagcagaagctgagcagcagccccccatctggcagcggcggcggcggcggggccagcagcagcagccactgcagcggggagagccagtgcagagctggggagctgggcctgggcggggccggcacccggctgaatggcctgggcggcctgaccggcggcggcagcggcagcggctgcaccctgagccccccccagggctgcggcggcggcggcggcggcatcgccctgagccccccacccagctgtggggtgggcaccctgctgagcaccccagctgctgccaccagcagcagccccagcagcagcagcgctgccagcagcagcagccctggcagcaggaagatggtggtgtctgctgagatgtgctgcttctgctttgatgtgctgtactgccacctgtatggctaccagcagcccaggaccccccgcttcaccaatgagccctatgccctgaaggacagccgcttcccccccatgaccagagatgagctgcccaggctcttctgcagcgtgtccctgctgaccaactttgaagatgtgtgtgactacctggactgggaggtgggcgtgcacggcatccgcatcgagttcatcaatgagaagggcagcaagaggacagccacctacctgcctgaggtggccaaggagcagggctgggaccacatccagaccatcgacagcctgctgaggaagggcggctacaaggcccccatcaccaatgagttcaggaagaccatcaagctgacccgctacagaagtgagaagatgaccctgtcctatgcagagtacctggcccaccggcagcaccaccacttccagaatggaattggccaccccctgcccccctacaaccactacagctag

SEQ ID NO: 28993 - DNA, 3052 bp, Artificial Sequence
  derived and/or modified sequence
agactgttccaagatggcggcgggttgctgcggggtgaagaagcagaaactgtccagttcgcccccctctggctcgggtggcggtggtggcgcctcctcctcctcccactgcagcggagagagccagtgccgagctggggagctgggactaggaggcgccggtacgcggctcaacgggctgggaggtctaaccggaggaggtagcggcagcggctgtaccctctctcccccccagggctgcggcggcggcggcggggggatcgccctgtcgccacctccgagctgcggagtggggaccctactttctaccccggccgccgccacctcttcctcaccctcctcatcgtccgccgcctcgtcctcatcgccgggctcccggaagatggtggtgtcagcagagatgtgctgcttttgcttcgatgtgctctactgtcacctgtatggataccagcagccccggaccccccgattcaccaacgagccctatgcccttaaagatagccgttttcccccaatgacaagggatgagctgccacggcttttctgctcagtgtctctgctcactaactttgaagatgtctgtgattatttggactgggaggtgggtgtacatggcattagaatagaattcatcaatgaaaaaggatcaaaacgcaccgccacctacctaccggaggttgcaaaggagcaaggatgggaccatatacagaccatagactccttattgaggaaaggaggatacaaagctccgattactaatgaattcaggaaaaccataaaactgaccaggtatcgtagtgaaaagatgaccctgagctatgctgaataccttgctcatcgccagcatcatcatttccaaaatggcattgggcatccccttccgccatacaaccattattcctgacactgagccgcacaaccagtcactgggcctctctgcagacctcttcccaggagaccctacaccttcttggtctagctatctcttttactgtaccattttatgatgatagtttccgttgccatggtgaagcttcgacatcgtcaactaagatcatcatggtaacgggtagaaaaatggcatttgttaagatcctgttttattattttagatcgttgattttttttttgcagcatatataattttgggtttttttttccttataatattatgtagaattttgctttgctgtctcagtcaggtttctgtttttctgtcctccttgcctttcttcccgttttgcttcctgttttccttcttccttcccgttttccttcttccttccctgcctcccttcctttgactgtggatggaagaaagtgtgcagtttttagggattttacttaggttcgtctttagttttcctcagtaagatagttgttttttgatacctgagtttgggattaattcatatcaaattcaggtatttgtatattactcttgatttttgtctgaaattcactttgctatgacagcctagtagttgggtcttcactccttaagtatatgtttttcccatggtgaaaatacatgaactttagttctagtagtgagcattcaaaggtccgtgatagggcttgtcacagagagagagaaatcatttatccctattgtgctggttatcatagaagagactgcctcaccactttatagaaccaatttgcaaactaaaacactgtttggagaaggtacaaactacctttcaaaaaggctacaggaaacattttatgagcagcaaatattaggaagagagcagatacagaatttagtgcctttgagaagaatataattaagtggaattaagaggggttagaaaaaaggcaatttagaaaaatattcttgtaaaactttattgtttctatatgtgaaacagaagattagacaaattccttactcttaagtatttttttaagctgaaaaaaaattattttgagcaaataaccaataagagacatttgtctattttatattaatttaaatttgttagctctaggtttcaataagtcatgattggctagaatccattttagctaccatctaaagatatggtaaagataatttagtaaaacaaaagttcatatttgccatgatttcagatatgtttgtcatggggacaatattagagttttagagatactataaaatagcttgaatttctttctgcactacatacttttgatagaaacacatttactacattgataagatgttatgtcacacctgtgaaaatggagttggcattcagatatgctatagttagagcccagctcatctgcaagtatagtcttcccatgatgcatacaaagataacttactgatgtcgataggaggtccatacatatatccccaggaaaaatgacagattattctggaggaagatgaccttcattttatggttatgtgtgtgtgtctgtgtgtctttggaaaaatatatataattttttcaaataggaagccaacatatcaagtgatgaattaaagtatgctgcagaatatatattctaaaactacaaaaaagtcactgaatatcaaaatgatacagcttatacatatagttactgtgacaagtgacagactgctagttcagaattcaaaaatcctttcctagtttgtgagataatgggctaaattccttctgcctgccactggggcaaagcaaattgctttagtttttgatgagagttcttagaagtttgttggtattccttcatccacagcatccattgttgaaataaccattttcagttgtgatgccttaactaagaagccaattgttagcctgaaatgcaatcttggtagccagtttcaatgaagctagagattagtcagaaaaagttagctgttgggctttagaaagggattttgagtcctgtcatttctacttgggagcattttggagcagattagtctttcagtataaaaacaagtggctacctgatggaaacttttcttacccttatagggaaactgagcacaagctgaatgatattgtctgctgcaaaaaaaaacaaacaaaaaaaaaacaaaacaaaaaacaaaaaaaaggaaaaa

SEQ ID NO: 28994 - DNA, 891 bp, Artificial Sequence
  derived and/or modified sequence
atggccgccggctgctgcggcgtgaagaagcagaagctgagcagcagtccccccagtggctccggtggaggaggcggtgcgtcctcctcctcacattgtagtggagagagccagtgcagggctggcgagctagggctggggggcgccggcaccaggcttaacgggctgggtggtctgacaggcgggggtagcggctccggttgcacccttagtcctccgcaaggctgcggtggcggaggcggtggaattgccctgtccccacctccgtcttgcggagttggcacactgctgagcacacccgcagccgctacctcaagcagcccttcttcctcgtctgcagcctccagcagttctcccggctcacggaagatggttgtcagcgccgaaatgtgctgtttttgttttgacgttttgtattgccacctgtatgggtatcagcagcccaggacaccccgattcactaacgaaccttacgcgctgaaggattcccgatttccacctatgactcgtgacgaactgcctcggctcttctgctccgtcagcctgctcactaattttgaggatgtatgtgattacctcgactgggaggtgggtgtccacgggattagaattgagttcattaacgaaaagggctccaagcgtaccgcaacttacctgccagaagttgcgaaagagcaaggatgggaccacatccagaccatagacagtctgcttcgtaagggagggtacaaagctccgattaccaacgaatttagaaaaactattaagctcacgcgttataggtcagagaaaatgactctgtcctatgccgagtatctggcccatcgtcagcaccatcatttccagaacggtattggccaccccttaccaccctacaaccactactcatag

SEQ ID NO: 28995 - DNA, 891 bp, Artificial Sequence
  derived and/or modified sequence
atggctgccggatgttgtggtgtgaaaaagcagaagctctcctcctctcctccctctggctcgggtggcggaggcggagcaagctcctcatcccactgctctggggaatctcagtgcagagccggagagcttgggctgggtggcgctgggactcgattgaatggcctggggggattaactggtggagggagtgggtctggatgtacactctctcctccccagggctgcggcggaggaggagggggtatcgcactgtcgcccccaccttcctgtggcgtgggaactttgctgtctacacctgccgctgcaacgagttctagcccctcctcatcatccgccgctagtagcagcagccccggttcccggaagatggtggtgagcgccgaaatgtgttgcttctgcttcgatgttctgtattgccacctctatggctatcagcagccacggacaccacggtttaccaacgagccctatgccttgaaagactcacggtttcctccgatgactcgtgacgagctcccacgcctcttctgctcggtttctctgttaactaacttcgaagacgtgtgtgactatttggactgggaagtcggtgtgcacggaattcgaatcgagtttatcaacgagaagggctctaaacgtacggccacttacctgcccgaagttgcgaaagagcagggttgggatcatatacagaccatcgactcactgctcagaaagggagggtacaaggcaccaatcacaaacgaattccggaagaccatcaagctgacacggtatcggtcagagaaaatgacgctgtcttacgctgaatacctcgcacaccgtcagcatcaccactttcaaaacgggataggacaccccctgccaccctacaatcactattcctag

SEQ ID NO: 28996 - DNA, 891 bp, Artificial Sequence
  derived and/or modified sequence
atggccgccggctgctgcggcgtgaagaagcagaagctgagcagcagcccccccagcggcagcggcggcggcggcggcgccagcagcagcagccactgcagcggcgagagccagtgcagagccggcgagctgggcctgggcggcgccggcaccagactgaacggcctgggcggcctgaccggcggcggcagcggcagcggctgcaccctgagccccccccagggctgcggcggcggcggcggcggcatcgccctgagccccccccccagctgcggcgtgggcaccctgctgagcacccccgccgccgccaccagcagcagccccagcagcagcagcgccgccagcagcagcagccccggcagcagaaagatggtggtgagcgccgagatgtgctgcttctgcttcgacgtgctgtactgccacctgtacggctaccagcagcccagaacccccagattcaccaacgagccctacgccctgaaggacagcagattcccccccatgaccagagacgagctgcccagactgttctgcagcgtgagcctgctgaccaacttcgaggacgtgtgcgactacctggactgggaggtgggcgtgcacggcatcagaatcgagttcatcaacgagaagggcagcaagagaaccgccacctacctgcccgaggtggccaaggagcagggctgggaccacatccagaccatcgacagcctgctgagaaagggcggctacaaggcccccatcaccaacgagttcagaaagaccatcaagctgaccagatacagaagcgagaagatgaccctgagctacgccgagtacctggcccacagacagcaccaccacttccagaacggcatcggccaccccctgcccccctacaaccactacagctag

SEQ ID NO: 28997 - protein, 96 aa, Artificial Sequence
  derived and/or modified sequence
MRVTSATCALLLALICSVQLGDACLDIDKLLANVVFDVSQDLLKEELARYNPSPLTEESFLNVQQCFANVSVTERFAHSVVIKKILQSNDCIEAAF

SEQ ID NO: 28998 - DNA, 291 bp, Artificial Sequence
  derived and/or modified sequence
atgcgggtgaccagcgccacctgcgccctgctgctggccctgatctgcagcgtgcaattgggcgacgcttgtctcgacatcgacaaattgttggccaacgtagtctttgacgtgagtcaagacctgctgaaggaggagctcgctagatataatccctcccccctgactgaggagagtttcctgaatgtgcagcagtgcttcgctaatgtgagcgttactgagcgtttcgctcacagcgttgtcatcaaaaagattttacaatctaatgattgtattgaagccgccttctag

SEQ ID NO: 28999 - DNA, 291 bp, Artificial Sequence
  derived and/or modified sequence
atgcgagtgacatcagctacctgcgctctgctgctggcgttgatctgtagcgttcagctaggcgatgcttgtctggatatcgacaaacttctggccaatgtagtgttcgacgtgtctcaggacctgcttaaagaagagctcgcccgttataacccttcccctctgactgaggagagtttccttaatgttcagcagtgcttcgcaaacgtgagcgtgacagagcgctttgcacactctgtggttataaagaaaatcctgcagtctaatgattgtatagaggctgcgttttag

SEQ ID NO: 29000 - DNA, 291 bp, Artificial Sequence
  derived and/or modified sequence
atgagggtaaccagtgccacctgtgccctgctgctggctctcatttgctctgttcagctcggggatgcctgtctggatattgataagctcttggccaacgtggtgttcgacgtatcgcaggaccttttgaaagaggaattggccaggtataatccctcacccctcactgaggagtcattcctgaatgtgcagcagtgtttcgccaacgttagtgtcactgagaggttcgctcactcagttgtgattaaaaaaatcctccagagcaacgattgtatcgaggcagccttctag

SEQ ID NO: 29001 - DNA, 291 bp, Artificial Sequence
  derived and/or modified sequence
atgagagtcacttctgccacctgcgccttactgctggccttgatctgttctgtgcaattaggcgatgcatgtctcgatatcgataagctcctggctaatgtggtatttgacgtgtctcaggatctgctgaaagaggaattagcccgctataaccccagtcctctcacagaagagtcctttctgaatgttcaacaatgctttgctaacgtgtctgtgaccgagagattcgcacattccgtggtgatcaaaaagatccttcagtcgaatgactgtattgaggctgccttctag

SEQ ID NO: 29002 - DNA, 291 bp, Artificial Sequence
  derived and/or modified sequence
atgcgcgttacaagcgccacatgcgccctcctgttagccctgatctgtagcgtgcaattgggtgatgcctgtctggatattgataaactccttgctaatgtagtttttgatgtgagccaggacttgcttaaggaggagcttgctagatacaacccctcgcctctgaccgaagaatcctttttgaatgttcagcaatgtttcgcaaacgtaagcgttactgaaaggttcgcccatagtgttgtcatcaagaaaattttacaatcgaacgattgcattgaggctgctttttag

SEQ ID NO: 29003 - DNA, 291 bp, Artificial Sequence
  derived and/or modified sequence
atgagagtgaccagcgccacctgcgccctgctgctggccctgatctgcagcgtgcagctgggcgacgcctgcctggacatcgacaagctgctggccaacgtggtgttcgacgtgagccaggacctgctgaaggaggagctggccagatacaaccccagccccctgaccgaggagagcttcctgaacgtgcagcagtgcttcgccaacgtgagcgtgaccgagagattcgcccacagcgtggtgatcaagaagatcctgcagagcaacgactgcatcgaggccgccttctag

SEQ ID NO: 29004 - DNA, 291 bp, Artificial Sequence
  derived and/or modified sequence
atgagggtcaccagcgccacatgtgcattactgttggccctgatatgctcagtgcagctgggggacgcatgcctggacatagacaaactgttagccaacgtggtgttcgacgtgagtcaggacctgctgaaggaggagctcgctcggtataaccccagtcccctcaccgaggaatctttcctgaacgtgcagcagtgcttcgctaatgtctctgtgacggagagattcgcccactcagtagtgattaagaaaatcctacagagtaacgattgtattgaagctgcattctag

SEQ ID NO: 29005 - DNA, 291 bp, Artificial Sequence
  derived and/or modified sequence
atgagagtgacgtcagcaacctgtgccctgcttctcgcgctgatctgttccgtgcagctaggagatgcctgtctcgatatcgataaactattggccaacgtggttttcgacgtgtcccaggacctgcttaaggaagagctcgcccgttacaacccgagccccctgactgaagaaagcttcctgaacgttcagcagtgtttcgccaacgtgagcgtgaccgaaagatttgcccatagcgtggtgatcaagaagatccttcaatccaatgactgcatcgaagctgctttttag

SEQ ID NO: 29006 - DNA, 291 bp, Artificial Sequence
  derived and/or modified sequence
atgagggtgaccagcgccacctgtgccctgctgctggccctgatctgcagcgtgcagctgggagatgcctgcctggacatcgacaagctgctggccaacgtggtgtttgatgtgtcccaggacctgctgaaggaggagctggcccgctacaaccccagccccctgacagaggagagcttcctgaatgtgcagcagtgctttgccaacgtgtctgtgacagaaagatttgcccacagcgtggtgatcaagaagatcctgcagagcaatgactgcatcgaggccgccttctag

SEQ ID NO: 29007 - DNA, 291 bp, Artificial Sequence
  derived and/or modified sequence
atgcgggtgaccagcgccacctgcgccctgctgctggccctgatctgttccgtccagctgggagatgcatgcctggacatcgataaacttttagccaacgtggttttcgacgtgtcccaggatttgctaaaagaagaacttgctcgttataacccctccccgctcactgaggagagtttcctcaatgtgcagcagtgcttcgctaatgtctcggtgacagaaagatttgcccactcagtggtgatcaagaagatactgcagtcaaatgattgcattgaggcagcattctag

SEQ ID NO: 29008 - RNA, 291 nt, Artificial Sequence
  derived and/or modified sequence
augagagucacuucugccaccugcgccuuacugcuggccuugaucuguucugugcaauuaggcgaugcaugucucgauaucgauaagcuccuggcuaaugugguauuugacgugucucaggaucugcugaaagaggaauuagcccgcuauaaccccaguccucucacagaagaguccuuucugaauguucaacaaugcuuugcuaacgugucugugaccgagagauucgcacauuccguggugaucaaaaagauccuucagucgaaugacuguauugaggcugccuucuag

SEQ ID NO: 29009 - RNA, 291 nt, Artificial Sequence
  derived and/or modified sequence
augcgcguuacaagcgccacaugcgcccuccuguuagcccugaucuguagcgugcaauugggugaugccugucuggauauugauaaacuccuugcuaauguaguuuuugaugugagccaggacuugcuuaaggaggagcuugcuagauacaaccccucgccucugaccgaagaauccuuuuugaauguucagcaauguuucgcaaacguaagcguuacugaaagguucgcccauaguguugucaucaagaaaauuuuacaaucgaacgauugcauugaggcugcuuuuuag

SEQ ID NO: 29010 - protein, 373 aa, Artificial Sequence
  derived and/or modified sequence
MAQESPKNSAAEIPVTSNGEVDDSREHSFNRDLKHSLPSGLGLSETQITSHGFDNTKEGVIEAGAFQGSPAPPLPSVMSPSRVAASRLAQQGSDLIVPAGGQRTQTKSGPVILADEIKNPAMEKLELVRKWSLNTYKCTRQIISEKLGRGSRTVDLELEAQIDILRDNKKKYENILKLAQTLSTQLFQMVHTQRQLGDAFADLSLKSLELHEEFGYNADTQKLLAKNGETLLGAINFFIASVNTLVNKTIEDTLMTVKQYESARIEYDAYRTDLEELNLGPRDANTLPKIEQSQHLFQAHKEKYDKMRNDVSVKLKFLEENKVKVLHNQLVLFHNAIAAYFAGNQKQLEQTLKQFHIKLKTPGVDAPSWLEEQ

SEQ ID NO: 29011 - DNA, 1122 bp, Artificial Sequence
  derived and/or modified sequence
atggcccaggagagccccaagaacagcgccgccgagatccccgtgaccagcaacggcgaggtggacgacagcagagagcacagcttcaacagagacctgaagcacagcctgcccagcggcctgggcctgagcgagacccagatcaccagccacggcttcgacaacaccaaggagggcgtgatcgaggccggcgccttccagggcagccccgccccccccctgcccagcgtgatgagccccagcagagtggccgccagcagactggcccagcagggcagcgacctgatcgtgcccgccggcggccagagaacccagaccaagagcggccccgtgatcctggccgacgagatcaagaaccccgccatggagaagctggagctggtgagaaagtggagcctgaacacctacaagtgcaccagacagatcatcagcgagaagctgggcagaggcagcagaaccgtggacctggagctggaggcccagatcgacatcctgagagacaacaagaagaagtacgagaacatcctgaagctggcccagaccctgagcacccagctgttccagatggtgcacacccagagacagctgggcgacgccttcgccgacctgagcctgaagagcctggagctgcacgaggagttcggctacaacgccgacacccagaagctgctggccaagaacggcgagaccctgctgggcgccatcaacttcttcatcgccagcgtgaacaccctggtgaacaagaccatcgaggacaccctgatgaccgtgaagcagtacgagagcgccagaatcgagtacgacgcctacagaaccgacctggaggagctgaacctgggccccagagacgccaacaccctgcccaagatcgagcagagccagcacctgttccaggcccacaaggagaagtacgacaagatgagaaacgacgtgagcgtgaagctgaagttcctggaggagaacaaggtgaaggtgctgcacaaccagctggtgctgttccacaacgccatcgccgcctacttcgccggcaaccagaagcagctggagcagaccctgaagcagttccacatcaagctgaagacccccggcgtggacgcccccagctggctggaggagcagtag

SEQ ID NO: 29012 - DNA, 3091 bp, Artificial Sequence
  derived and/or modified sequence
acttccggcttcgctgctcttggttctggttctggaggctgggttgagaggtcgccggtccgactgtcctcggcggttggtcagtgtgaatttgtgacagctgcagttgctccccgcccccgagcagccgaggtgcgtgggggaaggggaagaaggaaaaggtccgggtcgcgtttccgctcagtttttgccagggttgaggcgattccagagagcggcggaaaggataagcctcgacttagaagctaccgagttaccctaagaaaggagtctaccatggctcaagaatctcccaaaaattcagcagcagaaattccagtgactagtaatggagaagttgatgactctcgtgaacatagctttaatagggatttgaagcattcattaccatctggacttggtctctcagaaacccaaattacatctcatggctttgacaataccaaagagggtgttattgaagcaggagcatttcaaggttccccagcaccgccactgccatctgttatgtctcctagcagggttgcagctagtcgactggctcagcaaggaagtgatttaattgttcctgcaggtggccagagaacacagacaaaaagtggaccagttattctagcagatgaaattaaaaatcctgcaatggaaaagttagaacttgttagaaaatggagtctaaacacctataagtgtactcgacagattatctctgagaagctaggccgtggctcaagaactgtggaccttgaacttgaagctcagattgatatattaagggataacaagaaaaaatatgaaaatattttaaaactggctcaaacattgtcgacccagcttttccagatggtacatacccaaaggcaacttggagatgcatttgctgacctgagtttgaagtcactagaacttcatgaagaatttggctataatgccgatacccagaaactgctggctaaaaatggagagactcttcttggggccattaattttttcattgctagtgtgaacactttggtgaataaaaccattgaagatacattaatgactgtgaaacagtatgaaagtgccaggattgaatatgatgcatatcgcactgatttggaagaactgaatcttggaccacgtgacgcaaacactctgccaaagattgagcagtcacagcatctcttccaagcacataaggaaaaatatgataaaatgcgcaatgatgtttctgtcaaattgaaatttctagaagaaaataaggttaaagtattgcacaatcagctggtccttttccacaatgccattgccgcttactttgctgggaatcagaagcagcttgaacagacacttaaacagttccatatcaaattgaaaacccctggagtggatgccccatcttggcttgaagaacagtaaaatcacagcggaaaataaaaagaaagtcgcgttgttatatttctaaaccaacctaacaagaattaagcagagttgggggaagtgggaggggtgacaagcattatagtgattcttgcacaaacagctttaatttttccctttttcatactttaacaattgaactgttaagggtggttttaatgtaaacatagtttctataatctgaacacaataattttcctttttgagaaatccttttgtattgtgagggttgatggctatttctgtagtttgaaaacatctaatagagatttgcactgacaagataaaaattcaaggtttttggtcctggaaatgagggccgattgtaacttttccaaagggaggtttacatgatttgtatcaacatcagatattttatatgtgaatatattaaacatctttaagagattcattttcatgtattaaagaaaaaagaaactattttgcagagtaaagttatatggtgttcctgcagcgtccacacagaggcagcagctctaatgaatgattagcttgtggagttgtggcaaatacctttttaaaaatgaatctgtaccactgtaattttatttagacttttttttaaagacacagaaatcacactgtcatttctgtgaggcttttaagcttatgaatttgcttcacccgaagtcattggacagttacatttgcaatttcttttggttcataacaaaacctgcttaagagaatttttttttttgacaggtggacgtgggaatggaaattcttaatggtttctggagtagaaatctgtacttagaaaactagtttttgggtcagttccattttgatagaagtgaatacatagacagcttttattgacttccatatgtaacaataccgtttaagccttaaatcacagatatgtgccttctcagatacagtaattcttgttcaaccaatgtacaaaatccataaagaaacccctgttggataatgtttgatgtgtctattccttccatggaatggagcactatgtatgaatgttgggtttctttgtacttgttaagccacatttgaggtttatggtaaaaatcatcttttgagtttgctctttggtttttcttcattccttttgaggattgggaaaacagaaagattctttgatttgggtaatgaagaggtaatttgggacagtgtggtggtaccaggaagaaagaggattggaaaggccagtactgttttagttgctcggcactgttggttttgttttaatgtggttgccctgtccactacatggttctatcagtagtgtaatccattttcaatgtaaagctcttttagtttttgtcatagacataaattaatattttgagaggcatccctcacctgttcatttcttctgtgttgaaatgaagtacttaaaattaccgttatacatgaactttgtggactgtaagatttgttatatatgttcaaatgccttttagctggctttttaattaatatgcctgttttgagtgcttaatacaatgtaatgtgattgtaaatcatacctattttaaatcattccttcctgtatatttgtactcagagagccttattttattcttccagcagaattactacttgtgatagttcatttacattccccagaatgtgcctctagtgtgaattttgtattcttattaaacgtgtttgctgcagtaaa

SEQ ID NO: 29013 - DNA, 1122 bp, Artificial Sequence
  derived and/or modified sequence
atggcccaggagagccccaaaaactcagccgctgaaatccccgtgacctccaacggtgaagtggatgattcgcgcgaacacagctttaatagagatctgaagcattcactgccttcgggactgggcttgtctgagactcaaattaccagccatgggtttgacaacaccaaggagggggtgatagaggccggggcctttcagggttcccccgctcctcctctcccatcagtgatgagtccaagccgcgtggctgcctccaggttggcgcagcagggctctgatctgattgtgccagccgggggccagcgcactcaaaccaaatccggtcccgtcatcctggcagatgagataaaaaaccctgccatggagaagctcgagctagtccggaaatggtcactaaatacatacaagtgtactcgccagatcattagcgagaagcttggcagaggcagccggacagttgatctggagctcgaagcgcagatagacatattgcgcgataacaagaagaagtatgagaatatcctcaaattagctcagaccttatctacccagctcttccaaatggtgcatacacagagacagcttggggacgccttcgctgacttgagtcttaagtccttagagctccacgaagaatttggatacaatgccgatactcagaaactgcttgcaaagaacggtgagaccctccttggggctataaatttctttattgcctctgttaacactttggtaaacaaaacaatagaagacacactgatgacagtgaagcagtacgaatcagcccgcattgaatacgatgcctaccgcactgacttggaagagctgaatcttggtcctcgggacgcaaatacactccccaagattgagcaaagccagcatctgttccaggcccacaaagaaaagtacgataaaatgagaaatgatgtgtccgtcaagctgaagtttctcgaagagaacaaggtaaaggttttacacaatcaactggttctgttccataacgcaattgccgcatattttgcaggaaaccagaaacagttagagcagacactgaaacagtttcacattaaactgaaaacacctggagtagacgctccctcctggttggaagaacagtag

SEQ ID NO: 29014 - DNA, 1122 bp, Artificial Sequence
  derived and/or modified sequence
atggctcaggaatcaccaaagaatagcgctgcagagattccagtgacatccaatggtgaagtggacgactccagggagcactctttcaaccgtgacctcaagcactctctcccctctggattgggcctgtcagagacacagattactagtcatggattcgacaataccaaagagggagtcatcgaggcgggagcattccagggcagcccagctccacctctcccaagtgtaatgtcccccagtcgtgtggctgccagtcggcttgctcagcaggggtctgatctcattgttcctgctggaggccagaggacccaaacaaagagtggtcccgttatccttgctgacgaaatcaagaatccagccatggagaaacttgagctggtgcgcaagtggtccctgaatacatacaagtgcacccgacagatcatttcggagaagctcggccgggggagtcgcacagtggatctcgagttggaggcccagattgacattctccgcgataacaaaaaaaagtacgagaatattctcaaacttgctcagaccttgtccacacagcttttccaaatggttcatacgcagaggcagttaggagacgctttcgctgatcttagcctgaagtccctagagctgcacgaggagttcggatacaacgctgatacccagaagctgttggccaaaaacggtgaaactttattaggggctattaatttcttcattgcaagcgtgaacactctcgtcaataaaacaatagaagataccctgatgaccgtgaaacaatacgaatccgcccggattgaatatgatgcctatagaactgacctcgaggagctgaacctcggaccccgggacgcaaacacactgccaaaaatcgagcagtcgcagcacctcttccaagcacacaaagaaaaatacgacaaaatgcgcaatgacgtcagtgtgaaacttaaatttctcgaggagaataaggtcaaggtccttcacaaccagcttgtcctgtttcataacgccatcgcagcctattttgccggcaaccagaagcaattggagcagactctaaagcagttccatattaagcttaagacccctggcgtagatgccccgagctggttggaggagcagtag

SEQ ID NO: 29015 - DNA, 1122 bp, Artificial Sequence
  derived and/or modified sequence
atggcccaggagagccccaagaacagcgctgctgagatccctgtgaccagcaatggagaggtggatgacagccgggagcacagcttcaacagagacctgaagcacagcctgcccagcggcctgggcctgtctgagacccagatcaccagccacggctttgacaacaccaaggagggcgtgattgaagctggggccttccagggcagccctgccccacccctgcccagcgtgatgagccccagccgggtggccgccagccggctggcccagcagggcagtgacctgattgtgcctgctgggggccagaggacccagaccaagagcggccctgtgatcctggctgatgagatcaagaacccagccatggagaagctggagctggtgaggaagtggagcctgaacacctacaagtgcacccggcagatcatcagcgagaagctgggccggggcagcaggacagtggacctggagctggaggcccagattgacatcctgcgggacaacaagaagaagtatgagaacatcctgaagctggcccagaccctgagcacccagctgttccagatggtgcacacccagaggcagctgggagatgcctttgctgacctgagcctgaagagcctggagctgcacgaggagtttggctacaatgctgacacccagaagctgctggccaagaatggagagaccctgctgggcgccatcaacttcttcatcgcctctgtgaacaccctggtgaacaagaccatcgaggacaccctgatgacagtgaagcagtatgagagcgccagaattgaatatgatgcctacagaacagacctggaggagctgaacctgggccccagagatgccaacaccctgcccaagattgagcagagccagcacctgttccaggcccacaaggagaagtatgacaagatgagaaatgatgtgtctgtgaagctgaagttcctggaggagaacaaggtgaaggtgctgcacaaccagctggtgctcttccacaatgccatcgccgcctactttgctggcaaccagaagcagctggagcagaccctgaagcagttccacatcaagctgaagaccccaggagtggatgcccccagctggctggaggagcagtag

SEQ ID NO: 29016 - DNA, 1122 bp, Artificial Sequence
  derived and/or modified sequence
atggcccaggagagccccaagaacagcgccgccgagatccccgtgacaagtaacggggaggtggacgactctagggaacacagttttaaccgggaccttaagcattcacttccttcaggcctcggactgagtgagacacaaattaccagtcatggatttgataacactaaagagggggtcatcgaggctggtgcttttcagggtagtccggctccgccgctaccatctgtgatgagtccttcccgagtagctgcttcccgactggcacaacagggtagtgatctgatcgtcccagctggaggccagagaacacagacaaaatccgggcccgtgattctggcagacgagataaaaaaccccgcaatggagaagctagagttagtgcggaagtggtctctgaatacttacaagtgtaccaggcagattatcagtgagaagctgggcaggggatccagaactgttgatttggaactcgaagcccaaatcgatatccttagggataataagaagaagtatgaaaacatcttaaaactggcccagacgctgagcacacaactgttccagatggtgcacacccagcggcagttgggagatgccttcgccgacctgtcactgaaaagtttggagctgcatgaagaattcgggtacaacgctgatactcagaagctccttgctaaaaacggcgaaacccttctcggagccattaatttcttcattgcatcagtgaacacgctggtgaataagacaatagaagacacccttatgactgttaaacaatacgaatccgccagaattgagtatgatgcttatcgcactgacctggaagagcttaacttggggccacgtgacgccaatactcttccgaaaattgagcagtcacagcacctatttcaggcacataaggagaagtatgacaagatgcggaatgacgtgtctgtcaagctgaagtttcttgaggagaacaaagtaaaagtgctgcataatcagctcgtgctgtttcacaacgccatcgccgcctattttgccggcaatcagaaacagcttgaacagacattaaagcagttccatatcaagctcaaaacaccaggtgtggacgccccatcatggctggaggaacagtag

SEQ ID NO: 29017 - DNA, 1122 bp, Artificial Sequence
  derived and/or modified sequence
atggcccaggagagccccaagaacagcgccgccgagatccccgtgacaagcaatggggaagtcgatgattcacgcgaacactcttttaacagggacctcaaacatagcctgccaagtggcctgggactctctgaaacacagatcaccagccatggctttgacaatacaaaggaaggcgtgattgaggcaggcgctttccagggctctcccgcaccacccctccccagcgtgatgtccccttcaagggtcgccgccagtaggttggcccaacaaggctctgacctcatcgtacccgcgggggggcagagaactcagactaagtcagggccggtgattcttgctgacgagattaaaaacccagccatggagaaactcgagctggttcggaaatggtcacttaatacatacaagtgcaccaggcagattattagcgaaaagcttggcagagggagcagaaccgtggacctcgaactggaagcccagattgacatccttagggacaacaagaaaaaatatgagaacatcctgaaacttgcccagactctcagtactcaattgtttcagatggtccatactcaacggcagctgggcgatgcttttgcggacctgtcactaaaatctctcgagctgcatgaggaattcgggtacaatgcagatacacagaagcttctggccaagaatggcgaaacattgctcggagctatcaacttcttcatcgcctcagtgaatacattagtaaacaagacaatcgaggacaccctgatgacagttaaacaatatgaaagcgctcggattgagtatgacgcttataggacagatttagaggaactgaatttaggccctagggatgccaacacccttccaaaaattgagcagtcccagcatctgttccaggctcacaaagaaaagtacgataaaatgagaaatgatgtgagtgtgaagctcaaattcttggaggagaataaagttaaggtgctgcacaaccaactcgtacttttccataacgccatcgccgcatatttcgccggtaatcagaagcaactggagcagacgctgaaacagtttcatatcaaactgaagactcccggtgtggacgctccttcatggctcgaagagcagtag

SEQ ID NO: 29018 - DNA, 1122 bp, Artificial Sequence
  derived and/or modified sequence
atggcccaggagtcccctaaaaattctgcggctgagataccagtcacatctaatggtgaagtcgatgactctcgagaacatagttttaaccgagatctgaagcactcgctgccttccggactgggtctgtccgagacccagatcaccagccacggatttgacaacacgaaagagggagtgattgaagctggcgctttccagggatctcctgcaccacctcttccttccgtaatgtcaccctctcgggtggcggcatcaagactggctcagcagggcagtgacttgatcgttcccgctgggggacagcggacgcagactaagtccgggccagtcattctcgctgatgaaataaagaaccccgcaatggagaaattggagcttgtgagaaagtggtctctgaacacctataagtgcacccgccagataatcagtgagaagcttggcagaggctcacggactgtcgacctggagttagaggcacaaatcgatatactgcgggataacaagaaaaagtatgagaatatcctgaagctggctcagaccctctctacgcagctgtttcagatggtccatacccaacgtcagttgggagatgcctttgccgatctgtccctgaagtctctggaactgcacgaggagttcggatacaatgccgacactcagaagttgctggctaaaaacggcgagaccttactgggcgctattaatttcttcatagcatccgtgaacaccctggtaaacaaaaccatagaggatacattaatgactgttaagcagtacgagtccgcaaggatcgaatatgatgcctacaggaccgatcttgaggaacttaatcttggaccgagagatgccaataccttacctaagatcgagcagtcacaacacctgtttcaggctcacaaggagaaatatgacaagatgaggaacgacgtgagcgtgaaactcaaattcctagaggagaacaaggtcaaagtactacataaccagctggttctgtttcacaatgctatcgcggcatactttgcaggtaatcaaaagcagctcgagcaaaccttaaagcagttccacattaaactcaaaactcccggtgtcgacgccccaagctggctcgaagagcagtag

SEQ ID NO: 29019 - DNA, 1122 bp, Artificial Sequence
  derived and/or modified sequence
atggcacaggagtcccccaagaactctgctgccgaaatcccagtcacaagcaacggggaagttgacgattctcgcgagcattcatttaatagggacctaaaacactcccttccctccggattaggactgtccgagacccaaattaccagccacgggtttgacaacaccaaggagggagttatcgaggctggcgcatttcagggctctcccgcaccacccctcccttctgttatgagtccatctagggtggccgcaagccgtctcgcccagcagggcagcgatctcattgtacctgcaggaggccaaaggacccagaccaagagcgggccagtcattcttgcagacgagatcaaaaacccggcaatggagaagctggaactggtaagaaagtggagtctgaacacttacaagtgcaccagacagatcatcagtgagaaactaggcaggggttccaggactgtggatttggagctggaggcacaaatcgacatcctgcgcgacaataagaagaagtacgagaacatcttaaagcttgcacagacattgagcacccagctgtttcaaatggtgcacacccagagacagttgggggacgccttcgccgatttgtctcttaaaagcttggagctgcacgaagagtttggttataacgccgacacccagaaactgttagccaaaaatggtgagaccctcctgggcgcaatcaatttcttcattgcctcagtgaatacgctcgtgaataagaccattgaagacactttaatgacagtcaaacagtacgagagtgctcgcatcgaatacgatgcatacagaaccgacctcgaagaactgaatttaggcccaagagatgctaatacactgcctaagattgagcagtcgcagcatttgtttcaagcccataaggagaaatatgataaaatgcgcaacgatgtgtccgtaaaacttaaatttctggaggagaacaaagtcaaggtcttgcacaatcagctggtactatttcataatgctattgccgcatactttgcgggaaaccaaaagcagctggaacagaccctgaaacagttccacattaagctgaagaccccaggagtcgatgctccatcttggctcgaagaacagtag

SEQ ID NO: 29020 - DNA, 3424 bp, Artificial Sequence
  derived and/or modified sequence
acaacgctacttccggtctcctcacttccggcttcgctgctcttggttctggttctggaggctgggttgagaggtcgccggtccgactgtcctcggcggttggtcagtgtgaatttgtgacagctgcagttgctccccgcccccgagcagccgaggagtctaccatggctcaagaatctcccaaaaattcagcagcagaaattccagtgactagtaatggagaagttgatgactctcgtgaacatagctttaatagggatttgaagcattcattaccatctggacttggtctctcagaaacccaaattacatctcatggctttgacaataccaaagagggtgttattgaagcaggagcatttcaaggttccccagcaccgccactgccatctgttatgtctcctagcagggttgcagctagtcgactggctcagcaaggaagtgatttaattgttcctgcaggtggccagagaacacagacaaaaagtggaccagttattctagcagatgaaattaaaaatcctgcaatggaaaagttagaacttgttagaaaatggagtctaaacacctataagtgtactcgacagattatctctgagaagctaggccgtggctcaagaactgtggaccttgaacttgaagctcagattgatatattaagggataacaagaaaaaatatgaaaatattttaaaactggctcaaacattgtcgacccagcttttccagatggtacatacccaaaggcaacttggagatgcatttgctgacctgagtttgaagtcactagaacttcatgaagaatttggctataatgccgatacccagaaactgctggctaaaaatggagagactcttcttggggccattaattttttcattgctagtgtgaacactttggtgaataaaaccattgaagatacattaatgactgtgaaacagtatgaaagtgccaggattgaatatgatgcatatcgcactgatttggaagaactgaatcttggaccacgtgacgcaaacactctgccaaagattgagcagtcacagcatctcttccaagcacataaggaaaaatatgataaaatgcgcaatgatgtttctgtcaaattgaaatttctagaagaaaataaggttaaagtattgcacaatcagctggtccttttccacaatgccattgccgcttactttgctgggaatcagaagcagcttgaacagacacttaaacagttccatatcaaattgaaaacccctggagtggatgccccatcttggcttgaagaacagtaaaatcacagcggaaaataaaaagaaagtcgcgttgttatatttctaaaccaacctaacaagaattaagcagagttgggggaagtgggaggggtgacaagcattatagtgattcttgcacaaacagctttaatttttccctttttcatactttaacaattgaactgttaagggtggttttaatgtaaacatagtttctataatctgaacacaataattttcctttttgagaaatccttttgtattgtgagggttgatggctatttctgtagtttgaaaacatctaatagagatttgcactgacaagataaaaattcaaggtttttggtcctggaaatgagggccgattgtaacttttccaaagggaggtttacatgatttgtatcaacatcagatattttatatgtgaatatattaaacatctttaagagattcattttcatgtattaaagaaaaaagaaactattttgcagagtaaagttatatggtgttcctgcagcgtccacacagaggcagcagctctaatgaatgattagcttgtggagttgtggcaaatacctttttaaaaatgaatctgtaccactgtaattttatttagacttttttttaaagacacagaaatcacactgtcatttctgtgaggcttttaagcttatgaatttgcttcacccgaagtcattggacagttacatttgcaatttcttttggttcataacaaaacctgcttaagagaatttttttttttgacaggtggacgtgggaatggaaattcttaatggtttctggagtagaaatctgtacttagaaaactagtttttgggtcagttccattttgatagaagtgaatacatagacagcttttattgacttccatatgtaacaataccgtttaagccttaaatcacagatatgtgccttctcagatacagtaattcttgttcaaccaatgtacaaaatccataaagaaacccctgttggataatgtttgatgtgtctattccttccatggaatggagcactatgtatgaatgttgggtttctttgtacttgttaagccacatttgaggtttatggtaaaaatcatcttttgagtttgctctttggtttttcttcattccttttgaggattgggaaaacagaaagattctttgatttgggtaatgaagaggtaatttgggacagtgtggtggtaccaggaagaaagaggattggaaaggccagtactgttttagttgctcggcactgttggttttgttttaatgtggttgccctgtccactacatggttctatcagtagtgtaatccattttcaatgtaaagctcttttagtttttgtcatagacataaattaatattttgagaggcatccctcacctgttcatttcttctgtgttgaaatgaagtacttaaaattaccgttatacatgaactttgtggactgtaagatttgttatatatgttcaaatgccttttagctggctttttaattaatatgcctgttttgagtgcttaatacaatgtaatgtgattgtaaatcatacctattttaaatcattccttcctgtatatttgtactcagagagccttattttattcttccagcagaattactacttgtgatagttcatttacattccccagaatgtgcctctagtgtgaattttgtattcttattaaacgtgtttgctgcagtaaatcgtttctctggaccttcatagtttaagaagtaactatttggaaattctgaagacacataatttgcgttttctgaaccttaaaaaaaaaggtacttctgtcacttataattgttttagctcagtaagctattttttttcaatgtgaatctcttttgagagctgaacatgtccattcttaaccacatttcaataacagttactgtagctaaggagctaaatagtttcatggattaatttttttcagaataaatttaaaatatccatgattctgatagtgggcacatgaccaaaagaaaaaagtaaatcaatatatttagccaatggtacatttactttgttaggaatgtaatttatgttcattatagaaaagaattagaagaaaatttcaagtaatagaagataagtaccttcccaagtgaataaatactgcatggaaccactcaa

SEQ ID NO: 29021 - protein, 1101 aa, Artificial Sequence
  derived and/or modified sequence
MKSRQKGKKKGSAKERVFGCDLQEHLQHSGQEVPQVLKSCAEFVEEYGVVDGIYRLSGVSSNIQKLRQEFESERKPDLRRDVYLQDIHCVSSLCKAYFRELPDPLLTYRLYDKFAEAVGVQLEPERLVKILEVLRELPVPNYRTLEFLMRHLVHMASFSAQTNMHARNLAIVWAPNLLRSKDIEASGFNGTAAFMEVRVQSIVVEFILTHVDQLFGGAALSGGEVESGWRSLPGTRASGSPEDLMPRPLPYHLPSILQAGDGPPQMRPYHTIIEIAEHKRKGSLKVRKWRSIFNLGRSGHETKRKLPRGAEDREDKSNKGTLRPAKSMDSLSAAAGASDEPEGLVGPSSPRPSPLLPESLENDSIEAAEGEQEPEAEALGGTNSEPGTPRAGRSAIRAGGSSRAERCAGVHISDPYNVNLPLHITSILSVPPNIISNVSLARLTRGLECPALQHRPSPASGPGPGPGLGPGPPDEKLEASPASSPLADSGPDDLAPALEDSLSQEVQDSFSFLEDSSSSEPEWVGAEDGEVAQAEAAGAAFSPGEDDPGMGYLEELLGVGPQVEEFSVEPPLDDLSLDEAQFVLAPSCCSLDSAGPRPEVEEENGEEVFLSAYDDLSPLLGPKPPIWKGSGSLEGEAAGCGRQALGQGGEEQACWEVGEDKQAEPGGRLDIREEAEGSPETKVEAGKASEDRGEAGGSQETKVRLREGSREETEAKEEKSKGQKKADSMEAKGVEEPGGDEYTDEKEKEIEREEDEQREEAQVEAGRDLEQGAQEDQVAEEKWEVVQKQEAEGVREDEDKGQREKGYHEARKDQGDGEDSRSPEAATEGGAGEVSKERESGDGEAEGDQRAGGYYLEEDTLSEGSGVASLEVDCAKEGNPHSSEMEEVAPQPPQPEEMEPEGQPSPDGCLCPCSLGLGGVGMRLASTLVQVQQVRSVPVVPPKPQFAKMPSAMCSKIHVAPANPCPRPGRLDGTPGERAWGSRASRSSWRNGGSLSFDAAVALARDRQRTEAQGVRRTQTCTEGGDYCLIPRTSPCSMISAHSPRPLSCLELPSEGAEGSGSRSRLSLPPREPQVPDPLLSSQRRSYAFETQANPGKGEGL

SEQ ID NO: 29022 - protein, 499 aa, Artificial Sequence
  derived and/or modified sequence
MRHLVHMASFSAQTNMHARNLAIVWAPNLLRSKDIEASGFNGTAAFMEVRVQSIVVEFILTHVDQLFGGAALSGGEVESGWRSLPGTRASGSPEDLMPRPLPYHLPSILQAGDGPPQMRPYHTIIEIAEHKRKGSLKVRKWRSIFNLGRSGHETKRKLPRGAEDREDKSNKGTLRPAKSMDSLSAAAGASDEPEGLVGPSSPRPSPLLPESLENDSIEAAEGEQEPEAEALGGTNSEPGTPRAGRSAIRAGGSSRAERCAGVHISDPYNVNLPLHITSILSVPPNIISNVSLARLTRGLECPALQHRPSPASGPGPGPGLGPGPPDEKLEASPASSPLADSGPDDLAPALEDSLSQEVQDSFSFLEDSSSSEPEWVGAEDGEVAQAEAAGAAFSPGEDDPGMGYLEELLGVGPQVEEFSVEPPLDDLSLDEAQFVLAPSCCSLDSAGPRPEVEEENGEEVFLSAYDDLSPALGLLLQPGWGHRSHSSEGQCLRIKAVFL

SEQ ID NO: 29023 - DNA, 3306 bp, Artificial Sequence
  derived and/or modified sequence
atgaaatcccgacaaaagggaaagaagaaagggtctgctaaggaacgagtgtttggatgcgacctgcaggaacatttgcagcactcgggccaggaggtgccgcaggttcttaaaagttgcgccgaattcgttgaggagtatggcgtggtagatgggatctacagactgtcaggggtatccagcaacattcagaagctgcgacaggagttcgagtcagagagaaagcctgaccttcgcagagacgtctatctgcaggacatacattgcgttagcagtctctgcaaagcatacttcagagagctccccgatcccctactcacttatagactgtacgacaagtttgctgaggctgttggcgtccagctagagccagaacgtttagtcaaaatcctagaggtgctccgcgagctgccagtcccgaattatcgcaccctggaattcctcatgcgccatctggtacacatggctagtttctcagcccaaacaaatatgcatgcgcgcaatttagctatagtctgggcccccaacctactcaggagcaaagatatcgaagccagcgggtttaatggcaccgcagctttcatggaggtgcgcgtgcaatcaattgtggtagaatttatcctgacgcatgtcgaccagttgttcggtggcgcagccctgagtgggggcgaagtagagtccgggtggcgctcattaccaggaactagagcatccggctctccagaagatttgatgccgcggccgctgccttatcatctgccctccatcttgcaggctggagacggcccccctcagatgagaccctatcataccatcatcgagatcgccgagcacaaaaggaaagggtccctaaaggtcagaaaatggaggtctatctttaacctcgggagaagcggccacgagacaaaaaggaaactgccccggggcgcggaagatcgggaagataagtccaacaagggcactctccgaccagctaaatcgatggacagcctatctgcggcagctggcgccagtgatgaaccagaagggctggtgggaccctcatcgccaagaccctcgccgctgctgccagagagtctcgaaaatgatagtattgaggcagccgaaggcgagcaggagccggaggccgaagctcttggggggaccaattccgagccggggacgcctcgggccgggcgctccgccattagggctggcggtagttctagggcagaaaggtgtgcaggggtgcacatttcagacccttataatgtcaacctccctctgcatatcacctcaatcctctcggtgcctccaaacataatctccaatgtgtccttggcccggctgaccagaggcctggaatgtcccgccctgcaacatcgcccgagcccagcctctgggcctggacccgggccaggcctgggcccagggcctcctgacgagaaactggaagcatcgcccgccagttctcctttggccgacagtggccccgacgatctggcacccgctttggaggactccctgagtcaggaggtgcaggatagcttttcattcctggaggacagtagctccagcgaacctgagtgggtcggagccgaggacggtgaagtagcacaggccgaagctgccggtgctgcgttcagccccggggaggatgatcccggcatggggtacctggaagaactcctgggtgtcgggccccaggtggaagagttttcagtggagccacccctcgacgacctgagcctggacgaggctcagtttgtccttgccccttcctgctgtagtttggacagcgcaggccccagacccgaggtagaagaggaaaacggcgaggaggtgttcctctctgcgtacgatgacctgtccccccttctggggcccaagccacctatctggaaagggtctgggtcattggagggagaggctgccggctgcggcagacaggcgctgggtcagggtggtgaggagcaggcctgctgggaggtgggcgaagataagcaggccgaacccggggggagactggatattagggaagaggcagagggctcacctgaaacaaaagtagaagcgggcaaggcttccgaggaccggggggaggccggcggatcccaagagactaaggtcagactgcgcgaaggctcgagggaagaaacagaagctaaagaagaaaagagcaaaggtcagaaaaaggccgacagcatggaggccaagggagtcgaggaaccaggaggagacgaatacaccgacgagaaagagaaggagatcgagagggaggaggatgaacaacgggaggaagcccaggtggaggctggtcgcgatttggaacagggtgcccaggaggatcaggtggccgaggaaaagtgggaagtcgtgcagaagcaggaggccgaaggcgtgcgcgaagacgaggataaaggacagcgggagaaaggctatcacgaggcgcgcaaggatcaaggcgatggtgaagacagcagaagccccgaggcagctaccgaaggaggcgcaggggaggtgtcaaaggagcgggagagcggcgacggagaggcagagggcgatcagagagcaggtggatactacctggaagaagacacactgagcgaggggagcggcgtcgcttccctcgaggtcgattgcgccaaggaagggaatccacactcatcagagatggaagaggttgcaccacaacctccccagcccgaagaaatggaacctgagggacagccttccccggatggatgcctttgcccatgtagtctcggactgggtggcgttggcatgagactggcctctaccctggttcaagtgcagcaggtccgctccgtgcctgtggtgcctcctaaaccgcagttcgctaagatgccgtcagctatgtgttctaagatccacgttgcccccgccaatccatgcccccggccgggccgcttagatggaactccaggcgagagagcttgggggagccgggcctctagatcctcttggcgcaacgggggatcactctcatttgacgctgcggtggcgctggccagagatagacaacgaacagaggcgcagggcgttcggagaacacagacctgtaccgaggggggtgattactgtctcatcccccggacttcgccgtgtagtatgatttcagcccactcaccacgacctctgagctgtctcgagctaccttcagagggcgctgaggggtctggatcacggagtaggctttcgctgcccccaagggaaccacaagtacccgaccccttgctgagctcccaacgtagaagttacgccttcgagacccaagcaaatccgggaaagggtgagggcctgtag

SEQ ID NO: 29024 - DNA, 3306 bp, Artificial Sequence
  derived and/or modified sequence
atgaagagccggcagaagggcaagaagaagggcagcgccaaggagcgggtgtttggctgtgacctgcaggagcacctgcagcacagcggccaggaggtgccccaggtgctgaagagctgtgccgagtttgtggaggagtatggagtggtggatggcatctaccgcctgtctggagtgagcagcaacatccagaagctgcggcaggagtttgagagcgagaggaagccagacctgcggagagatgtgtacctgcaggacatccactgtgtgagcagcctgtgcaaggcctacttccgggagctgcctgaccccctgctgacctaccgcctgtatgacaagtttgctgaggccgtgggcgtgcagctggagcctgagcggctggtgaagatcctggaggtgctgcgggagctgcctgtgcccaactaccgcaccctggagttcctgatgaggcacctggtgcacatggccagcttcagcgcccagaccaacatgcacgccaggaacctggccatcgtgtgggcccccaacctgctgcggagcaaggacatcgaggccagcggcttcaatggaacagctgccttcatggaggtgcgggtgcagagcatcgtggtggagttcatcctgacccacgtggaccagctgtttggaggagctgccctgtctggaggagaggtggagagcggctggaggagcctgcccggcacccgggccagcggcagccctgaggacctgatgccccggcccctgccctaccacctgcccagcatcctgcaggccggagatggccccccccagatgaggccctaccacaccatcattgaaattgctgagcacaagaggaagggcagcctgaaggtgaggaagtggaggagcatcttcaacctgggccgcagcggccacgagaccaagaggaagctgcccagaggagcagaagatcgggaggacaagagcaacaagggcaccctgcggcctgccaagtccatggacagcctgtctgctgctgctggggccagtgatgagcctgagggcctggtgggccccagcagcccccggcccagccccctgctgcctgagagcctggagaatgacagcattgaagctgctgagggggagcaggagcctgaggccgaggccctgggcggcaccaacagcgagcccggcacccccagggctggccgcagcgccatccgggccggcggcagcagcagagctgagcgctgtgccggcgtgcacatcagtgacccctacaacgtgaacctgcccctgcacatcaccagcatcctgtctgtgccccccaacatcatcagcaatgtgtccctggcccggctgacccggggcctggagtgcccagccctgcagcaccggcccagccctgccagcggccctggccctggccctggcctgggccctggccccccagatgagaagctggaggccagccctgccagcagccccctggccgacagcggcccagatgacctggccccagccctggaggacagcctgagccaggaggtgcaggacagcttctccttcctggaggacagcagcagcagcgagcctgagtgggtgggcgcagaagatggagaggtggcccaggccgaggccgccggggccgccttcagccctggagaagatgaccccggcatgggctacctggaggagctgctgggcgtgggcccccaggtggaggagttctctgtggagccccccctggatgacctgagcctggatgaggcccagtttgtgctggcccccagctgctgcagcctggacagcgctggccccaggcctgaggtggaggaggagaatggagaggaggtgttcctgagcgcctatgatgacctgagccccctgctgggccccaagccacccatctggaagggcagcggcagcctggagggggaggccgccggctgcggccggcaggccctgggccagggcggggaggagcaggcctgctgggaggtgggggaggacaagcaggccgagcccggcggccgcctggacatccgggaggaggccgagggcagccctgagaccaaggtggaggccggcaaggccagcgaggacagaggagaggccggcggcagccaggagaccaaggtgcggctgcgggagggcagccgggaggagacagaggccaaggaggagaagagcaagggccagaagaaggctgacagcatggaggccaagggcgtggaggagcctggaggagatgagtacacagatgagaaggagaaggagattgaaagagaggaggatgagcagcgggaggaggcccaggtggaggccggccgggacctggagcagggcgcccaggaggaccaggtggccgaggagaagtgggaggtggtgcagaagcaggaggccgagggcgtgcgggaggatgaggacaagggccagcgggagaagggctaccacgaggccaggaaggaccagggagatggagaggacagccgcagccctgaggccgccacagaaggaggagctggggaggtgtccaaggagcgggagagcggagatggagaggccgagggggaccagagagctgggggctactacctggaggaggacaccctgtctgagggcagcggcgtggccagcctggaggtggactgtgccaaggagggcaacccccacagcagcgagatggaggaggtggccccccagcccccccagcctgaggagatggagcctgagggccagcccagcccagatggctgcctgtgcccctgcagcctgggcctgggcggcgtgggcatgaggctggccagcaccctggtgcaggtgcagcaggtgcgctctgtgcctgtggtgccccccaagccccagtttgccaagatgcccagcgccatgtgcagcaagatccacgtggccccagccaacccctgcccccggcccggccgcctggatggcaccccaggagagcgggcctggggcagccgggccagccgcagctcctggagaaatggaggcagcctgagctttgatgctgctgtggccctggcccgggaccggcagaggacagaggcccagggcgtgcggaggacccagacctgcacagagggcggggactactgcctgatccccaggaccagcccctgcagcatgatcagcgcccacagcccccggcccctgagctgcctggagctgcccagcgagggcgctgagggcagcggcagccgcagccggctgagcctgcccccccgggagccccaggtgcctgaccccctgctgagcagccagaggaggagctatgcctttgagacccaggccaaccctggaaaaggagagggcctgtag

SEQ ID NO: 29025 - DNA, 3306 bp, Artificial Sequence
  derived and/or modified sequence
atgaagagccggcagaagggcaagaagaagggcagcgccaaggagcgggttttcggttgtgacctacaggagcatctccaacattccggacaggaggtgccacaagttttaaaatcatgtgcggagttcgtcgaagagtacggtgttgtcgacggaatttaccgcctctctggcgtgagcagcaatattcagaaattaagacaggaatttgagtctgaacggaagcccgacctgcgaagagacgtttacttacaagatatccactgtgtctcgtcattatgcaaggcctacttccgggagctgccagatccccttctcacatatcggctgtatgacaaattcgcagaagcagtgggagtccaattagaacccgagaggctagtcaagatcctggaggtcctccgggagctgccagtcccaaattatagaaccctcgaattcctaatgcggcacctggtacacatggcctccttcagtgcccagaccaatatgcacgcccgcaatctggcgatcgtgtgggctcctaacctacttcgcagtaaggatattgaggcttccgggtttaatggtactgccgcttttatggaagtaagagtgcagagtatcgtagtggagttcattctgactcacgtggaccagttgttcgggggggcagctttgagcggcggcgaggtggaaagtggctggcgctcgcttcccggcacaagagcaagcgggagcccggaggatctgatgcccaggcccctaccttatcacctgccctctatcttacaggcaggggatggtccgcctcagatgcggccctaccacacaatcattgagatcgccgagcacaagaggaaaggctctctaaaagtcagaaagtggaggagtattttcaatttgggcaggtctggacatgagacaaaacgtaaactacccaggggagccgaggacagggaggacaagtctaataaagggacattgcggcccgctaaatcaatggattcacttagtgccgcggccggtgcctcagacgagccggagggcttagtaggtccttcttcccccagaccatccccacttctgcccgagtcactggaaaacgactccatcgaggcagcagaaggcgagcaggagcctgaggctgaagctctgggcggcaccaactccgagcctggcacccccagagctggaaggtcagcgataagagcaggcggatcctcccgagcagagcgatgcgctggagtgcacatcagcgatccctacaacgtaaacttgcccttgcatattacctctatcttgagtgtgccccctaacattatttccaatgtcagcctggccaggctcacacgggggctcgagtgccctgctctgcaacaccgcccttcccccgccagtgggccagggccaggaccgggcctgggccctggccccccggacgaaaagttagaggcctcccctgcgtcttctccacttgcggacagcggacctgacgatcttgcgccagctctagaggatagcctgtcccaggaagtccaggattcattcagtttcttggaagacagcagcagctccgagcccgaatgggtcggagcggaagacggtgaggtggcccaggccgaggctgccggggctgcattctccccgggggaggacgatccaggaatgggatatctcgaggagctcctcggggtcgggccccaagtagaggagttctccgttgaacctccgttggatgacctttcccttgacgaggcgcagtttgtgctggctccgtcctgctgctccctggactccgctgggccccgacccgaggtagaggaggaaaatggcgaagaggtcttcctgtccgcctatgacgacttgtctccgctattaggacccaagccccccatctggaagggctccggctcactggagggggaggctgccgggtgtggccgccaggcattgggacagggcggcgaggagcaggcttgttgggaagttggcgaggacaaacaggctgagccagggggccgactcgacattcgcgaggaggccgaagggagccccgagaccaaggtcgaggctggaaaagcttccgaagatcggggggaagcagggggaagtcaggagaccaaggttcggctgagggaagggtcccgtgaagagactgaggcaaaagaggagaaatccaaaggtcagaaaaaggccgatagcatggaggccaaaggggttgaagagcctggcggtgacgaatacacggatgaaaaggagaaagaaattgagcgagaagaggacgaacagcgtgaagaggcccaggtcgaggcgggcagggacctggagcaaggagcacaggaggaccaggtagctgaagaaaagtgggaggtcgtgcagaaacaggaggcggagggggtgcgggaagacgaggataagggccaacgcgagaaaggctaccacgaggcaagaaaagaccagggtgatggggaggactcccgttctcctgaggctgctacagaaggcggggcaggcgaagtaagcaaagagcgggagtcaggggatggagaggcagagggggatcagcgggctggcgggtattatctggaggaggacaccctgtctgaaggtagcggtgttgctagtctcgaggtggactgcgccaaggaggggaatccacatagttctgagatggaggaggtagcaccccagccaccccagccggaagaaatggaacccgagggacagccctccccagatggctgcctgtgcccttgttccttaggattgggaggagtgggtatgagattggcctctaccctcgttcaggtccagcaagtcaggagtgtgccggtggttccccccaagcctcaatttgccaagatgccttccgcaatgtgcagcaaaattcacgtagccccagcaaacccctgccctaggcctggccgtctagatggaacacccggagagagggcttggggttcccgagctagccgtagctcctggcggaacggagggagtcttagctttgacgccgcagtcgctttggcacgggacagacagagaacagaagctcagggcgtgaggagaacccagacttgtacagaggggggggactattgtcttatacccagaacttcaccttgctctatgatcagcgctcattcaccacggccactgtcttgcctggagttgccatccgaaggagccgaaggttctggctctaggagtcgcctgtcccttcctcctagggagcctcaggtgccggatccgctgctgagctcccagagacgttcatacgctttcgaaacccaggcaaatccaggcaagggcgaaggactgtag

SEQ ID NO: 29026 - DNA, 3306 bp, Artificial Sequence
  derived and/or modified sequence
atgaaatcacgacagaaggggaagaagaaaggttctgcgaaggaaagagtctttgggtgtgacctgcaggagcatcttcagcattccggacaggaagtccctcaagtcttgaagagttgcgcagagttcgtcgaagaatacggggtggtggacggtatttatcgattatccggtgtcagttctaacatacaaaagctgagacaagagttcgagtctgaaagaaagcctgatctgagacgtgacgtgtacctgcaggatattcactgtgtgagcagcctgtgtaaagcctacttccgggaactacccgatccgttactcacgtaccggctgtacgataagtttgctgaggctgtaggggttcagctcgagccggagaggctggtcaaaatcctggaggtgctgagagagctgcctgtcccgaattaccggaccctcgagtttcttatgaggcacttggtgcacatggccagcttcagcgctcagacaaatatgcatgcacgtaaccttgcaatcgtgtgggctcccaacctacttaggtccaaggacattgaggcaagtggcttcaatgggaccgccgctttcatggaagtgagagttcagtccatcgttgtcgaattcatcctgactcacgtggatcagttgtttgggggtgccgctctgtctggaggggaggtcgagtcagggtggaggtccctccccggaactagggcttcgggctcgcctgaggacctcatgcccagacctctgccataccatctcccctcgattctgcaggcaggcgacgggccaccgcagatgcgaccctatcataccatcatagaaatcgctgaacacaagaggaaaggctcgctgaaagtgagaaagtggagatcaattttcaatctgggaaggtcagggcatgagaccaagcgcaagctcccaaggggtgctgaagatagggaagataaatctaataagggaacactgcggccagccaaaagcatggactcactgtctgccgctgccggagccagcgacgaacccgaaggacttgtaggtccttcatcacctagaccttctccgctgctacctgaatctctggagaacgattctatcgaggctgccgaaggcgaacaggaacccgaggccgaggctcttggaggcacaaacagtgagcccggtacccctcgggctggcaggtctgcaatccgagccggtggctcttcccgtgccgagagatgtgccggtgttcatatctccgatccatacaatgtgaatctaccactgcacattacatccatcctgtcagtgcctcccaacatcataagcaatgtatcactggccaggctgaccaggggtcttgaatgccctgcactgcagcaccgtccctctcctgcaagcggccctggccctggtccaggactcgggcctgggccaccggacgagaaattggaggctagtcctgccagcagccctctcgctgatagcggaccagacgacctggcccctgcactggaagattccctctcccaagaggtgcaggattcgttctcatttctggaagacagtagctcgagtgagcctgaatgggtgggggcagaggacggcgaggtggcccaggccgaagctgctggagctgccttttctccaggggaggacgatccagggatgggctacctcgaggagctgcttggcgtaggcccacaagtcgaagagttttccgtggaaccgcctctggacgacctttccttagatgaagcccagttcgtattagctcccagctgttgctcactggattcagctgggcctagacctgaagtggaggaagaaaacggtgaggaggtgttcctgagcgcctacgacgacttatcacctctcttgggccctaaaccaccaatttggaaaggaagcggtagcctggagggagaggcagccggatgcggacgacaggctctgggacagggcggtgaagaacaagcctgttgggaggtgggggaagacaaacaggctgaaccgggtggtagactggacatccgcgaggaagccgaaggctcacccgagacgaaggtcgaagccggaaaggccagcgaggacaggggcgaagctggagggtctcaggagactaaggtcaggctcagagagggttccagggaggaaaccgaggctaaggaggaaaagtccaagggacaaaaaaaagcggacagcatggaagccaagggagtggaagagcccggaggggacgaatacactgacgaaaaggaaaaagaaattgagcgggaggaggacgagcaaagagaagaggcccaggttgaggctggcagggacttggagcagggggcacaggaggaccaggtcgcagaagagaaatgggaggtagtgcagaaacaagaggcagagggagtgagggaggacgaggacaaaggacagcgagagaaggggtaccatgaagccaggaaagatcagggggatggcgaggacagccgttcgccagaggccgctacagaaggtggggctggggaagtgtcaaaggagagggagtcaggggatggcgaggctgagggcgatcaaagagcaggcggttactacctggaggaggacaccctttctgaggggtcaggggtagcgagcctggaagtcgactgcgccaaggagggaaacccccactctagcgaaatggaggaggtcgctccgcagccccctcagcctgaggagatggaacccgaagggcagcccagtcctgatggatgcttatgcccctgtagccttggacttgggggagtcggcatgcgtctggcatccacactcgtgcaggttcaacaggtcagaagcgtaccggttgtcccgccaaaaccccaattcgcaaaaatgcctagtgctatgtgttctaaaatacacgtagcaccagcaaatccttgcccccgaccgggacgattagacgggacacccggtgagcgagcttggggtagccgggctagccgcagcagttggaggaacggtggaagcttgtcgttcgacgcagctgttgccttggctcgagacagacagcggactgaagcccagggagtgagacgcacccagacctgcaccgaaggcggagattattgcttgatccccagaacatcaccttgctccatgatcagcgcccactccccgagaccattatcctgcctggagctgccatctgagggggcagaagggagcggctcccgatcgcggctatcactgcccccacgggagcctcaagttccagatccactgctgtcgagtcagcgccgatcctacgcttttgagactcaggcaaaccccggtaagggcgaaggactgtag

SEQ ID NO: 29027 - DNA, 4394 bp, Artificial Sequence
  derived and/or modified sequence
gttaaggagctgcactgcttcctgccccctaaagctgagcggggcgaggagggcgagtgccaggctgggccacgagacacaggacacaatttcttgccagggtcctggtagcttcctcttcaacagccacttccgtgtggccggggccccaggggcaggagctgctgcccgttgcccaggccaccctccacccccaattgggagccctgcccccctggggccgggccaagcccagcagctggctgggatcccatgggggactggtagggcacaggtcttgggggatagaggtgaccgggccagtgccctggggctctggccatgaagtctcggcagaaaggaaagaagaagggcagcgcaaaggagcgggtttttgggtgcgacttgcaggagcacctgcagcactcaggccaggaggtgccccaggtgctaaagagctgtgcagaatttgtggaggagtatggagtggtggatgggatctaccgcctctcaggggtctcctccaacatccagaagcttcggcaggaatttgagtcagagcggaagccagacctgcgtcgggatgtttacctccaagacattcactgcgtctcctccctgtgcaaggcctatttcagagaactgccggatcccctgctcacttaccggctctatgacaagtttgctgaggctgtaggagtgcaattggaacctgagcgcttggtcaagatcctagaggtgcttcgggaactccctgtcccaaactacaggaccctggagttcctcatgaggcacttggtacacatggcctcattcagtgcccagaccaacatgcatgctcgcaacctggccatcgtgtgggctcccaacctgctgaggtctaaggacatagaggcctcaggcttcaatgggacagcggccttcatggaggtgcgggtacaatccatcgtcgtggagttcatcctcacacacgtggaccagctctttgggggtgctgccctctctggtggtgaggtggagagtgggtggcgatcgcttccagggacccgggcatcaggcagccccgaggaccttatgcccaggccactgccttatcacctgcctagcatactgcaggctggcgatggacccccacagatgcggccctaccatactatcatcgagattgcagagcacaagaggaaggggtctttgaaggtcaggaagtggaggtctatcttcaatttaggtcgctctggccatgagactaagcgtaaacttccacggggggctgaggacagggaggataaatccaacaaggggacactgcggccagccaaaagcatggactcactgagtgctgcagctggggccagtgatgagccagaggggctggtggggcccagcagcccccggccaagcccattgctgcctgagagcttggagaacgattctatagaggcagcagagggtgaacaggagcctgaggcagaagcactgggtggcacaaactctgaaccaggcacaccacgagctgggcggtcagccatccgggctgggggcagcagccgtgcagaacgctgtgctggtgtccacatctcagacccctacaatgtcaacctcccgctacacatcacctctatcctcagtgtgcccccgaacatcatctctaacgtttccttggccaggctcacccgtggccttgagtgccctgctctacagcaccggccaagccctgcctctggccctggccctggccctggccttggccctggccccccagatgaaaagttggaagcaagtccagcctcaagtcccctggcagactcaggcccagacgacttggctcctgccctggaggactcgctgtcccaggaggtgcaggactccttctccttcctagaggactcaagcagctcagaacctgagtgggtgggggcagaggatggggaggtggcccaggcagaagcagcaggagcagccttctcccctggggaggacgaccctgggatgggctacctggaggagctcctgggagttgggcctcaggtggaggagttctctgtggagccacccctggatgacctgtctctggatgaggcacagtttgtcttggcccccagctgctgttccctggactccgctggccccaggcctgaagttgaggaggaaaatggggaggaagttttcctgagtgcctatgatgacctaagtccccttctgggacctaaacccccaatctggaagggttcagggagtctggagggagaggcagcaggatgtggaaggcaggctctgggacagggtggggaagagcaggcatgctgggaagttggggaggacaagcaggctgagcctggaggcaggctagacatcagggaagaggcagagggaagtccagagaccaaggtggaggctggaaaggccagtgaggatagaggggaggctgggggaagccaagagacaaaagtcagattgagagaagggagtagggaagagacagaggccaaggaagagaagtccaaaggtcagaagaaggctgacagtatggaggctaaaggtgtggaggaaccaggaggagatgagtatacagatgagaaggaaaaagaaattgagagagaagaggatgaacaaagagaggaagcccaggtagaagctggaagggacctagagcaaggggcccaggaagatcaagttgctgaggagaaatgggaagttgtacagaaacaagaggctgagggagtcagagaggatgaggacaaaggacagagggagaaggggtaccatgaagcaagaaaagaccaaggagatggtgaagacagcagaagcccagaagcagcaactgaaggaggagcaggggaggtcagcaaggaacgggagagtggggatggagaggctgagggagaccagagggctggagggtactatttagaagaggacaccctctctgaaggttcaggtgtagcgtccctggaggttgactgtgccaaagagggcaatcctcactcttctgagatggaagaggtagccccacagccacctcagccagaggagatggagcctgaggggcagcccagtccagacggctgtctatgcccctgttctcttggcctgggtggcgtgggcatgcgtctagcttccactctggttcaggtccaacaggtccgctctgtgcctgtggtgccccccaagccacagtttgccaagatgcccagtgcaatgtgtagcaagattcatgtggcacctgcaaatccatgcccgaggcctggccggcttgatgggactcctggagaaagggcttgggggtcccgagcttctcgatcctcttggaggaatgggggtagtctttcctttgatgctgctgtggccctagcccgggaccgccaaaggactgaggctcaaggagttcggcgaacccagacctgtactgagggtggggattactgcctcatccccagaacctccccttgtagcatgatctctgcccattctcctcggccccttagctgcctggagctcccatctgaaggtgcagaagggtctggatcccggagtcgtcttagtctgccccccagagaaccccaggttcctgaccccctgttgtcctctcagcgcaggtcatatgcatttgaaacacaggctaaccctgggaaaggtgaaggactgtgattaggaccacagccctgggcaaaggggaccagcaagttgtcttgaatctccagggttcctgactagctgtctcctctgcagcatgagcagctgtagtgcccaactctataggctttggccctccagcttctctctttgactgtgggaggcactgccttggttggtttacctgaacttgtctccgacacaaagcacttatctcttaggagattcccaagaaagtcaacaagatcttgttcccagggagtgggtcattggccaaagggaacataaggtaggcagaaaacttaaaagagtttgttaaagtgaagactggagaaattcctcccttcctctgagctgtgaatctctcttcatgaaagccaaaggtagagacagggaggacagggccaggttagggccttccacacacaaacacttctagagttgcccattcctgttatgttcttggaccctaagatacctcctgtcccttttaaatccagattaagagaaacgtccaggaagagctctttgaagccctcaatatttgttggagggactggactcctctccagctccccaccctctgcctccagtcaccatgtgcaagagaggtcctgtacagatctctctgggctctcctttctcctttggaataacttgttcctatttcaggaaagggaaatggtgtcactcaggccctgggactgcttctccagccaggctggggccacaggtcccactctagtgaaggtcaatgtctcagaataaaagctgtattttta

SEQ ID NO: 29028 - DNA, 3306 bp, Artificial Sequence
  derived and/or modified sequence
atgaagagcagacagaagggcaagaagaagggcagcgccaaggagagagtgttcggctgcgacctgcaggagcacctgcagcacagcggccaggaggtgccccaggtgctgaagagctgcgccgagttcgtggaggagtacggcgtggtggacggcatctacagactgagcggcgtgagcagcaacatccagaagctgagacaggagttcgagagcgagagaaagcccgacctgagaagagacgtgtacctgcaggacatccactgcgtgagcagcctgtgcaaggcctacttcagagagctgcccgaccccctgctgacctacagactgtacgacaagttcgccgaggccgtgggcgtgcagctggagcccgagagactggtgaagatcctggaggtgctgagagagctgcccgtgcccaactacagaaccctggagttcctgatgagacacctggtgcacatggccagcttcagcgcccagaccaacatgcacgccagaaacctggccatcgtgtgggcccccaacctgctgagaagcaaggacatcgaggccagcggcttcaacggcaccgccgccttcatggaggtgagagtgcagagcatcgtggtggagttcatcctgacccacgtggaccagctgttcggcggcgccgccctgagcggcggcgaggtggagagcggctggagaagcctgcccggcaccagagccagcggcagccccgaggacctgatgcccagacccctgccctaccacctgcccagcatcctgcaggccggcgacggccccccccagatgagaccctaccacaccatcatcgagatcgccgagcacaagagaaagggcagcctgaaggtgagaaagtggagaagcatcttcaacctgggcagaagcggccacgagaccaagagaaagctgcccagaggcgccgaggacagagaggacaagagcaacaagggcaccctgagacccgccaagagcatggacagcctgagcgccgccgccggcgccagcgacgagcccgagggcctggtgggccccagcagccccagacccagccccctgctgcccgagagcctggagaacgacagcatcgaggccgccgagggcgagcaggagcccgaggccgaggccctgggcggcaccaacagcgagcccggcacccccagagccggcagaagcgccatcagagccggcggcagcagcagagccgagagatgcgccggcgtgcacatcagcgacccctacaacgtgaacctgcccctgcacatcaccagcatcctgagcgtgccccccaacatcatcagcaacgtgagcctggccagactgaccagaggcctggagtgccccgccctgcagcacagacccagccccgccagcggccccggccccggccccggcctgggccccggcccccccgacgagaagctggaggccagccccgccagcagccccctggccgacagcggccccgacgacctggcccccgccctggaggacagcctgagccaggaggtgcaggacagcttcagcttcctggaggacagcagcagcagcgagcccgagtgggtgggcgccgaggacggcgaggtggcccaggccgaggccgccggcgccgccttcagccccggcgaggacgaccccggcatgggctacctggaggagctgctgggcgtgggcccccaggtggaggagttcagcgtggagccccccctggacgacctgagcctggacgaggcccagttcgtgctggcccccagctgctgcagcctggacagcgccggccccagacccgaggtggaggaggagaacggcgaggaggtgttcctgagcgcctacgacgacctgagccccctgctgggccccaagccccccatctggaagggcagcggcagcctggagggcgaggccgccggctgcggcagacaggccctgggccagggcggcgaggagcaggcctgctgggaggtgggcgaggacaagcaggccgagcccggcggcagactggacatcagagaggaggccgagggcagccccgagaccaaggtggaggccggcaaggccagcgaggacagaggcgaggccggcggcagccaggagaccaaggtgagactgagagagggcagcagagaggagaccgaggccaaggaggagaagagcaagggccagaagaaggccgacagcatggaggccaagggcgtggaggagcccggcggcgacgagtacaccgacgagaaggagaaggagatcgagagagaggaggacgagcagagagaggaggcccaggtggaggccggcagagacctggagcagggcgcccaggaggaccaggtggccgaggagaagtgggaggtggtgcagaagcaggaggccgagggcgtgagagaggacgaggacaagggccagagagagaagggctaccacgaggccagaaaggaccagggcgacggcgaggacagcagaagccccgaggccgccaccgagggcggcgccggcgaggtgagcaaggagagagagagcggcgacggcgaggccgagggcgaccagagagccggcggctactacctggaggaggacaccctgagcgagggcagcggcgtggccagcctggaggtggactgcgccaaggagggcaacccccacagcagcgagatggaggaggtggccccccagcccccccagcccgaggagatggagcccgagggccagcccagccccgacggctgcctgtgcccctgcagcctgggcctgggcggcgtgggcatgagactggccagcaccctggtgcaggtgcagcaggtgagaagcgtgcccgtggtgccccccaagccccagttcgccaagatgcccagcgccatgtgcagcaagatccacgtggcccccgccaacccctgccccagacccggcagactggacggcacccccggcgagagagcctggggcagcagagccagcagaagcagctggagaaacggcggcagcctgagcttcgacgccgccgtggccctggccagagacagacagagaaccgaggcccagggcgtgagaagaacccagacctgcaccgagggcggcgactactgcctgatccccagaaccagcccctgcagcatgatcagcgcccacagccccagacccctgagctgcctggagctgcccagcgagggcgccgagggcagcggcagcagaagcagactgagcctgccccccagagagccccaggtgcccgaccccctgctgagcagccagagaagaagctacgccttcgagacccaggccaaccccggcaagggcgagggcctgtag

SEQ ID NO: 29029 - protein, 616 aa, Artificial Sequence
  derived and/or modified sequence
MAEDEPDAKSPKTGGRAPPGGAEAGEPTTLLQRLRGTISKAVQNKVEGILQDVQKFSDNDKLYLYLQLPSGPTTGDKSSEPSTLSNEEYMYAYRWIRNHLEEHTDTCLPKQSVYDAYRKYCESLACCRPLSTANFGKIIREIFPDIKARRLGGRGQSKYCYSGIRRKTLVSMPPLPGLDLKGSESPEMGPEVTPAPRDELVEAACALTCDWAERILKRSFSSIVEVARFLLQQHLISARSAHAHVLKAMGLAEEDEHAPRERSSKPKNGLENPEGGAHKKPERLAQPPKDLEARTGAGPLARGERKKSVVESSAPGANNLQVNALVARLPLLLPRAPRSLIPPIPVSPPILAPRLSSGALKVATLPLSSRAGAPPAAVPIINMILPTVPALPGPGPGPGRAPPGGLTQPRGTENREVGIGGDQGPHDKGVKRTAEVPVSEASGQAPPAKAAKQDIEDTASDAKRKRGRPRKKSGGSGERNSTPLKSAAAMESAQSSRLPWETWGSGGEGNSAGGAERPGPMGEAEKGAVLAQGQGDGTVSKGGRGPGSQHTKEAEDKIPLVPSKVSVIKGSRSQKEAFPLAKGEVDTAPQGNKDLKEHVLQSSLSQEHKDPKATPP

SEQ ID NO: 29030 - protein, 596 aa, Artificial Sequence
  derived and/or modified sequence
MAEDEPDAKSPKTGGRAPPGGAEAGEPTTLLQRLRGTISKAVQNKVEGILQDVQKFSDNDKLYLYLQLPSGPTTGDKSSEPSTLSNEEYMYAYRWIRNHLEEHTDTCLPKQSVYDAYRKYCESLACCRPLSTANFGKIIREIFPDIKARRLGGRGQSKYCYSGIRRKTLVSMPPLPGLDLKGSESPEMGPEVTPAPRDELVEAACALTCDWAERILKRSFSSIVEVARFLLQQHLISARSAHAHVLKAMGLAEEDEHAPRERSSKPKNGLENPEGGAHKKPERLAQPPKDLEARTGAGPLARGERKKSVVESSAPGANNLQVNALVARLPLLLPRAPRSLIPPIPVSPPILAPRLSSGALKVATLPLSSRAGAPPAAVPIINMILPTVPALPGPGPGPGRAPPGGLTQPRGTENREVGIGGDQGPHDKGVKRTAEVPVSEASGQAPPAKAAKQDIEDTASDAKRKRGRPRKKSGGSGERNSTPLKSAAAMESAQSSRLPWETWGSGGEGNSAGGAERPGPMGEAEKGAVLAQGQGDGTVSKGGRGPGSQHTKEAEDKIPLVPSKVSVIKGSRSQKEAFPLAKGEVDTAPQGNKDLK

SEQ ID NO: 29031 - protein, 118 aa, Artificial Sequence
  derived and/or modified sequence
MAEDEPDAKSPKTGGRAPPGGAEAGEPTTLLQRLRGTISKAVQNKVEGILQDVQKFSDNDKLYLYLQLPSGPTTGDKSSEPSTLSNEEYMYAYRWIRNHLEEHTDTCLPKQSVYDAYR

SEQ ID NO: 29032 - protein, 230 aa, Artificial Sequence
  derived and/or modified sequence
MAEDEPDAKSPKTGGRAPPGGAEAGEPTTLLQRLRGTISKAVQNKVEGILQDVQKFSDNDKLYLYLQLPSGPTTGDKSSEPSTLSNEEYMYAYRWIRNHLEEHTDTCLPKQSVYDAYRKYCESLACCRPLSTANFGKIIREIFPDIKARRLGGRGQSKYCYSGIRRKTLVSMPPLPGLDLKGSESPEMGPEVTPAPRDELVEAACALTCDWAERILKRSFSSIVEVARFL

SEQ ID NO: 29033 - protein, 123 aa, Artificial Sequence
  derived and/or modified sequence
MAEDEPDAKSPKTGGRAPPGGAEAGEPTTLLQRLRGTISKAVQNKVEGILQDVQKFSDNDKLYLYLQLPSGPTTGDKSSEPSTLSNEEYMYAYRWIRNHLEEHTDTCLPKQSVYDAYRKYCES

SEQ ID NO: 29034 - protein, 96 aa, Artificial Sequence
  derived and/or modified sequence
MAEDEPDAKSPKTGGRAPPGGAEAGEPTTLLQRLRGTISKAVQNKVEGILQDVQKFSDNDKLYLYLQLPSGPTTGDKSSEPSTLSNEEYMYAYRWI

SEQ ID NO: 29035 - protein, 106 aa, Artificial Sequence
  derived and/or modified sequence
MAEDEPDAKSPKTGGRAPPGGAEAGEPTTLLQRLRGTISKAVQNKVEGILQDVQKFSDNDKLYLYLQLPSGPTTGDKSSEPSTLSNEEYMYAYRWIRNHLEEHTDT

SEQ ID NO: 29036 - protein, 184 aa, Artificial Sequence
  derived and/or modified sequence
MAEDEPDAKSPKTGGRAPPGGAEAGEPTTLLQRLRGTISKAVQNKVEGILQDVQKFSDNDKLYLYLQLPSGPTTGDKSSEPSTLSNEEYMYAYRWIRNHLEEHTDTCLPKQSVYDAYRKYCESLACCRPLSTANFGKIIREIFPDIKARRLGGRGQSKYCYSGIRRKTLVSMPPLPGLDLKGSE

SEQ ID NO: 29037 - protein, 576 aa, Artificial Sequence
  derived and/or modified sequence
MAEDEPDAKSPKTGGRAPPGGAEAGEPTTLLQRLRGTISKAVQNKVEGILQDVQKFSDNDKLYLYLQLPSGPTTGDKRKYCESLACCRPLSTANFGKIIREIFPDIKARRLGGRGQSKYCYSGIRRKTLVSMPPLPGLDLKGSESPEMGPEVTPAPRDELVEAACALTCDWAERILKRSFSSIVEVARFLLQQHLISARSAHAHVLKAMGLAEEDEHAPRERSSKPKNGLENPEGGAHKKPERLAQPPKDLEARTGAGPLARGERKKSVVESSAPGANNLQVNALVARLPLLLPRAPRSLIPPIPVSPPILAPRLSSGALKVATLPLSSRAGAPPAAVPIINMILPTVPALPGPGPGPGRAPPGGLTQPRGTENREVGIGGDQGPHDKGVKRTAEVPVSEASGQAPPAKAAKQDIEDTASDAKRKRGRPRKKSGGSGERNSTPLKSAAAMESAQSSRLPWETWGSGGEGNSAGGAERPGPMGEAEKGAVLAQGQGDGTVSKGGRGPGSQHTKEAEDKIPLVPSKVSVIKGSRSQKEAFPLAKGEVDTAPQGNKDLKEHVLQSSLSQEHKDPKATPP

SEQ ID NO: 29038 - protein, 165 aa, Artificial Sequence
  derived and/or modified sequence
MAEDEPDAKSPKTGGRAPPGGAEAGEPTTLLQRLRGTISKAVQNKVEGILQDVQKFSDNDKLYLYLQLPSGPTTGDKSSEPSTLSNEEYMYAYRWIRNHLEEHTDTCLPKQSVYDAYRKYCESLACCRPLSTANFGKIIREIFPDIKARRLGGRGQSKYCYSGIR

SEQ ID NO: 29039 - DNA, 3618 bp, Artificial Sequence
  derived and/or modified sequence
attcagaaaaaggaaaataaagcaacgcacgagccggctgggccaggaccttggggctgggctggagtgaaggtggctacgagttttccagatttaggagacttcagaaaggtggggcagatagaatggagatggcaaagatctctttgggcatatatgggcctggcgaagtaatggaataatttctaattttcggagaaggcaagtgccctcatgccgggatggcagaagatgagcctgatgctaagagccccaagactgggggaagggcccccccaggtggtgctgaggctggggaacctaccacccttcttcagaggctccgaggtaccatttccaaggccgtgcagaacaaagtagaggggatcctgcaagatgtacagaaattttctgacaatgacaagctgtatctctaccttcagctcccctcaggacccaccactggagacaaaagctcagagccaagtacactgagcaatgaggagtacatgtatgcctataggtggatccgcaaccacctggaagagcacactgacacctgtctgccaaagcaaagtgtttatgatgcctatcggaagtactgtgagagtcttgcctgttgccgcccactcagcacagccaactttggcaagatcatcagagagatcttccctgacatcaaagctcgaaggcttggtggccggggccagtccaaatattgctacagtggcataaggaggaagaccttggtgtctatgccacccctgcctggacttgacctaaagggttctgagagtccagaaatgggcccagaagtaaccccagcacctcgagatgaactggtggaggcagcgtgtgccctgacctgtgactgggcagagcggatcctgaaacggtccttcagttccatcgttgaggtcgcccgcttcctgctacagcagcatctcatctctgcccgatctgcacatgcccatgtgcttaaggccatggggcttgctgaagaggacgaacatgcacctcgggaacggtcatctaaaccaaagaatggtttagagaacccagagggtggagcccacaagaagccagagagactggcccagcctcctaaggatctggaagcccgaactggggccggtcctctcgcacgtggagagcggaagaagagtgtagttgagagctcggccccaggagccaataacctgcaggttaatgccctagtggctcggctgcctctgctccttccccgggcccctcgctcactaattccgccaatcccagtctctccacctattctggcccccaggctttcttcaggtgccctgaaagtggctacactgcctctgtctagtagggccggggcacccccagcagctgtgcccatcattaacatgatcttaccaactgttcctgctttgcctggacctggacctgggcctgggcgagctccacctgggggactcactcagccccggggcacagagaacagagaggtaggcataggtggtgaccaaggaccacatgacaagggtgtcaagaggacagctgaagtacctgtgagtgaggccagtgggcaggctccaccagctaaagcagcaaagcaggatatagaggatacagcaagtgatgccaaaaggaaacgggggcgccctcgaaaaaagtcaggtggaagtggggaaaggaattctacccctctcaagtcagcagctgccatggaatctgcccagtcctcaaggttaccatgggagacatggggctcaggaggggaaggcaactcagctggaggggcagagaggccagggccaatgggagaggctgaaaagggggcagtacttgcccagggtcagggagatggtactgtttccaaaggaggaaggggccccggttcccagcataccaaagaagcagaagataaaattcccttggtcccctcaaaagtgagtgtcatcaagggcagcagaagccaaaaggaggcttttcctttggcaaagggagaggtagacactgcaccacagggtaataaagacttaaaggagcatgtgcttcaaagttccttatcccaggagcataaagacccaaaagcaacacccccatgatacaggtctgtggggaagagtgtttatatccctacgttaactttgcctagtagaggcccttctttgcacttgcttctcatttggctattcttttcctaaggaagtccattctcctctgtacagacagctgagtcacccagtctacttagtacctggttgctgcctctgaccttttcagcttgataccctgggctttagtgtaaccaataaatctgtagtgaccttacctgtattccctgtgctatcctgtgggaaggtaggaatgggctaagtatgatgaatatataggttagggatcttttggttttaaatcacagaaaacctaattcaaactggcttaaaataaaaaggatttattggttcatgtaactagaaagtccataggtagtgctggctccaggtgaagacttgacccagtagttcagtatgtctctaaataccggactgacttttttctcactgttgcatcttctgtaggaccatttaagtctgggccacttaatggctgccagcattcctaagattacacttttccccatttatgtccaatcagaaaaagaaggcatctttgtaccagaaatctcagcaaaagccctaatattcacactgattaggcctgggtcacatgtccaccctgaccaatcactgtggccaggaggatgatacatgctaatttgcttattctatatcatggacaacacctttggggaaaagggtgggggtcagcctccccaaaatcacatggattccccaagtggaaactaggagcagggagttgcttgggtggccgctaacaccaggctactcttattttagcttgctaagttgagatcagctagacctgctttcttttctcctcagtcttgcatttccctcaatacaagctgtagcctctttcctcgtttctagtctcagaaggaaggagagggaagccattctcctctagggactcttcagtctcatttagatgatagtccctttttttctacctccatattagagatggagctccttccttttcctgtttcttaatttttgtcttctcattcctgcttccctctcaccctattgccagttccaccaactagagtgaaagacttcctagccatttcattaaatctattctgtatccaccaggtggcagcatcttgtcatacgtgtcaggacttaggactgcggggtttaggttagatgtcacggaaaaagctagttctgtggtcaggcggcaccaatgagaaaggaatgcagaccctccagatgtatccttgggaaaagcagtaaaccaactaatatttattgaagacctactttgtcctctacatagggtagcttctgtcagggaatcttggttcttcccaagaaacactgattttctttcagggagacttcatgtgttcatttatttccaccacagcagattttaagaaattataatatgtaatatttgatatctataaagagtatatctaacgtgaataaattatgaagcatactaatgagtacctatgacccataacacatatacattaaaacattttaaatacca

SEQ ID NO: 29040 - DNA, 498 bp, Artificial Sequence
  derived and/or modified sequence
atggggcggcgcagctcggacactgaggaggaatctagatcgaagcggaagaaaaaacaccgcaggcgatcctcgtcctcatcatcttccgatagccgcacctacagtcggaaaaagggtgggcgcaaatctagatccaagtcccgcagctggtcaagggatctgcagccaaggtctcactcatacgaccgacgaagacggcaccggtcctcaagttcctctagctatgggtctaggcggaaaagaagcagaagcaggtcccggggaaggggtaagtcttacagggtgcagagaagtcggtccaaatcccgaactcgccggtcccggagtagaccccggctacggtcccacagccggagctctgagcgcagttcccatcgcaggacacggtcgagaagtcgggatagggagcgacggaagggtcgagacaaagaaaagagagaaaaagaaaaagacaaaggcaaagacaaggagcttcacaacatcaaacgtggctag

SEQ ID NO: 29041 - DNA, 1851 bp, Artificial Sequence
  derived and/or modified sequence
atggccgaggacgaaccagacgcaaagagcccaaagacaggtggaagagcacccccaggcggcgcggaggcgggggaacctacaacactactccagagactgcggggcaccatctccaaagctgtgcaaaacaaggtagaaggaattctgcaggatgtccagaaattctccgataacgacaagttatacttatatctacaacttcctagtgggcccaccacaggagataagagttctgagccaagtacactgtcgaacgaggaatacatgtacgcctacaggtggatcagaaaccatttggaggaacacacggatacttgtctgcccaagcagtctgtctatgatgcgtaccgcaaatattgtgaaagcctcgcctgttgtcgacctctgtcaacagcaaattttggaaagatcattcgtgagatcttccctgacatcaaggcacgccgccttggaggacggggtcagtccaagtactgctactccggtattagacgtaaaaccttggtctccatgccacctctgcccggcctggaccttaaggggagtgagagcccagagatgggaccggaggtcacacctgccccacgcgatgagcttgttgaggccgcatgcgcccttacctgtgactgggctgaacgaattcttaagagatctttctcttccatcgtggaagttgcgaggtttctgctgcaacagcacttgataagcgcccggtcagcccacgcacatgttctgaaagccatgggcctggccgaagaggacgaacacgctccacgcgagcggagtagcaagcctaagaatgggctagagaatcctgagggcggagcacataaaaagccagagaggttggcccaaccccctaaggacttggaagccaggactggggccggccctctagctaggggggaacgcaagaagagtgtagtagagtcaagcgcgcccggcgcgaacaacttgcaggtgaacgcattggtcgcacgactgcctctgcttctgccacgggccccccgatcattgatcccacctattcctgtcagcccccccatcctggcacccaggctgagctctggcgcattgaaggtggccacccttccactctcgagccgggctggtgccccccccgctgccgtaccaatcattaatatgatccttcccactgtaccagcccttccaggcccaggacctgggcctgggcgggctcctccaggcgggctgacacagccacgaggaaccgaaaacagagaagtcggcatcgggggcgaccagggtccacacgacaagggtgtgaagaggactgctgaggtgccagtgtctgaggccagcggtcaagctccccctgcgaaggccgcaaaacaggacattgaggacacagcttctgatgccaagagaaagcggggcagacctcggaagaaatctggcgggtccggagaaaggaacagcaccccactgaagtccgcagcggcaatggagtctgcacaaagctcccgactgccgtgggaaacttgggggtccgggggggaggggaattcagcaggcggcgccgagaggcccggccccatgggagaagccgagaaaggcgcagtcctcgcgcaaggtcagggggatggtaccgtgtcaaaggggggtcgaggacccggatctcaacatacgaaagaagccgaggataaaattccattagtgcccagcaaggtcagtgttataaagggtagcaggtcccagaaagaggcattcccattagcgaagggtgaagtggacaccgcccctcagggtaataaggatctgaaggagcatgtcctgcagtcttctttgtcccaggaacataaggatccgaaagctaccccaccatag

SEQ ID NO: 29042 - DNA, 1851 bp, Artificial Sequence
  derived and/or modified sequence
atggcggaggacgagcctgacgccaagtcacctaagacaggtggtcgggctcctccaggaggagctgaggccggagagcccaccacacttttacaacgcttgcgaggaacaatcagtaaggcggttcagaataaggtggaaggcatcctgcaggatgtgcaaaagtttagtgacaacgataagttatacctgtacctgcaacttccctcaggacccactaccggcgataagagctctgagccgtcgacgctgagcaacgaggaatacatgtacgcctataggtggatccgcaatcatcttgaagagcataccgatacatgtcttccaaagcagtctgtgtatgacgcctacagaaagtattgtgaatccttggcttgttgtcggcccctgtccacagcaaacttcggaaaaatcatacgggaaatctttccagacattaaagctagacgactgggaggacgtgggcaaagcaagtattgctatagtgggataaggaggaaaacactcgtgtccatgccaccgctgccaggccttgatttgaaagggtcagagtctccagagatgggccccgaggtgactccagcaccacgcgatgaattggttgaggctgcttgcgcattaacctgcgattgggcagagagaattctgaagcggtcatttagctctattgttgaagtggcaagatttttactgcaacagcacctgatcagcgctcgcagtgctcacgcccacgtactcaaggccatggggctggctgaggaagacgaacacgctccgcgcgagcgctcgtccaagcccaaaaatggactggagaatcctgaaggcggcgcacacaagaagccagagagactggcccagcccccaaaagatctcgaggcaagaaccggcgcgggccctttggctcggggagagcgcaaaaaaagcgttgtcgaatcatcagcccctggggcaaacaatttgcaagtaaatgcactggttgcaagactgcccctgctactcccaagggctcccagatctctcattccgccaattcccgtctcgccacccatcctcgccccccggctgtcaagcggagccctgaaggttgcaaccctgccccttagcagtagggctggggcccctcccgctgctgtccctataatcaacatgattcttcccactgtgcccgccttgcctgggccgggccccgggcccggcagggctccccctgggggcctcacgcaacctcgaggcacagaaaaccgggaggtgggtattggcggtgatcagggcccgcacgacaagggagttaagcggactgccgaagtacccgtgtcagaggcttcaggacaagctccaccagccaaagccgccaagcaagatattgaggatacagcatcagatgccaagagaaaaagaggcaggcccagaaagaaaagcggagggtcaggagaaagaaattccactcctctgaagtctgcggcagccatggaatcagcacagtcctctcggctgccgtgggaaacctggggaagtggtggcgagggaaactctgcggggggcgccgagagacctggccccatgggagaggccgagaagggcgcagtactcgcccagggtcaaggggatgggacagtgtctaaggggggacgcgggcctggatcccagcacaccaaggaggccgaggataagatacccctggtgccctccaaggtgagtgtcattaagggcagccgcagccagaaagaggcctttcctctggccaaaggcgaggtagacaccgccccgcaggggaacaaagatctgaaagagcacgtattacaaagtagcctgtcccaggagcacaaggaccccaaggcgacacctccatag

SEQ ID NO: 29043 - DNA, 1791 bp, Artificial Sequence
  derived and/or modified sequence
atggccgaagatgagccagatgccaaaagtccaaagaccggagggagagcgccacccggcggggccgaggcaggcgaaccaacgactcttcttcaacggttgcgaggcaccatcagcaaagccgttcagaacaaagtggaagggatccttcaggatgtgcagaagttttctgataacgacaagctgtacctgtatctccagttgccctcaggacctactactggcgataagtcctccgagccaagcaccctttccaatgaggagtacatgtatgcctatagatggattcgcaatcacctcgaggagcatactgatacctgtctgccgaagcagtcggtgtatgacgcttatagaaaatactgcgagtcactggcgtgctgccgtccactgagcactgctaattttggaaagatcattcgggaaatatttcccgatatcaaggctcgaagattgggaggaaggggccaaagcaagtactgttattccggaattcgtagaaaaacacttgtttccatgcctcccctcccaggcttggaccttaaaggcagtgagtcaccagagatggggccagaagttaccccagccccccgagacgagctggtggaggcggcctgtgcgctaacatgtgattgggccgaacgcatcctgaaacgcagcttttctagtatcgttgaggtcgcccggtttctgctgcaacagcacctgatttctgcaaggagtgctcacgcgcacgttctgaaggccatgggtcttgctgaggaggatgaacacgccccccgagagagatcttcaaaaccaaaaaatggcctggagaatcctgaaggcggggcccataagaagcccgaacgcctggcgcagccaccaaaagacctcgaggcccgtactggggcaggaccgctggcgcgcggcgagagaaagaaatctgttgtggagagtagtgcccctggcgcaaataatctacaggtgaatgcactcgtggctcgcctccccttgctcctgcctagggctccccgctcactgattccacccattcccgtgtcacctcccatactagccccccgacttagcagtggcgctctgaaagtggccacactgcccctgagcagcagagccggggcacccccggccgctgtgccaattatcaatatgatcctccctactgtccccgcacttccagggcccggcccagggcctggcagagctccccccggagggctgacccaaccaaggggcaccgagaaccgcgaggtaggcataggaggtgaccaggggcctcacgacaaaggggtcaaacggactgcagaagttccggtgtcagaggcatctggacaagccccccctgctaaagcagctaagcaggatatcgaggacacagccagtgacgcaaaacgtaagcggggacgacctcgtaaaaagagcggcggaagtggggaaagaaactctactcccctgaaaagtgctgcggccatggaaagtgcccagtcctcacggctgccatgggagacctggggttcaggaggagagggtaacagcgcagggggcgctgagagaccagggcccatgggtgaggccgagaaaggagcagtcttagcccaggggcagggcgatggcacagtgagtaaagggggtagggggccaggttcccagcatacaaaggaggccgaagacaagattcccctggtacctagtaaagtcagcgtgattaaagggtcacgatcccagaaagaggcctttcccttggcaaaaggggaagtggatacagccccccagggaaacaaagacttgaagtag

SEQ ID NO: 29044 - DNA, 357 bp, Artificial Sequence
  derived and/or modified sequence
atggctgaggacgaaccagatgccaagtcccccaagaccggcggacgagcgcctcctggaggcgccgaggctggagaaccaaccactctgctgcagagattgcggggtaccatctctaaggcagtgcaaaacaaagttgagggcatactccaggacgtgcagaagttctccgataacgacaagctgtatttatatctgcagctccccagcgggcctaccaccggcgacaagagctcagagcctagtaccttgtcaaacgaggagtatatgtacgcctaccggtggattagaaaccacctcgaagaacacaccgatacgtgccttcctaaacaatcagtgtatgacgcctaccgatag

SEQ ID NO: 29045 - DNA, 693 bp, Artificial Sequence
  derived and/or modified sequence
atggcggaggatgagcccgatgctaaatcacctaaaacaggggggcgcgcaccacctggtggcgctgaggccggtgaaccaaccaccctgctccagagacttagaggaaccataagcaaggcggttcagaataaggtcgaggggattctgcaggacgtccagaagttcagtgataatgataagctgtatttgtacctacagcttccatccggccctacaactggcgacaaaagcagtgaaccgtcgactctttccaacgaggagtacatgtatgcatataggtggattcggaatcacctggaagaacataccgatacttgtctgccaaagcagtctgtgtatgacgcttacaggaagtattgtgaaagcctagcctgctgccgacccctgagcacggccaattttgggaaaattataagggaaatattccctgacatcaaggcccggcgcttaggtggcagaggacagtctaagtactgctactccggcataagacggaaaactctcgtctcaatgcctcctttaccgggcctcgacctaaaaggcagcgaatcccccgagatgggacccgaagtcactccagctcctcgcgacgaactcgtggaggctgcctgcgcgcttacgtgtgactgggcagagcgaattttgaagaggtcattttcctctatcgttgaggttgcccgattcctctag

SEQ ID NO: 29046 - DNA, 372 bp, Artificial Sequence
  derived and/or modified sequence
atggcggaagacgaacctgatgcaaagtcccctaaaacgggcggtcgggctccccccggaggggccgaggcgggggagcctaccactcttctccagcgcctccggggcacaatttctaaagccgtacaaaataaggtcgagggcattctgcaggatgttcagaaatttagcgacaatgacaagctgtacttgtatctacagcttcccagcggccccacaactggggataagagttcggaacccagcacgctgtcaaacgaagaatacatgtacgcttacagatggatccggaatcatttggaagagcacacagacacatgtctgccaaagcagtctgtatatgatgcatatcgcaagtattgcgagagctag

SEQ ID NO: 29047 - DNA, 291 bp, Artificial Sequence
  derived and/or modified sequence
atggctgaagatgagcccgacgctaagtcaccaaaaactggcggccgcgcgccccctggcggcgccgaggccggagaacccaccaccctgcttcaacgcttgcggggaactatttctaaagcagtacagaataaggtggagggaatactgcaggatgtgcagaagttctctgataacgataaactttacttgtacctgcagctgccgtctggaccgactactggagacaaaagttcggagcctagcaccctgtctaatgaggagtacatgtacgcctacaggtggatttag

SEQ ID NO: 29048 - DNA, 321 bp, Artificial Sequence
  derived and/or modified sequence
atggccgaggacgaacctgatgccaagtcacctaaaacaggcggccgcgccccaccagggggcgcagaggctggcgagccaactactctcctgcagcgtctccgaggcacaatctccaaagccgtgcagaataaggtggagggaatcttacaggacgttcagaaattcagcgacaacgacaagttatacttgtacctccagctgccctccgggccgacaacaggcgacaagagcagcgaaccttccactctgtccaacgaagaatatatgtacgcgtacaggtggatcaggaaccacctggaggaacacacagacacctag

SEQ ID NO: 29049 - DNA, 555 bp, Artificial Sequence
  derived and/or modified sequence
atggccgaggatgaacccgatgctaaatcccccaaaactggcggtagagccccacccgggggcgcggaagccggcgagcctacaactctgttgcaacgcctgcgggggacaatttccaaagctgtccagaacaaagtagaggggatcctgcaggatgttcaaaagttcagcgacaatgataaactctacctgtacctgcagctgcctagtggacccactaccggcgataaatcttccgagccctccactctgtcaaacgaggaatacatgtacgcttatcggtggatcaggaatcatttggaagagcacactgacacctgcctgccaaagcagtccgtatacgacgcttatcggaagtactgtgagagtcttgcctgctgtaggcccctgtcgactgcgaacttcgggaagatcatccgggaaatatttccagacatcaaggctaggcgtctcggtggaaggggtcagtcgaagtactgttattccggtatccgccgtaaaacactggtctccatgcctcccctgcccggccttgatttgaagggtagcgagtag

SEQ ID NO: 29050 - DNA, 1731 bp, Artificial Sequence
  derived and/or modified sequence
atggccgaagacgagcccgacgccaagagccctaaaactgggggcagagccccacccggaggcgcagaagcaggtgagcccacaactcttctgcagagattacggggcacgatcagtaaagctgttcagaataaggtggagggaatactccaggacgttcagaaattttccgacaacgacaaactgtacctgtatcttcagttaccctccggcccaacaacaggggataagagaaaatattgtgagtcactcgcatgctgccgacccctgagcacagcgaacttcggcaagattatcagggaaatctttcctgacatcaaggctaggaggctgggcgggcggggtcagtcaaaatactgctattccggaatcaggcgaaaaaccttggtaagcatgccccctcttccaggcctggatctaaaagggtcagagtctcccgaaatgggccccgaagtgactccggcaccccgggacgaactggttgaggcagcatgtgctttaacatgtgactgggctgaacgcatactgaaacgatccttctccagtattgtcgaagtagcccgattcctccttcagcagcatctgatatccgcaagatccgcgcacgctcacgtgcttaaggcgatgggcctggctgaggaggatgagcatgccccgcgggagcgctcctctaaacccaagaatgggctggagaaccccgagggcggagctcacaagaaacctgagaggctggctcagcccccaaaggatctggaggctagaactggcgcgggccctctggccagaggcgagcgcaaaaaatccgtggtagagtcaagtgcacccggcgctaataaccttcaagtgaacgctctggtggcccggctgccccttcttctcccccgcgctcctcgatccttgattcccccgatacccgtcagtccacctattctagcgccgcgcctgtcctcaggtgctttgaaagtggccacacttccgctgtctagcagggccggggccccaccagctgctgttcccatcatcaacatgattctgcctaccgtgcccgccctcccggggccgggtcccggcccaggacgggctccacccggcggcctcactcagcccagggggacggaaaatagagaggtcggaatcggcggtgatcaggggcctcacgacaaaggagtcaagagaacggctgaggttccagtcagcgaggctagcggccaggcccccccagctaaggcagctaagcaggacatcgaggacacagcctcagacgcaaagagaaagagaggcaggccccgtaaaaaatccgggggctctggcgagagaaatagtacacctttgaagtctgccgccgccatggagagtgcccagagcagcaggctcccctgggaaacgtggggcagcggaggtgaggggaattccgccgggggcgctgaaaggccggggcctatgggcgaggcggagaagggagccgtgctcgcccaaggccagggcgatgggaccgtctctaaagggggccgaggccctggttcccagcataccaaagaagctgaagacaaaatccccctggtgccatcaaaagtgtctgttatcaagggaagtcggagtcagaaggaagcttttcctctcgctaaaggggaggtggataccgcaccgcagggcaataaagatctcaaggagcatgtgctacaaagctctttaagccaggaacataaggacccaaaagcaacacctccatag

SEQ ID NO: 29051 - DNA, 1851 bp, Artificial Sequence
  derived and/or modified sequence
atggccgaggatgagccagatgcaaagagcccaaaaactgggggccgcgctcctccgggcggcgctgaggcaggagaaccaacaactctgctgcaacgcttgcgtggaacgatttccaaggccgtccagaataaagtggagggaattctccaggacgtccagaagttcagtgataatgataaactttacctgtatcttcagcttccatccggaccgactacgggcgataagtcgtccgagcccagcaccctcagcaatgaggaatacatgtacgcttaccgatggatccggaatcacctcgaggagcataccgacacgtgtcttccaaagcaatccgtttatgacgcttatagaaagtattgcgagtctttggcctgctgcagacctctatccacagccaacttcgggaaaattatccgcgaaatcttccctgacattaaagctcgccggctcggcggcaggggacagagtaagtattgctacagcggaattcgcagaaagacattagtgtcaatgcccccactgcccggactcgacctcaagggctccgagagccctgagatgggcccagaagttacccctgcccctcgcgacgagcttgtggaagcagcatgcgctctgacatgtgactgggccgaacgtatcctgaaacgatctttcagtagcatcgttgaagtcgctaggttcctgcttcaacaacacctgatcagcgctaggtcagctcatgcacatgtgttaaaagctatgggattggctgaggaggatgaacacgcacctcgcgaaaggtcctccaaacccaagaacggtttggaaaaccccgaaggaggggcccacaaaaagcctgagagactagcacagcccccaaaggacctggaggctaggaccggagccggaccactagcccgtggggagagaaagaaatcggttgtggaatcctcagcacctggggccaataacttgcaggtaaacgccctggtggccaggctccctctcctactccctagagcacctagatctcttattcccccaatccccgttagcccgcctatcctggctccgcgactcagttctggggccctgaaggtagctaccctcccactctcatcacgggctggagccccaccagccgctgtgccaattatcaatatgatactgccaacagtgcctgcactgcccggacctggccccggtccaggaagggccccccctggcggactcactcagccccggggcacagaaaacagggaagtgggcatagggggcgaccagggccctcatgataagggtgtgaaacgcactgcagaggtgcctgtgtcggaagcgagcggacaagcccctcctgcgaaggcagcaaaacaagatatcgaggatacggccagcgacgctaaaagaaaaaggggtcggcccagaaagaaatccggggggtctggagaacggaacagtacacctcttaagagcgctgctgccatggagtccgctcagtcaagtcgattgccgtgggagacatggggctccggcggcgagggtaactccgcgggcggcgctgaacgccccggcccgatgggcgaggccgagaagggtgctgtactggcccagggacagggagatggcaccgtgtcgaaggggggccgtggccctggttctcaacacacgaaggaagccgaggataagatccccttggtacccagtaaagtctctgttatcaagggctctcgcagccagaaggaagccttcccacttgcaaagggcgaagtcgataccgcccctcagggcaacaaggaccttaaagaacatgtgctacagagttcactatcacaggaacataaggaccccaaggctacacccccttag

SEQ ID NO: 29052 - DNA, 498 bp, Artificial Sequence
  derived and/or modified sequence
atggccgaggacgaacccgacgcgaagagccctaagactggtgggcgagcaccgcccgggggggccgaagcgggcgagccgaccaccttgcttcagcgtcttcgaggcacgatctccaaagcagtgcagaataaggtcgaggggatattacaggacgtgcaaaaatttagcgataacgacaaactttacctgtatctgcagttgcctagcgggccaaccaccggtgataaaagttcagagccaagcaccctctctaatgaggagtacatgtatgcctatcgttggattcggaatcaccttgaggagcacaccgacacatgcctgcctaaacagagtgtgtacgacgcgtataggaagtattgcgagagtttggcgtgttgtcggccactgtccaccgccaactttgggaagattattcgtgagattttccccgacattaaggctagacgtttaggggggaggggccaatccaagtattgctatagcgggatccggtag

SEQ ID NO: 29053 - DNA, 1851 bp, Artificial Sequence
  derived and/or modified sequence
atggctgaagatgagccagatgccaagagccccaagacaggaggccgggcccctcctggaggagctgaggccggggagcccaccaccctgctgcagaggctgcggggcaccatcagcaaggctgtgcagaacaaggtggagggcatcctgcaggatgtgcagaagttcagtgacaatgacaagctgtacctgtacctgcagctgcccagcggccccaccaccggggacaagagcagcgagcccagcaccctgagcaatgaggagtacatgtatgcctaccgctggatccggaaccacctggaggagcacacagacacctgcctgcccaagcagagcgtgtatgatgcctacaggaagtactgtgagagcctggcctgctgccggcccctgagcacagccaactttgggaagatcatccgggagatcttcccagacatcaaggcccggcggctgggcggccggggccagagcaagtactgctacagcggcatccggaggaagaccctggtgtccatgccacccctgcccggcctggacctgaagggcagcgagagccctgagatgggccctgaggtgaccccagcccccagagatgagctggtggaggccgcctgtgccctgacctgtgactgggccgagcgcatcctgaagaggagcttcagcagcatcgtggaggtggcccgcttcctgctgcagcagcacctgatcagcgcccggagcgcccacgcccacgtgctgaaggccatgggcctggccgaggaggatgaacatgccccccgggagaggagcagcaagcccaagaatggcctggagaaccctgagggcggggcccacaagaagccagagcggctggcccagccccccaaggacctggaggccaggactggagctggccccctggcccggggggagaggaagaagtctgtggtggagagcagcgcccctggggccaacaacctgcaggtgaatgccctggtggcccggctgcccctgctgctgccccgggcccccaggagcctcatcccccccatccctgtgagcccccccatcctggccccccggctgagcagcggggccctgaaggtggccaccctgcccctgagcagcagagctggggcccccccagctgctgtgcccatcatcaacatgatcctgcccaccgtgcctgccctgcccggccctggccctggccctggccgggcccctcctgggggcctgacccagccccggggcacagaaaatcgggaggtgggcattggaggagaccagggcccccatgacaagggcgtgaagaggacagctgaggtgcctgtgtctgaggccagcggccaggcccccccagccaaggccgccaagcaggacatcgaggacacagccagtgatgccaagaggaagaggggccggcccaggaagaagagcggcggcagcggggagaggaacagcacccccctgaagtctgctgctgccatggagagcgcccagagcagccggctgccctgggagacctggggcagcggcggggagggcaacagcgctgggggcgctgagcggcccggccccatgggagaggccgagaagggagctgtgctggcccagggccagggagatggcaccgtgtccaaaggaggccggggccctggcagccagcacaccaaggaggccgaggacaagatccccctggtgcccagcaaggtgtctgtcatcaagggcagccgcagccagaaggaggccttccccctggccaagggggaggtggacacagccccccagggcaacaaggacctgaaggagcacgtgctgcagagcagcctgagccaggagcacaaggaccccaaggccaccccaccctag

SEQ ID NO: 29054 - DNA, 1791 bp, Artificial Sequence
  derived and/or modified sequence
atggctgaagatgagccagatgccaagagccccaagacaggaggccgggcccctcctggaggagctgaggccggggagcccaccaccctgctgcagaggctgcggggcaccatcagcaaggctgtgcagaacaaggtggagggcatcctgcaggatgtgcagaagttcagtgacaatgacaagctgtacctgtacctgcagctgcccagcggccccaccaccggggacaagagcagcgagcccagcaccctgagcaatgaggagtacatgtatgcctaccgctggatccggaaccacctggaggagcacacagacacctgcctgcccaagcagagcgtgtatgatgcctacaggaagtactgtgagagcctggcctgctgccggcccctgagcacagccaactttgggaagatcatccgggagatcttcccagacatcaaggcccggcggctgggcggccggggccagagcaagtactgctacagcggcatccggaggaagaccctggtgtccatgccacccctgcccggcctggacctgaagggcagcgagagccctgagatgggccctgaggtgaccccagcccccagagatgagctggtggaggccgcctgtgccctgacctgtgactgggccgagcgcatcctgaagaggagcttcagcagcatcgtggaggtggcccgcttcctgctgcagcagcacctgatcagcgcccggagcgcccacgcccacgtgctgaaggccatgggcctggccgaggaggatgaacatgccccccgggagaggagcagcaagcccaagaatggcctggagaaccctgagggcggggcccacaagaagccagagcggctggcccagccccccaaggacctggaggccaggactggagctggccccctggcccggggggagaggaagaagtctgtggtggagagcagcgcccctggggccaacaacctgcaggtgaatgccctggtggcccggctgcccctgctgctgccccgggcccccaggagcctcatcccccccatccctgtgagcccccccatcctggccccccggctgagcagcggggccctgaaggtggccaccctgcccctgagcagcagagctggggcccccccagctgctgtgcccatcatcaacatgatcctgcccaccgtgcctgccctgcccggccctggccctggccctggccgggcccctcctgggggcctgacccagccccggggcacagaaaatcgggaggtgggcattggaggagaccagggcccccatgacaagggcgtgaagaggacagctgaggtgcctgtgtctgaggccagcggccaggcccccccagccaaggccgccaagcaggacatcgaggacacagccagtgatgccaagaggaagaggggccggcccaggaagaagagcggcggcagcggggagaggaacagcacccccctgaagtctgctgctgccatggagagcgcccagagcagccggctgccctgggagacctggggcagcggcggggagggcaacagcgctgggggcgctgagcggcccggccccatgggagaggccgagaagggagctgtgctggcccagggccagggagatggcaccgtgtccaaaggaggccggggccctggcagccagcacaccaaggaggccgaggacaagatccccctggtgcccagcaaggtgtctgtcatcaagggcagccgcagccagaaggaggccttccccctggccaagggggaggtggacacagccccccagggcaacaaggacctgaagtag

SEQ ID NO: 29055 - DNA, 357 bp, Artificial Sequence
  derived and/or modified sequence
atggctgaagatgagccagatgccaagagccccaagacaggaggccgggcccctcctggaggagctgaggccggggagcccaccaccctgctgcagaggctgcggggcaccatcagcaaggctgtgcagaacaaggtggagggcatcctgcaggatgtgcagaagttcagtgacaatgacaagctgtacctgtacctgcagctgcccagcggccccaccaccggggacaagagcagcgagcccagcaccctgagcaatgaggagtacatgtatgcctaccgctggatccggaaccacctggaggagcacacagacacctgcctgcccaagcagagcgtgtatgatgcctacagatag

SEQ ID NO: 29056 - DNA, 693 bp, Artificial Sequence
  derived and/or modified sequence
atggctgaagatgagccagatgccaagagccccaagacaggaggccgggcccctcctggaggagctgaggccggggagcccaccaccctgctgcagaggctgcggggcaccatcagcaaggctgtgcagaacaaggtggagggcatcctgcaggatgtgcagaagttcagtgacaatgacaagctgtacctgtacctgcagctgcccagcggccccaccaccggggacaagagcagcgagcccagcaccctgagcaatgaggagtacatgtatgcctaccgctggatccggaaccacctggaggagcacacagacacctgcctgcccaagcagagcgtgtatgatgcctacaggaagtactgtgagagcctggcctgctgccggcccctgagcacagccaactttgggaagatcatccgggagatcttcccagacatcaaggcccggcggctgggcggccggggccagagcaagtactgctacagcggcatccggaggaagaccctggtgtccatgccacccctgcccggcctggacctgaagggcagcgagagccctgagatgggccctgaggtgaccccagcccccagagatgagctggtggaggccgcctgtgccctgacctgtgactgggccgagcgcatcctgaagaggagcttcagcagcatcgtggaggtggcccgcttcctgtag

SEQ ID NO: 29057 - DNA, 372 bp, Artificial Sequence
  derived and/or modified sequence
atggctgaagatgagccagatgccaagagccccaagacaggaggccgggcccctcctggaggagctgaggccggggagcccaccaccctgctgcagaggctgcggggcaccatcagcaaggctgtgcagaacaaggtggagggcatcctgcaggatgtgcagaagttcagtgacaatgacaagctgtacctgtacctgcagctgcccagcggccccaccaccggggacaagagcagcgagcccagcaccctgagcaatgaggagtacatgtatgcctaccgctggatccggaaccacctggaggagcacacagacacctgcctgcccaagcagagcgtgtatgatgcctacaggaagtactgtgagagctag

SEQ ID NO: 29058 - DNA, 291 bp, Artificial Sequence
  derived and/or modified sequence
atggctgaagatgagccagatgccaagagccccaagacaggaggccgggcccctcctggaggagctgaggccggggagcccaccaccctgctgcagaggctgcggggcaccatcagcaaggctgtgcagaacaaggtggagggcatcctgcaggatgtgcagaagttcagtgacaatgacaagctgtacctgtacctgcagctgcccagcggccccaccaccggggacaagagcagcgagcccagcaccctgagcaatgaggagtacatgtatgcctaccgctggatctag

SEQ ID NO: 29059 - DNA, 321 bp, Artificial Sequence
  derived and/or modified sequence
atggctgaagatgagccagatgccaagagccccaagacaggaggccgggcccctcctggaggagctgaggccggggagcccaccaccctgctgcagaggctgcggggcaccatcagcaaggctgtgcagaacaaggtggagggcatcctgcaggatgtgcagaagttcagtgacaatgacaagctgtacctgtacctgcagctgcccagcggccccaccaccggggacaagagcagcgagcccagcaccctgagcaatgaggagtacatgtatgcctaccgctggatccggaaccacctggaggagcacacagacacctag

SEQ ID NO: 29060 - DNA, 555 bp, Artificial Sequence
  derived and/or modified sequence
atggctgaagatgagccagatgccaagagccccaagacaggaggccgggcccctcctggaggagctgaggccggggagcccaccaccctgctgcagaggctgcggggcaccatcagcaaggctgtgcagaacaaggtggagggcatcctgcaggatgtgcagaagttcagtgacaatgacaagctgtacctgtacctgcagctgcccagcggccccaccaccggggacaagagcagcgagcccagcaccctgagcaatgaggagtacatgtatgcctaccgctggatccggaaccacctggaggagcacacagacacctgcctgcccaagcagagcgtgtatgatgcctacaggaagtactgtgagagcctggcctgctgccggcccctgagcacagccaactttgggaagatcatccgggagatcttcccagacatcaaggcccggcggctgggcggccggggccagagcaagtactgctacagcggcatccggaggaagaccctggtgtccatgccacccctgcccggcctggacctgaagggcagcgagtag

SEQ ID NO: 29061 - DNA, 1731 bp, Artificial Sequence
  derived and/or modified sequence
atggctgaagatgagccagatgccaagagccccaagacaggaggccgggcccctcctggaggagctgaggccggggagcccaccaccctgctgcagaggctgcggggcaccatcagcaaggctgtgcagaacaaggtggagggcatcctgcaggatgtgcagaagttcagtgacaatgacaagctgtacctgtacctgcagctgcccagcggccccaccaccggggacaagaggaagtactgtgagagcctggcctgctgccggcccctgagcacagccaactttgggaagatcatccgggagatcttcccagacatcaaggcccggcggctgggcggccggggccagagcaagtactgctacagcggcatccggaggaagaccctggtgtccatgccacccctgcccggcctggacctgaagggcagcgagagccctgagatgggccctgaggtgaccccagcccccagagatgagctggtggaggccgcctgtgccctgacctgtgactgggccgagcgcatcctgaagaggagcttcagcagcatcgtggaggtggcccgcttcctgctgcagcagcacctgatcagcgcccggagcgcccacgcccacgtgctgaaggccatgggcctggccgaggaggatgaacatgccccccgggagaggagcagcaagcccaagaatggcctggagaaccctgagggcggggcccacaagaagccagagcggctggcccagccccccaaggacctggaggccaggactggagctggccccctggcccggggggagaggaagaagtctgtggtggagagcagcgcccctggggccaacaacctgcaggtgaatgccctggtggcccggctgcccctgctgctgccccgggcccccaggagcctcatcccccccatccctgtgagcccccccatcctggccccccggctgagcagcggggccctgaaggtggccaccctgcccctgagcagcagagctggggcccccccagctgctgtgcccatcatcaacatgatcctgcccaccgtgcctgccctgcccggccctggccctggccctggccgggcccctcctgggggcctgacccagccccggggcacagaaaatcgggaggtgggcattggaggagaccagggcccccatgacaagggcgtgaagaggacagctgaggtgcctgtgtctgaggccagcggccaggcccccccagccaaggccgccaagcaggacatcgaggacacagccagtgatgccaagaggaagaggggccggcccaggaagaagagcggcggcagcggggagaggaacagcacccccctgaagtctgctgctgccatggagagcgcccagagcagccggctgccctgggagacctggggcagcggcggggagggcaacagcgctgggggcgctgagcggcccggccccatgggagaggccgagaagggagctgtgctggcccagggccagggagatggcaccgtgtccaaaggaggccggggccctggcagccagcacaccaaggaggccgaggacaagatccccctggtgcccagcaaggtgtctgtcatcaagggcagccgcagccagaaggaggccttccccctggccaagggggaggtggacacagccccccagggcaacaaggacctgaaggagcacgtgctgcagagcagcctgagccaggagcacaaggaccccaaggccaccccaccctag

SEQ ID NO: 29062 - DNA, 498 bp, Artificial Sequence
  derived and/or modified sequence
atggctgaagatgagccagatgccaagagccccaagacaggaggccgggcccctcctggaggagctgaggccggggagcccaccaccctgctgcagaggctgcggggcaccatcagcaaggctgtgcagaacaaggtggagggcatcctgcaggatgtgcagaagttcagtgacaatgacaagctgtacctgtacctgcagctgcccagcggccccaccaccggggacaagagcagcgagcccagcaccctgagcaatgaggagtacatgtatgcctaccgctggatccggaaccacctggaggagcacacagacacctgcctgcccaagcagagcgtgtatgatgcctacaggaagtactgtgagagcctggcctgctgccggcccctgagcacagccaactttgggaagatcatccgggagatcttcccagacatcaaggcccggcggctgggcggccggggccagagcaagtactgctacagcggcatcagatag

SEQ ID NO: 29063 - DNA, 1851 bp, Artificial Sequence
  derived and/or modified sequence
atggccgaggacgagcccgacgccaagagccccaagaccggcggcagggctccgccaggaggcgcagaagcaggtgagcctacaaccctgctccaacgcctgagaggcactatctccaaggccgtgcagaataaagtagagggtatccttcaggatgtgcagaagttttcggacaatgataagctttatctgtatctgcagttaccctcaggcccaaccacgggcgataagtcaagcgaaccctccaccctgagcaacgaggagtacatgtatgcatacagatggatcagaaaccatctcgaggaacataccgacacatgtctccccaaacagagtgtgtacgacgcataccggaagtattgtgagagtcttgcttgttgtcgccccctgtccaccgccaattttggaaaaatcatccgggagatctttcccgacatcaaagcacgaagattgggcggccgggggcagtccaaatactgttatagcggtatcaggcggaagactttggtgagcatgccgcctttaccgggcctggatctgaaggggtcagagtctcccgagatgggaccagaagttactcctgcccctcgcgacgagcttgtggaggctgcctgtgctcttacgtgcgattgggccgaaagaatactgaaacgctctttctcctcaatcgtggaggtggcgaggtttctgctccagcagcacctcatcagcgcccgctctgcacacgcacatgttcttaaggcaatggggctggcagaagaggatgaacatgctccacgggagagatctagcaagccaaagaatggactggagaaccccgagggcggagcgcataaaaagcccgagagattggcgcagcccccaaaggatctcgaggcaaggacaggagcagggcctctggctcgaggtgaaaggaagaagagcgtagtggagtcctcggctcctggggcgaataatttacaggtgaatgcactcgtggccaggttgcctctcctgctgcctagagcccccagatctctgatccctccaatccctgtatcgcccccaattttagcccccaggcttagcagcggagccctgaaggtggcaaccctcccgctgagctcgagagctggtgccccaccagccgcagtgcccattataaacatgatcctcccgacagtgccggccctgccaggcccagggcccggccctggtcgcgcccctcccggaggcttgacccaaccccgagggaccgaaaatcgcgaggtgggaatcggcggagaccagggccctcacgacaagggcgttaagcgcaccgctgaagtccctgtgagtgaagcttctggacaggcaccccctgccaaggctgcgaagcaggatatagaggatacagccagtgacgccaagaggaaacgaggccgcccacgcaagaaaagcggcggcagtggcgagcgtaactctaccccccttaagtctgccgccgctatggaaagtgcacagagcagccggctcccttgggagacttggggatccggaggcgaaggaaattccgccgggggcgccgagagaccaggcccaatgggcgaagctgaaaagggagcagtcttggcccagggacagggtgatggaaccgtctcaaagggtggccgcggtccaggatctcagcacaccaaggaggccgaagacaagattccgctggtgccttccaaggtgagcgtgatcaaggggagcaggtctcagaaagaggcttttccccttgccaagggggaggtcgatacagcccctcaaggtaataaagacttgaaagaacatgtgctgcagagctctctgtcccaggagcataaagaccctaaggctactcctccttag

SEQ ID NO: 29064 - DNA, 1851 bp, Artificial Sequence
  derived and/or modified sequence
atggccgaggacgagcccgacgccaagagccccaagaccggcggcagggcgccgcccggtggcgctgaggcgggcgaacccactaccctccttcaacgtctgaggggaacgattagtaaagctgtgcagaacaaggtggaaggcattcttcaggatgttcaaaaattttccgacaatgacaaactctacctgtatctccagctgccatccggtccaacaactggcgataagtccagcgaaccctccacactctccaacgaagagtacatgtacgcataccggtggattaggaatcacctcgaggagcataccgacacctgtctgcccaagcagtccgtctatgacgcatataggaagtactgcgagtccctagcctgttgccggcccctgagcaccgcaaacttcggtaaaattatacgggaaattttccctgatataaaggcccggcgcttaggcggccgggggcagagcaagtattgttattccgggattaggcgaaagaccctggtgtccatgcctccactgccaggactcgacttgaaaggcagcgagtcccctgagatggggcctgaggttacacccgcgccccgggatgaattggttgaagcggcctgcgcactcacatgcgactgggccgagaggatactgaagcgatccttcagtagcatcgttgaggtggcaaggtttctgttgcagcagcatctgatctctgccagatctgctcacgcccatgttctcaaggcaatggggctggccgaggaagacgagcacgccccaagggagagaagctctaaaccgaaaaacggcctcgaaaacccagaaggaggcgcccacaagaagcccgaacggttggctcagccccccaaggacctggaggctcggaccggggctggacccctggcccgcggcgaaaggaagaaaagcgtcgtcgaatccagcgcccctggggccaacaacctgcaggtgaatgcgttggtggccagactcccgttgctgctgccccgggccccccgctcactcattcctcccattcctgtgagtcctccaatcctggcgccacggctgtcttctggagccctgaaagtggccaccttgccattgtcgtctagggcgggcgctcctcccgccgcagtgccgattataaacatgatcctacccacagtccctgcccttccagggcccggccccggaccgggacgcgcccctcctggggggttgacccaaccccgcggaaccgagaacagggaagtcgggatcggtggagatcaagggccccacgataaaggagtgaaaaggactgccgaggtgcctgtgagcgaggcaagtgggcaagctcccccggcaaaggccgccaagcaggatatagaagacaccgcctctgatgctaagcgtaaacggggccgcccccgtaaaaagagtggaggtagtggagaacggaactccacgccactgaagtcagcagcagctatggagagcgcacaaagctcacggctaccatgggaaacctggggaagcggaggggagggcaactccgccgggggagccgaacgccccgggcccatgggggaggcagaaaagggcgctgtcctggcacagggccagggagatggcaccgtctcaaaaggaggccgtgggcccggctcccaacacaccaaggaggccgaagacaagatcccccttgtgccctctaaggtgtcagttatcaagggttctagaagccagaaggaggccttcccgctcgctaaaggcgaagttgacacagccccccagggaaacaaagatttaaaagagcacgtcttacaaagctcactgtcccaggaacataaagatccgaaggccactcctccatag

SEQ ID NO: 29065 - DNA, 1791 bp, Artificial Sequence
  derived and/or modified sequence
atggccgaggacgagcccgacgccaagagccccaagaccggcggccgcgcgccccccggcggagccgaagccggagaacctacaactctacttcagcgattgcgaggcaccatctcaaaagcagtccagaataaggtggaaggcattctgcaggacgtacaaaagtttagcgacaacgataagctgtacttatacctgcaactaccatctggtcctaccactggcgacaagagcagcgagccctctactctgtctaacgaggaatacatgtatgcttataggtggatccgaaatcacctagaggagcacacagatacatgcctacccaaacaaagcgtctacgacgcttaccggaagtactgcgagtcactcgcttgttgtcggcctcttagcacggcgaactttggcaagatcatcagagagatatttcccgatataaaggcgcgaagactgggaggtcgtggtcagagcaagtactgctattccggaattcgcaggaaaactctcgtatcaatgccaccattacccggtctggatctcaaggggtccgagtctccagaaatgggtccagaggtaactccggccccgcgagacgaacttgtggaagccgcctgtgcattaacgtgtgactgggcagaaagaatcctgaaacgaagctttagttctatcgtggaagtggctcgattcttgctgcagcaacacctgatcagcgcaagaagtgcccacgcccacgtgctcaaggccatgggactggcagaggaggacgagcatgctcccagagagagatcctcgaagccaaagaacggattggaaaacccagaagggggagcacacaagaagccagaaaggctggcccaaccgcccaaggacttggaagcccggacaggagcaggcccactcgcccgaggggagcgaaagaaaagcgttgtagaaagtagcgccccaggcgccaacaacctccaggtgaacgcgctcgttgccagactgcctctgctgctgccccgagctccccggagcctgatccctcccatacccgtctctcccccaatcctggctcccagattgagttcaggtgccctgaaggtggccactctaccactgagctcaagagccggcgctccccctgccgccgtccctattattaacatgattctcccaaccgtacccgccctgcccggaccaggacccgggcccgggagagcacctcccgggggcttaacacagccaagaggaacagaaaacagagaagtgggaatcggaggcgaccaaggccctcacgacaaaggtgtaaagcgcacagccgaagtccccgtttccgaggcaagcggacaggccccccccgccaaggctgccaagcaagatatagaagacacagctagtgatgccaagcggaagcgggggaggcctagaaagaaaagcggcggatcaggagagcgaaactccaccccgctcaagtcagcagctgcaatggagtccgctcagtcctccaggctgccttgggaaacatgggggtccgggggcgagggaaattcagccgggggggcagagcgtcccgggcctatgggagaagccgaaaaaggtgctgtcttagcacaggggcagggcgatggcacagtatcaaagggaggcaggggcccagggtcacagcacactaaggaggcggaggataagattcccctggttccaagtaaggtatcggtaataaaaggtagtcgctcacaaaaagaagcctttccacttgccaagggtgaggtggacacagcaccacaggggaacaaagatctgaagtag

SEQ ID NO: 29066 - DNA, 357 bp, Artificial Sequence
  derived and/or modified sequence
atggccgaggacgagcccgacgccaagagccccaagaccggcggccgcgcccccccaggcggtgctgaagccggcgaaccgacaaccctgctccagaggctccggggcactatctccaaagccgtccagaacaaggttgagggcattttacaggatgtacaaaaattcagtgacaacgacaaactttatctgtatctgcaactgcctagtggacccaccaccggcgataaaagtagtgagccgagcaccctcagcaacgaggagtacatgtatgcctacaggtggattcggaaccatcttgaagaacataccgacacatgccttcctaagcagtcagtctacgatgcctaccggtag

SEQ ID NO: 29067 - DNA, 693 bp, Artificial Sequence
  derived and/or modified sequence
atggccgaggacgagcccgacgccaagagccccaagaccggcggccgagctccacctggtggagccgaggccggagagccaactacgctactccagcggctgaggggcaccatttccaaggccgttcagaacaaggtcgagggtatactccaagacgtacagaaattcagtgataatgacaaactctatttgtacctccagctgcccagcggccccacaaccggcgacaaaagctcagagcctagcaccctgtccaatgaagagtatatgtatgcctacaggtggattaggaatcacctagaggaacataccgatacttgtcttccaaaacaaagcgtttacgacgcctatcggaaatactgcgaaagtcttgcctgctgccgccccctgagcacagcaaactttggcaagattatcagagaaatttttcccgacattaaagcaagaaggctcggaggacgaggccagagcaagtattgctatagcggtatccgaaggaaaacccttgtctcaatgccccctctcccaggcttggatctaaagggcagcgagtcacccgagatgggccctgaggtcacaccggccccccgtgatgaactggtagaagcagcatgcgccctgacgtgtgactgggccgagcgaattctgaagcgctcttttagctcgattgtcgaggtggctagatttctgtag

SEQ ID NO: 29068 - DNA, 372 bp, Artificial Sequence
  derived and/or modified sequence
atggccgaggacgagcccgacgccaagagccccaagaccggcggccgggctccacccggtggtgctgaggctggagaaccgaccactctgctacagagacttagaggcaccataagcaaagcggtgcaaaataaagtagaggggattctgcaggatgtacagaagttctcagataacgacaagctgtatctgtacctgcagcttccatcgggacctacaacgggggataaaagcagtgagccctctaccctctcaaatgaggagtatatgtatgcctaccgctggatacgcaaccacctggaggagcatacagacacatgtttgccgaagcagagcgtgtacgatgcatacagaaaatattgtgagtcatag

SEQ ID NO: 29069 - DNA, 291 bp, Artificial Sequence
  derived and/or modified sequence
atggccgaggacgagcccgacgccaagagccccaagaccggcggcagggccccgccggggggggctgaggcaggggaacccactaccctgctccagaggctgcgtggcacaatcagtaaggctgttcaaaataaagtagaagggatccttcaggatgtgcagaagttttcagacaacgataagctctacctatatttgcaacttccaagcggccccacaaccggcgacaaatccagtgaaccttcaacactatcgaatgaggagtatatgtatgcttacagatggatctag

SEQ ID NO: 29070 - DNA, 321 bp, Artificial Sequence
  derived and/or modified sequence
atggccgaggacgagcccgacgccaagagccccaagaccggcggcagagccccccccggaggagccgaagcgggagagccaaccacattgctgcagcgcctgcgagggacaatctcaaaggccgtgcagaacaaagtggagggcattctgcaggatgtacagaaattttcggacaacgataagttgtatttgtatttgcaattacccagcggccctactactggcgataaatcctctgagccttcgaccctgtctaatgaggagtatatgtatgcgtacaggtggatccgaaatcacctagaagagcacacagacacctag

SEQ ID NO: 29071 - DNA, 555 bp, Artificial Sequence
  derived and/or modified sequence
atggccgaggacgagcccgacgccaagagccccaagaccggcggcagagcccctcccgggggggccgaagctggagaacccactacattactgcagagacttagaggcaccatctcgaaagccgtccagaataaagtggaagggattttgcaagatgtgcagaagttttctgataacgacaagctttacctctacctgcagctccccagtggacctactacaggcgataagtctagtgaaccaagtaccttatccaatgaagaatacatgtatgcttacaggtggattcgaaaccatcttgaagaacatacggacacatgcctcccaaagcagagcgtgtacgatgcctacagaaagtattgcgagtcccttgcatgttgcaggcccctctccactgccaacttcggtaagattattcgggagatatttccagatatcaaggcacggaggctgggcggtagggggcaatctaagtactgctacagcggcatccgccgcaagactctggtctccatgcccccgctgcccgggttggatctgaagggatctgagtag

SEQ ID NO: 29072 - DNA, 1731 bp, Artificial Sequence
  derived and/or modified sequence
atggccgaggacgagcccgacgccaagagccccaagaccggcggcagagctccgcctgggggagccgaggccggagagccaacaactctcctccagcggcttaggggtacaatcagcaaggccgtgcagaacaaggttgagggcattctgcaggatgtgcagaaattttcagataatgacaaactctatctctacttacaactcccatccggcccaacgactggggataaaagaaagtattgtgagtctctcgcttgttgcaggcctctgagtaccgcgaactttggaaaaatcattcgagaaatcttccctgacatcaaagcacgtcggctgggtgggagagggcagtctaagtattgctactccgggattcggcggaaaactctggttagcatgcccccactgccagggttggacttgaaggggagcgagagccctgaaatgggccctgaagtaaccccagcgccacgcgacgagttggtagaggctgcgtgtgccttgacatgtgattgggcagagcggatcctgaaacgaagcttcagtagcatagtggaggtggctcgctttctcctgcagcagcacctgatttctgccaggtccgctcacgcccatgtgctaaaggccatggggctggccgaggaagacgagcacgcccccagggaacggagtagcaagccaaagaatggtctggagaatcctgagggtggcgctcacaaaaaacctgagcggttggcacaacctcctaaggatttggaagcaaggactggcgcaggtcctttggcaagaggcgagagaaagaagagcgtggttgaatcctcagcccccggggccaacaacctccaggttaatgccctggtcgcccgtctgcctctgctgctgcctcgggctccacgttctctgattcctccaattcccgtcagtcctcccatccttgccccccggctgtctagcggtgcccttaaagtggcaacactacccctctcttcgagagcaggagcaccaccagctgctgtaccaataatcaatatgatcctgcctacagttccagccctgcctggccccgggcccggtccgggccgcgctccccccggcgggctgacccagccccggggaacggagaaccgcgaagtagggattggcggcgatcaagggccccatgacaaaggcgtaaagcggacagctgaagtgccggtaagcgaagcttccgggcaggcacctcccgcgaaggcagctaagcaggacattgaggatacggcctcagatgccaagcgaaagcggggcaggcccaggaagaagtccggtgggagcggcgaacggaactcgactcctctgaaaagcgccgccgccatggaatcagcacaatcctccaggctgccctgggagacttggggttccgggggggaggggaatagcgccggaggggcagagagaccaggccctatgggcgaggcagaaaaaggcgcagtgctcgctcaggggcagggggacgggacggtctccaaaggaggtagaggtccggggtcccagcatacaaaggaggctgaggataagatcccattggtgccttcaaaggtgtctgtaataaaaggaagtcggagtcagaaggaagctttccctcttgccaagggagaggtcgataccgcaccccagggcaataaggatctgaaagagcacgtgcttcagagcagcctttcacaggaacacaaggatccaaaagccactcctccatag

SEQ ID NO: 29073 - DNA, 1851 bp, Artificial Sequence
  derived and/or modified sequence
atggccgaggacgagcccgacgccaagagccccaagaccggcggccgagccccaccaggcggcgctgaggccggagaaccaaccactctgttgcaacggctgagaggaactattagcaaggccgtccaaaacaaagtcgaagggatccttcaggacgtgcagaagttctctgacaatgacaaactgtatttatacctgcagctaccatctggtcccaccacaggtgacaagtcaagcgaaccgtccaccctgtctaacgaggagtatatgtatgcatacagatggattcgcaatcaccttgaggagcacactgacacttgccttccaaaacaatcagtctacgatgcgtacagaaaatattgtgaatctctggcttgctgtcgtccactgtccaccgccaattttggcaagataatccgggagatcttcccagacatcaaggccaggagactgggaggccgcgggcagtcaaagtactgctatagtggcataaggaggaagactctggtgtccatgccccccttgcccggcctcgacctgaagggtagtgagagccccgaaatgggcccagaggttaccccagcacctcgggacgaactggtggaagccgcatgcgcccttacatgcgattgggccgagagaattttgaagagaagcttcagctcaatcgtcgaggtggcacggtttcttctccagcagcacctcatttcagcacggtccgctcatgcgcacgtgcttaaagctatgggtctcgctgaggaggacgagcatgccccccgggaaaggtcttctaagcctaagaacgggttggagaatccggaagggggcgcccataaaaagcccgaacgccttgctcagccacctaaagatttggaagccaggacgggggccggaccactcgcgcgcggcgagagaaaaaagtccgtggtggaatcaagtgcaccgggtgcgaataacctacaggtaaacgcactcgtggcccgactgcccctccttttacctcgcgccccgcggtccttgattccccccattccggtaagccctccgattctggctccaaggctttcttccggggcactcaaggtggcaaccctgccgttgtcgtcccgcgcaggcgcacccccggcagccgtaccgattattaacatgatcctcccaactgtgcctgccttgcccggccctggccctggtcctggccgggccccaccaggaggcctaacgcaacctagaggcaccgagaatagagaggtgggcatagggggggaccagggccctcacgataaaggagtcaagcgcactgccgaggtacctgtctctgaagcctccggccaggctcctcccgcaaaagctgccaaacaggacattgaagatactgcatcagacgctaagcgaaagcgtggccgtccacgaaagaagtcaggagggagtggggagcgcaatagcacacccctgaaaagcgctgccgcaatggagagcgctcagagctccagactcccatgggagacatggggcagtgggggcgagggaaacagcgccggaggcgcggagagacccggacccatgggcgaagccgaaaaaggcgctgtgctggcgcagggtcagggtgatggcacagtgagcaaagggggaagaggacctgggtctcagcacactaaggaggcagaggataaaattccgcttgtcccttccaaggttagcgtgatcaagggtagtagaagccagaaagaggcattccccctggcgaaaggggaggtcgacacagccccacaaggcaataaagatctgaaagaacacgtgctccagtcatccttgagccaggagcataaagatcccaaggccaccccaccctag

SEQ ID NO: 29074 - DNA, 498 bp, Artificial Sequence
  derived and/or modified sequence
atggccgaggacgagcccgacgccaagagccccaagaccggcggccgcgcccctccaggcggggcagaggccggagaacctacgacccttctgcagcgacttagggggacgatatccaaagccgtgcaaaacaaggttgaggggattctgcaagatgtacagaagttctccgataatgacaagctatatctgtatctgcaattaccatccggccccactacaggggacaaatcttccgagccctctactctttccaatgaggagtacatgtatgcgtaccggtggattagaaatcatctcgaagagcataccgatacctgtctccccaagcagtcagtgtacgatgcatataggaaatactgcgagagccttgcttgctgtaggcctctgtccacggccaactttgggaagattattcgtgaaatctttcccgacattaaggcaaggcgactgggaggccgtggtcaaagtaaatattgctatagtggcattcgttag

SEQ ID NO: 29075 - DNA, 1851 bp, Artificial Sequence
  derived and/or modified sequence
atggccgaggacgagccagacgccaagtccccaaagactgggggtcgcgctcctcccggaggtgctgaggccggagagccgaccaccctcctgcagagactccgcggaactatctccaaagcagtgcagaataaagtggaaggcattcttcaagatgttcaaaaattctccgacaatgacaagctttacttgtacctgcagctgcccagcggccctactactggggacaagtcctctgagccttctacattgagtaatgaggagtacatgtacgcataccgatggatacggaaccatctcgaagagcataccgacacctgcttacctaagcagtctgtttatgacgcatacaggaaatactgcgagagtcttgcttgttgtaggcccctctccacagcaaatttcggcaaaatcattcgggagatcttccctgacattaaagctaggaggttggggggaagaggtcagtcaaagtattgttattccggaattaggcgtaagacactggtgtccatgccccctcttcccggactcgacctgaagggcagtgagtcccccgaaatgggcccagaggttacccccgcacccagagatgagctcgtggaggccgcatgtgcgctgacgtgtgactgggccgaacggatcctaaagagaagcttcagcagcattgttgaagtagcaaggttcctcctgcagcagcatctcatatccgccagaagcgctcacgcccacgtcctaaaagccatgggattagcagaggaggacgaacatgcacccagggaacgttcaagcaagcccaaaaatggactggagaaccccgaagggggtgcacacaagaagcctgagcggctggcacagccacccaaagatctggaagcacgtacaggcgctggacccctggccagaggggagcggaagaaatccgtggttgagagcagtgcccctggtgccaataatctccaggtgaacgctctggtggcgaggttgcctctcctactccccagagctcccagatcactaatacctcccattccagtgagccctccgattcttgcgccacggctgtcctcgggtgctttgaaagtcgcaaccctgcctctgagttctcgagccggtgccccacccgctgctgtccctataattaacatgatcctacccacagtgccagcccttcccggaccgggacctgggccaggccgtgcccctcccggaggcctgacgcagcctcggggtacggagaatcgggaggttggcatcggcggtgaccaaggaccccacgataaaggcgtgaaacgcactgcggaagtgccagtttcagaagccagtggccaggcgcctccagccaaggcggctaagcaagatatcgaggacactgcctccgatgccaaaaggaagcggggacgtccgagaaagaaatccggagggagtggggaacgaaacagtactcctctaaagagtgccgctgccatggaaagcgcccagtcaagccgcttgccctgggagacttgggggtccggtggagaggggaactcagctggaggcgctgagcgtcccggtcctatgggggaggctgaaaagggggctgtgcttgcacaggggcagggggacggtaccgtatcgaaggggggtagaggtcccggaagccagcatacgaaagaagcggaggataaaattccactcgtgccgagcaaagtttcagtcatcaagggctcaaggtcccaaaaagaagccttcccactggcgaaaggggaggtggacacagccccacagggcaataaggacctgaaagagcacgtgctccaatcaagcctcagccaggaacataaagaccccaaagccacgcctccttag

SEQ ID NO: 29076 - DNA, 1851 bp, Artificial Sequence
  derived and/or modified sequence
atggcagaggacgagcctgacgccaaaagcccaaagactggcggacgcgcaccgcctgggggtgctgaggcaggcgaaccgactactctgctgcaaagactgcgtggcaccataagtaaagctgtgcaaaataaagtggagggtattctgcaggacgtgcagaaattcagtgacaatgataaactgtacctatatcttcagcttccatctggcccaactacgggagataaatcaagcgagccctcgaccctcagcaatgaggagtatatgtatgcctatagatggatccggaatcaccttgaggaacatacggacacttgcctccccaaacagagtgtctacgacgcttataggaaatattgcgagtctttggcttgctgtaggcccctctcaactgccaacttcgggaaaatcatacgcgagattttcccggatataaaggccagacggctggggggtaggggccagagcaaatattgctactctggtatcagaagaaagaccctggtgtccatgcctcccctgccaggactggacttgaagggcagcgagtcacccgagatgggccctgaagtcactccagcccctagagatgagttggtagaggcggcatgtgccctgacgtgtgattgggctgagcgcatcctcaaacgctcattcagcagtatcgtggaagttgcaagattcctcctgcagcaacacctcatttccgcccgatccgctcacgcccatgttcttaaggcgatgggcttggcagaggaagacgagcatgccccacgagagaggagtagtaagcccaagaacggcctggaaaaccctgagggcggagcccacaaaaagccagaacggctagcgcagcctcctaaagatctggaggctagaaccggtgctgggccactcgcaaggggggaaagaaaaaaatccgtggtagaatcttccgcccctggggctaataacctgcaggtcaacgctctggtcgcacggctgcctctccttctgcctcgagccccacggtccttaatccctcccatccctgtgagcccaccaatccttgctccacgattgagcagtggcgcactcaaggtggcaaccctgccactgtcttctagagccggagcccctccagctgcagtgccgattatcaacatgatcctaccaaccgtgccagctctgcctgggcctggcccaggccctggaagagcaccacctggcggtttgactcagccccgtggaacggagaaccgagaagttgggattggtggagaccaagggccacacgataagggcgtgaagagaactgcggaagtaccagtatcagaggcatccggccaagcccctccagctaaggccgcaaagcaggacattgaagacacggcgtctgatgccaaacgcaagagggggagaccccgaaaaaagtctggaggctctggcgagcggaacagtacccctttgaagtccgcagccgctatggagtccgcccagtctagtcgtttaccctgggaaacatgggggtctggcggtgaaggaaacagtgctggcggtgcagagcgccctggccctatgggcgaggcggaaaaaggggctgtcttggcccagggacagggcgacggtaccgtatccaaggggggaagaggccctggctcccaacatacgaaggaagctgaagacaagatcccactcgtccctagcaaggtgagcgtcatcaaaggcagtagatcccagaaagaggcttttccccttgcgaagggtgaagttgatacggcaccccaagggaacaaagacctgaaggaacacgtccttcagtcatctctaagccaggagcataaagaccccaaggccacacccccatag

SEQ ID NO: 29077 - DNA, 1791 bp, Artificial Sequence
  derived and/or modified sequence
atggcagaggatgagcccgacgcgaagagccccaaaaccggaggcagggcccctcccggaggcgcagaagcaggcgaacccacaaccttgctgcagcgcctaagaggaacgatcagtaaagccgtccaaaacaaggttgagggcatacttcaggacgtgcaaaagtttagcgacaacgataaactctatctatatctgcagttgccttccggacctactaccggagataaatccagcgaaccatctactctttctaacgaggagtatatgtatgcatatcgctggatcagaaatcacttggaggaacataccgacacgtgcctgcccaagcagtctgtgtacgacgcgtaccgcaagtattgcgaatctcttgcgtgttgccggccactttccacagcaaattttggcaagatcatcagagagatcttccccgacataaaggctaggcgcctgggtggacggggacagagtaaatactgttattccggaattcggcgtaaaaccctcgtgtccatgcctccactaccgggtctggatttaaaaggaagcgaaagtccagagatgggccctgaagtcaccccagcacccagagatgaactggtagaggccgcatgcgctttgacttgtgattgggccgaaaggatactcaaacgtagtttctcttctatcgtggaggtggccaggtttctgcttcagcagcatctgatcagcgcacgcagtgcacacgcgcatgtgctcaaggcaatgggattagctgaggaggatgagcacgctccaagagagaggtcttccaaaccgaaaaatggcctggaaaatcccgagggcggagcgcataagaagcccgagagattggcccagccccctaaagacttggaagcccgaacaggcgctggaccactggccagaggagaacgtaaaaaaagcgtagtagaatcctccgccccaggtgctaacaacctccaggtcaatgccctggtcgccaggcttcctctgctcctaccgagagctcccaggtcattaataccgcctataccagttagcccacccatactggcacctcggctctcaagtggggctctgaaagtggcaacactaccgctaagtagcagagcaggcgcaccacccgctgctgtgccaattatcaatatgattctacctacagtgcccgcactgcctgggcctggtccagggcctggtcgcgctcccccaggaggcctaacacaacccagaggtacggaaaatagagaagtcggtattgggggagatcaaggcccacatgacaagggcgtcaaacgtactgcagaagtcccagtatcagaggcatccgggcaggcaccacctgccaaggctgcaaaacaggatattgaggatactgcctcggatgccaaaagaaagcgcggaagaccacgcaaaaaatcaggaggtagcggagagaggaacagcacacctctgaaatcggccgctgccatggagagcgctcagagctctcgcctgccctgggaaacctgggggtcgggaggagagggtaatagcgctggcggagctgaacgtcccggtcccatgggtgaggcagaaaaaggggcagtgctggcacaggggcagggtgacgggaccgtgtccaagggcggacgtggaccaggaagtcagcacaccaaagaagccgaggacaaaatacctcttgtgcccagcaaagtgtctgtcatcaaggggagtcgttcccagaaagaggctttcccgttagccaaaggtgaggtggacacggcccctcagggcaataaggatttgaagtag

SEQ ID NO: 29078 - DNA, 357 bp, Artificial Sequence
  derived and/or modified sequence
atggcggaggacgagccggatgcaaagagcccaaagactggcggtagggccccaccaggcggtgcagaagcaggggagcccacgacactgttgcagcggcttagggggactatctctaaagcagtgcagaacaaggtggagggtatccttcaggacgtgcagaagttctcggataacgataaactgtacctatatttgcagcttccctctgggcctaccactggtgataaaagttcggagccttcaactctctctaatgaagagtatatgtacgcttaccggtggatcaggaatcacctggaggagcacactgatacatgtctgccaaaacagagcgtgtacgacgcttataggtag

SEQ ID NO: 29079 - DNA, 693 bp, Artificial Sequence
  derived and/or modified sequence
atggctgaagatgaaccggatgcaaagtcacccaagacagggggtcgggcacctcctggaggagccgaagcaggcgaacctaccacgttacttcagcggctgcggggtaccatttcgaaggcagtccagaacaaagtggaaggaattctgcaggacgtgcagaagtttagtgacaacgataaactctatctttatctccagctcccctccgggcctactacaggcgacaagagttctgaaccgagcaccctgtctaacgaggaatacatgtatgcgtatcggtggatccgcaatcacctggaggagcacacagacacctgtttgcccaagcagtctgtgtatgatgcctatcgtaagtattgtgaaagtctggcctgttgtcgaccccttagcacggccaacttcggcaaaattatcagagaaatttttcctgacatcaaggcccgacggctcggcggtcgaggccagtccaagtattgttattcaggaatcaggcgcaaaactctggtaagcatgcctccccttccaggtctggatttgaagggttccgagtcccccgagatgggccctgaggtcacacctgctcccagggacgaacttgtggaagcggcttgtgcacttacatgcgactgggctgagagaatcttgaaacggagcttctctagtattgtagaagtagcccgttttctttag

SEQ ID NO: 29080 - DNA, 372 bp, Artificial Sequence
  derived and/or modified sequence
atggccgaggacgaaccagatgccaagtcacctaaaacaggcggacgcgcacccccaggaggggcagaagccggtgagcctacgacgcttctccagagactgcgagggactatatcaaaggcagtccagaataaggtagaagggatattacaagatgtccagaagttctccgataacgataagctgtacttatatctccaattgccaagcggtccaaccactggcgacaaatcctccgagcctagcaccttaagcaacgaggagtatatgtacgcttaccgctggatacgcaaccacctcgaagaacacacagatacatgtttacctaaacaaagcgtgtatgacgcttatcgaaaatactgtgagtcttag

SEQ ID NO: 29081 - DNA, 291 bp, Artificial Sequence
  derived and/or modified sequence
atggcggaggatgagcctgatgccaaatccccaaagaccggcggtcgtgccccacctggtggagcggaggcaggtgagccaacgactctgttgcaacgcctgcggggtactatcagcaaggcagtccagaataaagtcgagggcattctccaggacgtccaaaaattctctgataatgacaagttgtacttgtatttgcagctaccatctggcccaaccaccggcgacaagagcagcgaaccaagcacgttgagcaatgaagagtacatgtatgcttaccggtggatatag

SEQ ID NO: 29082 - DNA, 321 bp, Artificial Sequence
  derived and/or modified sequence
atggcggaggatgagccagatgctaagtcaccaaaaacaggaggcagagcacctcccggtggcgctgaagctggcgaacccactacgttactgcaacgccttcggggtacaatcagtaaggctgtccaaaacaaggttgagggaattctgcaggatgttcagaagtttagtgacaacgataaattgtacctctatctccagctcccttcagggccaaccactggtgacaagtcctccgagccctcaacgctgtctaatgaggaatacatgtacgcataccgatggatacgcaatcacctcgaggaacatacagacacgtag

SEQ ID NO: 29083 - DNA, 555 bp, Artificial Sequence
  derived and/or modified sequence
atggcagaagacgaaccggatgctaaaagccccaagaccggagggagggctcctccaggtggcgctgaggccggagagcccactacactcttgcagcgcctcaggggcacgatttcaaaggctgtgcaaaacaaagtcgaggggattctgcaagatgtccaaaaattctcagataatgacaaattgtacctgtatctccagctgccgagtggtcctaccactggcgataagtcttcagagccctccacactgtcaaacgaggagtatatgtatgcctatcggtggattcgtaatcacttggaagaacatactgatacctgtcttcctaagcagtctgtgtatgacgcctacagaaagtactgcgagtccctggcctgttgccgcccattgtccaccgcaaatttcggaaaaatcatccgcgaaatcttccctgacataaaggctcgacgattaggaggtcgcggtcagagtaaatattgctacagcggcataaggcgcaagacactggtgagcatgcccccactgccgggtctcgatctcaaagggagtgaatag

SEQ ID NO: 29084 - DNA, 1731 bp, Artificial Sequence
  derived and/or modified sequence
atggctgaggacgagcccgatgctaagagccctaaaacaggcggacgtgcccctccgggaggagccgaggccggtgagcctaccacgttgcttcagcgccttcgaggaactataagtaaggccgtccaaaacaaggtagagggtattctccaagatgtgcaaaaatttagcgacaatgacaagctgtacctatatttacagctccctagtggccctacgacaggcgacaaaagaaagtactgcgaatctcttgcatgctgtaggccattgtccaccgcgaactttggcaagatcataagagagatctttcctgacatcaaggcaaggcgcctggggggaaggggccagagtaagtactgttacagcggaatccgcaggaagactctcgtgtcaatgccccctctgcctggtctagatctcaagggatcagaaagccccgagatggggcctgaggtgaccccagctcctcgggatgagctcgttgaggctgcctgcgctctcacgtgcgactgggcagaacgaattctgaaaagaagcttcagttcaatcgtggaggtagccagattcttgctgcaacagcacctcatttctgcacgcagtgcccatgcccatgttttgaaggccatgggcctcgccgaggaagacgagcatgcaccccgtgagagatcaagcaaacctaagaacggcctcgagaatcccgaaggcggagcgcacaagaaacctgagaggctggcccagcctccaaaagacttagaggccagaaccggagcaggtccccttgccaggggagagcgcaagaagagcgttgtcgagagctccgcccctggggcaaataacttgcaagtgaatgcacttgttgccagattacctctgctgctgcccagagccccaaggagtcttattcctccgattcccgtgtccccaccaatacttgcacctagactaagttccggcgctctaaaggtggccactctccctctttcttcgcgcgcaggcgcaccaccagcagccgtgcctattattaacatgatactcccgaccgttccagccttgcctggcccaggccctggaccaggacgtgcccctcctggaggcctgacacaacccagagggactgaaaaccgggaggtaggtatcggcggagaccagggccctcatgataaaggtgttaaacgtaccgctgaggttccggtcagcgaggcttcaggccaagctcctcctgccaaggccgctaagcaggacatcgaagataccgcgtccgatgcaaagcgcaagaggggcaggccaaggaagaagtccggcggatccggtgaacggaactccactccactgaagtcagccgctgcaatggaatcagcacagagtagtaggctaccctgggagacatggggatcagggggagaaggaaattcagctgggggagcagagagacccggacccatgggagaagcggagaagggagctgttttggcccagggacagggagacggtacagtgtccaaaggtggtcgcggacccggatcacagcatactaaggaagccgaagacaaaattcctctcgtgcccagcaaagtgtccgtgatcaaagggagccgttctcagaaggaggcctttccactggccaaaggcgaggtggacaccgcaccacagggcaacaaagatttaaaggaacatgtgctgcagtcgtctttaagtcaggagcataaggaccctaaggccacaccgccttag

SEQ ID NO: 29085 - DNA, 1851 bp, Artificial Sequence
  derived and/or modified sequence
atggctgaggatgagcccgatgcaaagtctccaaaaacaggcggaagagctccacctggcggtgcggaagcaggtgagcctaccaccctcctgcagcggctgcgaggaacaatttcaaaggcagtccagaacaaggtcgagggtattctgcaagatgtccaaaagttctccgacaatgataagctgtacctatacctacaactgccctcaggtccgaccaccggagataagagctccgagccatccactttatctaatgaggaatacatgtacgcatacaggtggattcggaatcacctggaggagcacacagatacgtgcctgcccaaacagtcagtttacgatgcatatcgtaaatattgcgagtcattggcttgttgtcggcctctgagtacagcaaacttcggtaagatcatccgggaaatatttccggacataaaggccagaagactgggcggtcgaggtcagagtaaatactgctacagcggaatccgccgtaaaactctggtcagtatgccccctctcccgggactcgacctgaaggggtccgaatcaccagagatgggaccggaagtgacacccgcacctcgggacgagcttgtagaggccgcatgtgccctgacttgcgattgggctgagcgcattctgaagcggagcttctcatccatagtggaggttgcaagatttctgctccagcagcaccttatctctgcgaggagcgcccatgcacacgtgctgaaggccatgggcttggccgaggaagatgaacatgcccctagggagcggtcttcaaaacccaaaaacgggctggagaacccagaggggggtgcacataagaaacccgagaggctggcacagccccctaaagatctggaagcacgtaccggagcagggccacttgcacgcggagaaaggaaaaagtccgtcgtagagtccagcgcccctggtgcaaataacctgcaggtgaacgcactagttgcacgactgcctttgctcctcccgcgagcccctagatcgctgataccaccaatcccagtcagcccccctatcctggcacctagattgtcatccggcgctctgaaagtggccacgttgccactctcgtcgcgggctggcgcaccgcctgccgctgtcccaatcattaacatgatcctacccactgtgcccgctctgcccggacctgggccagggccaggccgtgcccctcccggaggcctgacccagcccagaggcacggaaaacagggaggtgggaattggcggagaccagggaccacacgacaagggcgtaaagagaactgccgaagttcctgtgtcagaggcatcaggacaggcacctcccgctaaagccgcaaaacaagatatagaagatacagcctcagacgcgaaacggaagcggggacgcccacggaaaaaatctggcggttccggggaacgcaatagtacacccctgaaaagtgcggctgctatggagtcagctcagagttctaggttgccttgggagacctggggctccggcggagaggggaattccgccggaggggcagaacgacctggacccatgggagaggcagagaaaggggctgtgctggctcagggtcagggagatggaactgtctccaaggggggacgcggtcccggatcccagcacacaaaggaggccgaggacaaaatccccctggttcccagtaaggtgtcagtgattaaagggagtagatctcaaaaggaagcattccctttggcaaagggcgaagttgacaccgctccgcaggggaataaggacctgaaggagcacgtgctccagagttcattgagccaggagcacaaggatcccaaggcaacccctccttag

SEQ ID NO: 29086 - DNA, 498 bp, Artificial Sequence
  derived and/or modified sequence
atggcggaggacgaacccgacgctaaatccccaaagactggcggtagagcgcctccaggtggcgctgaagccggtgaacctaccacccttctacagcggttgcgtggcacaataagcaaagccgtgcaaaataaggtggaggggatcctgcaggacgtccagaaatttagcgataacgataaactgtacctttacctgcagctcccaagcggacctaccacaggggacaagagttcagagcccagcacgctgtctaacgaagaatacatgtatgcatataggtggatccgcaaccacctggaggaacatacggacacttgcctcccaaagcaatcagtttatgacgcctaccggaagtactgtgagtcactggcatgctgtaggcccttgagcactgctaatttcgggaagatcattcgcgagatttttcctgatataaaagccaggaggctggggggacggggacagtccaagtactgctatagcggaattaggtag

SEQ ID NO: 29087 - DNA, 3576 bp, Artificial Sequence
  derived and/or modified sequence
ccaggaccttggggctgggctggagtgaaggtggctacgagttttccagatttaggagacttcagaaaggtggggcagatagaatggagatggcaaagatctctttgggcatatatgggcctggcgaagtaatggaataatttctaattttcggagaaggcaagtgccctcatgccgggatggcagaagatgagcctgatgctaagagccccaagactgggggaagggcccccccaggtggtgctgaggctggggaacctaccacccttcttcagaggctccgaggtaccatttccaaggccgtgcagaacaaagtagaggggatcctgcaagatgtacagaaattttctgacaatgacaagctgtatctctaccttcagctcccctcaggacccaccactggagacaaaagctcagagccaagtacactgagcaatgaggagtacatgtatgcctataggtggatccgcaaccacctggaagagcacactgacacctgtctgccaaagcaaagtgtttatgatgcctatcggaagtactgtgagagtcttgcctgttgccgcccactcagcacagccaactttggcaagatcatcagagagatcttccctgacatcaaagctcgaaggcttggtggccggggccagtccaaatattgctacagtggcataaggaggaagaccttggtgtctatgccacccctgcctggacttgacctaaagggttctgagagtccagaaatgggcccagaagtaaccccagcacctcgagatgaactggtggaggcagcgtgtgccctgacctgtgactgggcagagcggatcctgaaacggtccttcagttccatcgttgaggtcgcccgcttcctgctacagcagcatctcatctctgcccgatctgcacatgcccatgtgcttaaggccatggggctcgctgaagaggacgaacatgcacctcgggaacggtcatctaaaccaaagaatggtttagagaacccagagggtggagcccacaagaagccagagagactggcccagcctcctaaggatctggaagcccgaactggggccggtcctctcgcacgtggagagcggaagaagagtgtagttgagagctcggccccaggagccaataacctgcaggttaatgccctagtggctcggctgcctctgctccttccccgggcccctcgctcactaattccgccaatcccagtctctccacctattctggcccccaggctttcttcaggtgccctgaaagtggctacactgcctctgtctagtagggccggggcacccccagcagctgtgcccatcattaacatgatcttaccaactgttcctgctttgcctggacctggacctgggcctgggcgagctccacctgggggactcactcagccccggggcacagagaacagagaggtaggcataggtggtgaccaaggaccacatgacaagggtgtcaagaggacagctgaagtacctgtgagtgaggccagtgggcaggctccaccagctaaagcagcaaagcaggatatagaggatacagcaagtgatgccaaaaggaaacgggggcgccctcgaaaaaagtcaggtggaagtggggaaaggaattctacccctctcaagtcagcagctgccatggaatctgcccagtcctcaaggttaccatgggagacatggggctcaggaggggaaggcaactcagctggaggggcagagaggccagggccaatgggagaggctgaaaagggggcagtacttgcccagggtcagggagatggtactgtttccaaaggaggaaggggccccggttcccagcataccaaagaagcagaagataaaattcccttggtcccctcaaaagtgagtgtcatcaagggcagcagaagccaaaaggaggcttttcctttggcaaagggagaggtagacactgcaccacagggtaataaagacttaaaggagcatgtgcttcaaagttccttatcccaggagcataaagacccaaaagcaacacccccatgatacaggtctgtggggaagagtgtttatatccctacgttaactttgcctagtagaggcccttctttgcacttgcttctcatttggctattcttttcctaaggaagtccattctcctctgtacagacagctgagtcacccagtctacttagtacctggttgctgcctctgaccttttcagcttgataccctgggctttagtgtaaccaataaatctgtagtgaccttacctgtattccctgtgctatcctgtgggaaggtaggaatgggctaagtatgatgaatatataggttagggatcttttggttttaaatcacagaaaacctaattcaaactggcttaaaataaaaaggatttattggttcatgtaactagaaagtccataggtagtgctggctccaggtgaagacttgacccagtagttcagtatgtctctaaataccggactgacttttttctcactgttgcatcttctgtaggaccatttaagtctgggccacttaatggctgccagcattcctaagattacacttttccccatttatgtccaatcagaaaaagaaggcatctttgtaccagaaatctcagcaaaagccctaatattcacactgattaggcctgggtcacatgtccaccctgaccaatcactgtggccaggaggatgatacatgctaatttgcttattctatatcatggacaacacctttggggaaaagggtgggggtcagcctccccaaaatcacatggattccccaagtggaaactaggagcagggagttgcttgggtggccgctaacaccaggctactcttattttagcttgctaagttgagatcagctagacctgctttcttttctcctcagtcttgcatttccctcaatacaagctgtagcctctttcctcgtttctagtctcagaaggaaggagagggaagccattctcctctagggactcttcagtctcatttagatgatagtccctttttttctacctccatattagagatggagctccttccttttcctgtttcttaatttttgtcttctcattcctgcttccctctcaccctattgccagttccaccaactagagtgaaagacttcctagccatttcattaaatctattctgtatccaccaggtggcagcatcttgtcatacgtgtcaggacttaggactgcggggtttaggttagatgtcacggaaaaagctagttctgtggtcaggcggcaccaatgagaaaggaatgcagaccctccagatgtatccttgggaaaagcagtaaaccaactaatatttattgaagacctactttgtcctctacatagggtagcttctgtcagggaatcttggttcttcccaagaaacactgattttctttcagggagacttcatgtgttcatttatttccaccacagcagattttaagaaattataatatgtaatatttgatatctataaagagtatatctaacgtgaataaattatgaagcatactaatgagtacctatgacccataacacatatacattaaaacattttaaatacca

SEQ ID NO: 29088 - DNA, 2459 bp, Artificial Sequence
  derived and/or modified sequence
cgtgtatctaggcagatcgcggctgttacaaccattcagaaaaaggaaaataaagcaacgcacgagccggctgggccaggaccttggggctgggctggagtgaaggtggctacgagttttccagatttaggagacttcagaaaggtggggcagatagaatggagatggcaaagatctctttgggcatatatgggcctggcgaagtaatggaataatttctaattttcggagaaggcaaccctcatgccgggatggcagaagatgagcctgatgctaagagccccaagactgggggaagggcccccccaggtggtgctgaggctggggaacctaccacccttcttcagaggctccgaggtaccatttccaaggccgtgcagaacaaagtagaggggatcctgcaagatgtacagaaattttctgacaatgacaagctgtatctctaccttcagctcccctcaggacccaccactggagacaaaagctcagagccaagtacactgagcaatgaggagtacatgtatgcctataggtggatccgcaaccacctggaagagcacactgacacctgtctgccaaagcaaagtgtttatgatgcctatcggaagtactgtgagagtcttgcctgttgccgcccactcagcacagccaactttggcaagatcatcagagagatcttccctgacatcaaagctcgaaggcttggtggccggggccagtccaaatattgctacagtggcataaggaggaagaccttggtgtctatgccacccctgcctggacttgacctaaagggttctgagagtccagaaatgggcccagaagtaaccccagcacctcgagatgaactggtggaggcagcgtgtgccctgacctgtgactgggcagagcggatcctgaaacggtccttcagttccatcgttgaggtcgcccgcttcctgctacagcagcatctcatctctgcccgatctgcacatgcccatgtgcttaaggccatggggctcgctgaagaggacgaacatgcacctcgggaacggtcatctaaaccaaagaatggtttagagaacccagagggtggagcccacaagaagccagagagactggcccagcctcctaaggatctggaagcccgaactggggccggtcctctcgcacgtggagagcggaagaagagtgtagttgagagctcggccccaggagccaataacctgcaggttaatgccctagtggctcggctgcctctgctccttccccgggcccctcgctcactaattccgccaatcccagtctctccacctattctggcccccaggctttcttcaggtgccctgaaagtggctacactgcctctgtctagtagggccggggcacccccagcagctgtgcccatcattaacatgatcttaccaactgttcctgctttgcctggacctggacctgggcctgggcgagctccacctgggggactcactcagccccggggcacagagaacagagaggtaggcataggtggtgaccaaggaccacatgacaagggtgtcaagaggacagctgaagtacctgtgagtgaggccagtgggcaggctccaccagctaaagcagcaaagcaggatatagaggatacagcaagtgatgccaaaaggaaacgggggcgccctcgaaaaaagtcaggtggaagtggggaaaggaattctacccctctcaagtcagcagctgccatggaatctgcccagtcctcaaggttaccatgggagacatggggctcaggaggggaaggcaactcagctggaggggcagagaggccagggccaatgggagaggctgaaaagggggcagtacttgcccagggtcagggagatggtactgtttccaaaggaggaaggggccccggttcccagcataccaaagaagcagaagataaaattcccttggtcccctcaaaagtgagtgtcatcaagggcagcagaagccaaaaggaggcttttcctttggcaaagggagaggtagacactgcaccacagggtaataaagacttaaaggagcatgtgcttcaaagttccttatcccaggagcataaagacccaaaagcaacacccccatgatacaggtctgtggggaagagtgtttatatccctacgttaactttgcctagtagaggcccttctttgcacttgcttctcatttggctattcttttcctaaggaagtccattctcctctgtacagacagctgagtcacccagtctacttagtacctggttgctgcctctgaccttttcagcttgataccctgggctttagtgtaaccaataaatctgtagtgaccttacctgtattccctgtgctatcctgtgggaaggtaggaatgggctaagtatgatgaatatataggttagggatcttttggttttaaatcacagaaaacctaattcaaactggcttaaaataaaaaggatttat

SEQ ID NO: 29089 - DNA, 2056 bp, Artificial Sequence
  derived and/or modified sequence
ttttttttccaagcctagaagggcagaatatgttcgtatcctttctgacctcccaggcatatgcaatgttttccagatttaggagacttcagaaaggtggggcagatagaatggagatggcaaagatctctttgggcatatatgggcctggcgaagtaatggaataatttctaattttcggagaaggcaagtggtgagaaaaagaccaccggggaaattcggaggctttgtttctgtttctctgcctttctggccctcatgccgggatggcagaagatgagcctgatgctaagagccccaagactgggggaagggcccccccaggtggtgctgaggctggggaacctaccacccttcttcagaggctccgaggtaccatttccaaggccgtgcagaacaaagtagaggggatcctgcaagatgtacagaaattttctgacaatgacaagctgtatctctaccttcagctcccctcaggacccaccactggagacaaaagctcagagccaagtacactgagcaatgaggagtacatgtatgcctataggtggatccgcaaccacctggaagagcacactgacacctgtctgccaaagcaaagtgtttatgatgcctatcggaagtactgtgagagtcttgcctgttgccgcccactcagcacagccaactttggcaagatcatcagagagatcttccctgacatcaaagctcgaaggcttggtggccggggccagtccaaatattgctacagtggcataaggaggaagaccttggtgtctatgccacccctgcctggacttgacctaaagggttctgagagtccagaaatgggcccagaagtaaccccagcacctcgagatgaactggtggaggcagcgtgtgccctgacctgtgactgggcagagcggatcctgaaacggtccttcagttccatcgttgaggtcgcccgcttcctgctacagcagcatctcatctctgcccgatctgcacatgcccatgtgcttaaggccatggggctcgctgaagaggacgaacatgcacctcgggaacggtcatctaaaccaaagaatggtttagagaacccagagggtggagcccacaagaagccagagagactggcccagcctcctaaggatctggaagcccgaactggggccggtcctctcgcacgtggagagcggaagaagagtgtagttgagagctcggccccaggagccaataacctgcaggttaatgccctagtggctcggctgcctctgctccttccccgggcccctcgctcactaattccgccaatcccagtctctccacctattctggcccccaggctttcttcaggtgccctgaaagtggctacactgcctctgtctagtagggccggggcacccccagcagctgtgcccatcattaacatgatcttaccaactgttcctgctttgcctggacctggacctgggcctgggcgagctccacctgggggactcactcagccccggggcacagagaacagagaggtaggcataggtggtgaccaaggaccacatgacaagggtgtcaagaggacagctgaagtacctgtgagtgaggccagtgggcaggctccaccagctaaagcagcaaagcaggatatagaggatacagcaagtgatgccaaaaggaaacgggggcgccctcgaaaaaagtcaggtggaagtggggaaaggaattctacccctctcaagtcagcagctgccatggaatctgcccagtcctcaaggttaccatgggagacatggggctcaggaggggaaggcaactcagctggaggggcagagaggccagggccaatgggagaggctgaaaagggggcagtacttgcccagggtcagggagatggtactgtttccaaaggaggaaggggccccggttcccagcataccaaagaagcagaagataaaattcccttggtcccctcaaaagtgagtgtcatcaagggcagcagaagccaaaaggaggcttttcctttggcaaagggagaggtagacactgcaccacagggtaataaagacttaaagga

SEQ ID NO: 29090 - DNA, 562 bp, Artificial Sequence
  derived and/or modified sequence
agtgaaggtggctacgaggtagtttctctttctcccttacctttattgttgcttgtgttggaaggcgactgttcagagttttccagatttaggagacttcagaaaggtggggcagatagaatggagatggcaaagatctctttgggcatatatgggcctggcgaagtaatggaataatttctaattttcggagaagccctcatgccgggatggcagaagatgagcctgatgctaagagccccaagactgggggaagggcccccccaggtggtgctgaggctggggaacctaccacccttcttcagaggctccgaggtaccatttccaaggccgtgcagaacaaagtagaggggatcctgcaagatgtacagaaattttctgacaatgacaagctgtatctctaccttcagctcccctcaggacccaccactggagacaaaagctcagagccaagtacactgagcaatgaggagtacatgtatgcctataggtggatccgcaaccacctggaagagcacactgacacctgtctgccaaagcaaagtgtttatgatgcctatcg

SEQ ID NO: 29091 - DNA, 902 bp, Artificial Sequence
  derived and/or modified sequence
agcgcatgagttccgctaccccgccccacccccgctccactttgcagaaaccggggattgaatggagggggaagggaaggagttttccagatttaggagacttcagaaaggtggggcagatagaatggagatggcaaagatctctttgggcatatatgggcctggcgaagtaatggaataatttctaattttcggagaagccctcatgccgggatggcagaagatgagcctgatgctaagagccccaagactgggggaagggcccccccaggtggtgctgaggctggggaacctaccacccttcttcagaggctccgaggtaccatttccaaggccgtgcagaacaaagtagaggggatcctgcaagatgtacagaaattttctgacaatgacaagctgtatctctaccttcagctcccctcaggacccaccactggagacaaaagctcagagccaagtacactgagcaatgaggagtacatgtatgcctataggtggatccgcaaccacctggaagagcacactgacacctgtctgccaaagcaaagtgtttatgatgcctatcggaagtactgtgagagtcttgcctgttgccgcccactcagcacagccaactttggcaagatcatcagagagatcttccctgacatcaaagctcgaaggcttggtggccggggccagtccaaatattgctacagtggcataaggaggaagaccttggtgtctatgccacccctgcctggacttgacctaaagggttctgagagtccagaaatgggcccagaagtaaccccagcacctcgagatgaactggtggaggcagcgtgtgccctgacctgtgactgggcagagcggatcctgaaacggtccttcagttccatcgttgaggtcgcccgcttcct

SEQ ID NO: 29092 - DNA, 585 bp, Artificial Sequence
  derived and/or modified sequence
agtgaaggtggctacgaggtagtttctctttctcccttacctttattgttgcttgtgttggaaggcgactgttcagagttttccagatttaggagacttcagaaaggtggggcagatagaatggagatggcaaagatctctttgggcatatatgggcctggcgaagtaatggaataatttctaattttcggagaaggcaagtgccctcatgccgggatggcagaagatgagcctgatgctaagagccccaagactgggggaagggcccccccaggtggtgctgaggctggggaacctaccacccttcttcagaggctccgaggtaccatttccaaggccgtgcagaacaaagtagaggggatcctgcaagatgtacagaaattttctgacaatgacaagctgtatctctaccttcagctcccctcaggacccaccactggagacaaaagctcagagccaagtacactgagcaatgaggagtacatgtatgcctataggtggatccgcaaccacctggaagagcacactgacacctgtctgccaaagcaaagtgtttatgatgcctatcggaagtactgtgagagt

SEQ ID NO: 29093 - DNA, 545 bp, Artificial Sequence
  derived and/or modified sequence
agcagcgggggaagtcgtggcgagattaagtaatgagaacttgggcccagttttttttccaagcctagaagggcagaatatgttcgtatcctttctgacctcccaggcatatgcaatgttttccagatttaggagacttcagaaaggtggggcagatagaatggagatggcaaagatctctttgggcatatatgggcctggcgaagtaatggaataatttctaattttcggagaaggcaagtgccctcatgccgggatggcagaagatgagcctgatgctaagagccccaagactgggggaagggcccccccaggtggtgctgaggctggggaacctaccacccttcttcagaggctccgaggtaccatttccaaggccgtgcagaacaaagtagaggggatcctgcaagatgtacagaaattttctgacaatgacaagctgtatctctaccttcagctcccctcaggacccaccactggagacaaaagctcagagccaagtacactgagcaatgaggagtacatgtatgcctataggtggatcc

SEQ ID NO: 29094 - DNA, 597 bp, Artificial Sequence
  derived and/or modified sequence
ttcagaaaaaggaaaataaagcaacgcacgagccggctgggccaggaccttggggctgggctggagtgaaggtggctacgagttttccagatttaggagacttcagaaaggtggggcagatagaatggagatggcaaagatctctttgggcatatatgggcctggcgaagtaatggaataatttctaattttcggagaaggcaagtggtgagaaaaagaccaccggggaaattcggaggctttgtttctgtttctctgcctttctggccctcatgccgggatggcagaagatgagcctgatgctaagagccccaagactgggggaagggcccccccaggtggtgctgaggctggggaacctaccacccttcttcagaggctccgaggtaccatttccaaggccgtgcagaacaaagtagaggggatcctgcaagatgtacagaaattttctgacaatgacaagctgtatctctaccttcagctcccctcaggacccaccactggagacaaaagctcagagccaagtacactgagcaatgaggagtacatgtatgcctataggtggatccgcaaccacctggaagagcacactgacac

SEQ ID NO: 29095 - DNA, 903 bp, Artificial Sequence
  derived and/or modified sequence
aaccggggattgaatggagggggaagggaaggaggtgggggcgcgcctcaggatgggctgttgtgggagatgacgtaggggccggcgacgtggggagggggagcagcgggggaagtcgtggcgagattaagtaatgagaacttgggcccagttttttttccaagcctagaagggcagaatatgttcgtatcctttctgacctcccaggcatatgcaatgttttccagatttaggagacttcagaaaggtggggcagatagaatggagatggcaaagatctctttgggcatatatgggcctggcgaagtaatggaataatttctaattttcggagaagccctcatgccgggatggcagaagatgagcctgatgctaagagccccaagactgggggaagggcccccccaggtggtgctgaggctggggaacctaccacccttcttcagaggctccgaggtaccatttccaaggccgtgcagaacaaagtagaggggatcctgcaagatgtacagaaattttctgacaatgacaagctgtatctctaccttcagctcccctcaggacccaccactggagacaaaagctcagagccaagtacactgagcaatgaggagtacatgtatgcctataggtggatccgcaaccacctggaagagcacactgacacctgtctgccaaagcaaagtgtttatgatgcctatcggaagtactgtgagagtcttgcctgttgccgcccactcagcacagccaactttggcaagatcatcagagagatcttccctgacatcaaagctcgaaggcttggtggccggggccagtccaaatattgctacagtggcataaggaggaagaccttggtgtctatgccacccctgcctggacttgacctaaagggttctgaga

SEQ ID NO: 29096 - DNA, 2100 bp, Artificial Sequence
  derived and/or modified sequence
attcagaaaaaggaaaataaagcaacgcacgagccggctgggccaggaccttggggctgggctggagtgaaggtggctacgagttttccagatttaggagacttcagaaaggtggggcagatagaatggagatggcaaagatctctttgggcatatatgggcctggcgaagtaatggaataatttctaattttcggagaagccctcatgccgggatggcagaagatgagcctgatgctaagagccccaagactgggggaagggcccccccaggtggtgctgaggctggggaacctaccacccttcttcagaggctccgaggtaccatttccaaggccgtgcagaacaaagtagaggggatcctgcaagatgtacagaaattttctgacaatgacaagctgtatctctaccttcagctcccctcaggacccaccactggagacaaaaggaagtactgtgagagtcttgcctgttgccgcccactcagcacagccaactttggcaagatcatcagagagatcttccctgacatcaaagctcgaaggcttggtggccggggccagtccaaatattgctacagtggcataaggaggaagaccttggtgtctatgccacccctgcctggacttgacctaaagggttctgagagtccagaaatgggcccagaagtaaccccagcacctcgagatgaactggtggaggcagcgtgtgccctgacctgtgactgggcagagcggatcctgaaacggtccttcagttccatcgttgaggtcgcccgcttcctgctacagcagcatctcatctctgcccgatctgcacatgcccatgtgcttaaggccatggggctcgctgaagaggacgaacatgcacctcgggaacggtcatctaaaccaaagaatggtttagagaacccagagggtggagcccacaagaagccagagagactggcccagcctcctaaggatctggaagcccgaactggggccggtcctctcgcacgtggagagcggaagaagagtgtagttgagagctcggccccaggagccaataacctgcaggttaatgccctagtggctcggctgcctctgctccttccccgggcccctcgctcactaattccgccaatcccagtctctccacctattctggcccccaggctttcttcaggtgccctgaaagtggctacactgcctctgtctagtagggccggggcacccccagcagctgtgcccatcattaacatgatcttaccaactgttcctgctttgcctggacctggacctgggcctgggcgagctccacctgggggactcactcagccccggggcacagagaacagagaggtaggcataggtggtgaccaaggaccacatgacaagggtgtcaagaggacagctgaagtacctgtgagtgaggccagtgggcaggctccaccagctaaagcagcaaagcaggatatagaggatacagcaagtgatgccaaaaggaaacgggggcgccctcgaaaaaagtcaggtggaagtggggaaaggaattctacccctctcaagtcagcagctgccatggaatctgcccagtcctcaaggttaccatgggagacatggggctcaggaggggaaggcaactcagctggaggggcagagaggccagggccaatgggagaggctgaaaagggggcagtacttgcccagggtcagggagatggtactgtttccaaaggaggaaggggccccggttcccagcataccaaagaagcagaagataaaattcccttggtcccctcaaaagtgagtgtcatcaagggcagcagaagccaaaaggaggcttttcctttggcaaagggagaggtagacactgcaccacagggtaataaagacttaaaggagcatgtgcttcaaagttccttatcccaggagcataaagacccaaaagcaacacccccatgatacaggtctgtggggaagagtgtttatatccctacgttaactttgcctagtagaggcccttctttgcacttgcttctcatttggctattcttttcctaaggaagtccattctcctctgtacagacagctgagtcacccagtctacttagtacctg

SEQ ID NO: 29097 - DNA, 2355 bp, Artificial Sequence
  derived and/or modified sequence
gcagcagtgaccaatgacagagcaggccgcccgtgtatctaggcagatcgcggctgttacaaccattcagaaaaaggaaaataaagcaacgcacgagccggctgggccaggaccttggggctgggctggagtgaaggtggctacgagttttccagatttaggagacttcagaaaggtggggcagatagaatggagatggcaaagatctctttgggcatatatgggcctggcgaagtaatggaataatttctaattttcggagaagccctcatgccgggatggcagaagatgagcctgatgctaagagccccaagactgggggaagggcccccccaggtggtgctgaggctggggaacctaccacccttcttcagaggctccgaggtaccatttccaaggccgtgcagaacaaagtagaggggatcctgcaagatgtacagaaattttctgacaatgacaagctgtatctctaccttcagctcccctcaggacccaccactggagacaaaagctcagagccaagtacactgagcaatgaggagtacatgtatgcctataggtggatccgcaaccacctggaagagcacactgacacctgtctgccaaagcaaagtgtttatgatgcctatcggaagtactgtgagagtcttgcctgttgccgcccactcagcacagccaactttggcaagatcatcagagagatcttccctgacatcaaagctcgaaggcttggtggccggggccagtccaaatattgctacagtggcataaggaggaagaccttggtgtctatgccacccctgcctggacttgacctaaagggttctgagagtccagaaatgggcccagaagtaaccccagcacctcgagatgaactggtggaggcagcgtgtgccctgacctgtgactgggcagagcggatcctgaaacggtccttcagttccatcgttgaggtcgcccgcttcctgctacagcagcatctcatctctgcccgatctgcacatgcccatgtgcttaaggccatggggctcgctgaagaggacgaacatgcacctcgggaacggtcatctaaaccaaagaatggtttagagaacccagagggtggagcccacaagaagccagagagactggcccagcctcctaaggatctggaagcccgaactggggccggtcctctcgcacgtggagagcggaagaagagtgtagttgagagctcggccccaggagccaataacctgcaggttaatgccctagtggctcggctgcctctgctccttccccgggcccctcgctcactaattccgccaatcccagtctctccacctattctggcccccaggctttcttcaggtgccctgaaagtggctacactgcctctgtctagtagggccggggcacccccagcagctgtgcccatcattaacatgatcttaccaactgttcctgctttgcctggacctggacctgggcctgggcgagctccacctgggggactcactcagccccggggcacagagaacagagaggtaggcataggtggtgaccaaggaccacatgacaagggtgtcaagaggacagctgaagtacctgtgagtgaggccagtgggcaggctccaccagctaaagcagcaaagcaggatatagaggatacagcaagtgatgccaaaaggaaacgggggcgccctcgaaaaaagtcaggtggaagtggggaaaggaattctacccctctcaagtcagcagctgccatggaatctgcccagtcctcaaggttaccatgggagacatggggctcaggaggggaaggcaactcagctggaggggcagagaggccagggccaatgggagaggctgaaaagggggcagtacttgcccagggtcagggagatggtactgtttccaaaggaggaaggggccccggttcccagcataccaaagaagcagaagataaaattcccttggtcccctcaaaagtgagtgtcatcaagggcagcagaagccaaaaggaggcttttcctttggcaaagggagaggtagacactgcaccacagggtaataaagacttaaaggagcatgtgcttcaaagttccttatcccaggagcataaagacccaaaagcaacacccccatgatacaggtctgtggggaagagtgtttatatccctacgttaactttgcctagtagaggcccttctttgcacttgcttctcatttggctattcttttcctaaggaagtccattctcctctgtacagacagctgagtcacccagtctacttagtacctggttgctgcctctgaccttttcagcttgataccctgggctttagtgtaaccaataaatctgtagtgacctta

SEQ ID NO: 29098 - DNA, 537 bp, Artificial Sequence
  derived and/or modified sequence
ttttccagatttaggagacttcagaaagccctcatgccgggatggcagaagatgagcctgatgctaagagccccaagactgggggaagggcccccccaggtggtgctgaggctggggaacctaccacccttcttcagaggctccgaggtaccatttccaaggccgtgcagaacaaagtagaggggatcctgcaagatgtacagaaattttctgacaatgacaagctgtatctctaccttcagctcccctcaggacccaccactggagacaaaagctcagagccaagtacactgagcaatgaggagtacatgtatgcctataggtggatccgcaaccacctggaagagcacactgacacctgtctgccaaagcaaagtgtttatgatgcctatcggaagtactgtgagagtcttgcctgttgccgcccactcagcacagccaactttggcaagatcatcagagagatcttccctgacatcaaagctcgaaggcttggtggccggggccagtccaaatattgctacagtggcataagga

SEQ ID NO: 29099 - DNA, 1851 bp, Artificial Sequence
  derived and/or modified sequence
atggccgaggacgagcccgacgccaagagccccaagaccggcggcagagccccccccggcggcgccgaggccggcgagcccaccaccctgctgcagagactgagaggcaccatcagcaaggccgtgcagaacaaggtggagggcatcctgcaggacgtgcagaagttcagcgacaacgacaagctgtacctgtacctgcagctgcccagcggccccaccaccggcgacaagagcagcgagcccagcaccctgagcaacgaggagtacatgtacgcctacagatggatcagaaaccacctggaggagcacaccgacacctgcctgcccaagcagagcgtgtacgacgcctacagaaagtactgcgagagcctggcctgctgcagacccctgagcaccgccaacttcggcaagatcatcagagagatcttccccgacatcaaggccagaagactgggcggcagaggccagagcaagtactgctacagcggcatcagaagaaagaccctggtgagcatgccccccctgcccggcctggacctgaagggcagcgagagccccgagatgggccccgaggtgacccccgcccccagagacgagctggtggaggccgcctgcgccctgacctgcgactgggccgagagaatcctgaagagaagcttcagcagcatcgtggaggtggccagattcctgctgcagcagcacctgatcagcgccagaagcgcccacgcccacgtgctgaaggccatgggcctggccgaggaggacgagcacgcccccagagagagaagcagcaagcccaagaacggcctggagaaccccgagggcggcgcccacaagaagcccgagagactggcccagccccccaaggacctggaggccagaaccggcgccggccccctggccagaggcgagagaaagaagagcgtggtggagagcagcgcccccggcgccaacaacctgcaggtgaacgccctggtggccagactgcccctgctgctgcccagagcccccagaagcctgatcccccccatccccgtgagcccccccatcctggcccccagactgagcagcggcgccctgaaggtggccaccctgcccctgagcagcagagccggcgccccccccgccgccgtgcccatcatcaacatgatcctgcccaccgtgcccgccctgcccggccccggccccggccccggcagagccccccccggcggcctgacccagcccagaggcaccgagaacagagaggtgggcatcggcggcgaccagggcccccacgacaagggcgtgaagagaaccgccgaggtgcccgtgagcgaggccagcggccaggccccccccgccaaggccgccaagcaggacatcgaggacaccgccagcgacgccaagagaaagagaggcagacccagaaagaagagcggcggcagcggcgagagaaacagcacccccctgaagagcgccgccgccatggagagcgcccagagcagcagactgccctgggagacctggggcagcggcggcgagggcaacagcgccggcggcgccgagagacccggccccatgggcgaggccgagaagggcgccgtgctggcccagggccagggcgacggcaccgtgagcaagggcggcagaggccccggcagccagcacaccaaggaggccgaggacaagatccccctggtgcccagcaaggtgagcgtgatcaagggcagcagaagccagaaggaggccttccccctggccaagggcgaggtggacaccgccccccagggcaacaaggacctgaaggagcacgtgctgcagagcagcctgagccaggagcacaaggaccccaaggccacccccccctag

SEQ ID NO: 29100 - DNA, 1791 bp, Artificial Sequence
  derived and/or modified sequence
atggccgaggacgagcccgacgccaagagccccaagaccggcggcagagccccccccggcggcgccgaggccggcgagcccaccaccctgctgcagagactgagaggcaccatcagcaaggccgtgcagaacaaggtggagggcatcctgcaggacgtgcagaagttcagcgacaacgacaagctgtacctgtacctgcagctgcccagcggccccaccaccggcgacaagagcagcgagcccagcaccctgagcaacgaggagtacatgtacgcctacagatggatcagaaaccacctggaggagcacaccgacacctgcctgcccaagcagagcgtgtacgacgcctacagaaagtactgcgagagcctggcctgctgcagacccctgagcaccgccaacttcggcaagatcatcagagagatcttccccgacatcaaggccagaagactgggcggcagaggccagagcaagtactgctacagcggcatcagaagaaagaccctggtgagcatgccccccctgcccggcctggacctgaagggcagcgagagccccgagatgggccccgaggtgacccccgcccccagagacgagctggtggaggccgcctgcgccctgacctgcgactgggccgagagaatcctgaagagaagcttcagcagcatcgtggaggtggccagattcctgctgcagcagcacctgatcagcgccagaagcgcccacgcccacgtgctgaaggccatgggcctggccgaggaggacgagcacgcccccagagagagaagcagcaagcccaagaacggcctggagaaccccgagggcggcgcccacaagaagcccgagagactggcccagccccccaaggacctggaggccagaaccggcgccggccccctggccagaggcgagagaaagaagagcgtggtggagagcagcgcccccggcgccaacaacctgcaggtgaacgccctggtggccagactgcccctgctgctgcccagagcccccagaagcctgatcccccccatccccgtgagcccccccatcctggcccccagactgagcagcggcgccctgaaggtggccaccctgcccctgagcagcagagccggcgccccccccgccgccgtgcccatcatcaacatgatcctgcccaccgtgcccgccctgcccggccccggccccggccccggcagagccccccccggcggcctgacccagcccagaggcaccgagaacagagaggtgggcatcggcggcgaccagggcccccacgacaagggcgtgaagagaaccgccgaggtgcccgtgagcgaggccagcggccaggccccccccgccaaggccgccaagcaggacatcgaggacaccgccagcgacgccaagagaaagagaggcagacccagaaagaagagcggcggcagcggcgagagaaacagcacccccctgaagagcgccgccgccatggagagcgcccagagcagcagactgccctgggagacctggggcagcggcggcgagggcaacagcgccggcggcgccgagagacccggccccatgggcgaggccgagaagggcgccgtgctggcccagggccagggcgacggcaccgtgagcaagggcggcagaggccccggcagccagcacaccaaggaggccgaggacaagatccccctggtgcccagcaaggtgagcgtgatcaagggcagcagaagccagaaggaggccttccccctggccaagggcgaggtggacaccgccccccagggcaacaaggacctgaagtag

SEQ ID NO: 29101 - DNA, 357 bp, Artificial Sequence
  derived and/or modified sequence
atggccgaggacgagcccgacgccaagagccccaagaccggcggcagagccccccccggcggcgccgaggccggcgagcccaccaccctgctgcagagactgagaggcaccatcagcaaggccgtgcagaacaaggtggagggcatcctgcaggacgtgcagaagttcagcgacaacgacaagctgtacctgtacctgcagctgcccagcggccccaccaccggcgacaagagcagcgagcccagcaccctgagcaacgaggagtacatgtacgcctacagatggatcagaaaccacctggaggagcacaccgacacctgcctgcccaagcagagcgtgtacgacgcctacagatag

SEQ ID NO: 29102 - DNA, 693 bp, Artificial Sequence
  derived and/or modified sequence
atggccgaggacgagcccgacgccaagagccccaagaccggcggcagagccccccccggcggcgccgaggccggcgagcccaccaccctgctgcagagactgagaggcaccatcagcaaggccgtgcagaacaaggtggagggcatcctgcaggacgtgcagaagttcagcgacaacgacaagctgtacctgtacctgcagctgcccagcggccccaccaccggcgacaagagcagcgagcccagcaccctgagcaacgaggagtacatgtacgcctacagatggatcagaaaccacctggaggagcacaccgacacctgcctgcccaagcagagcgtgtacgacgcctacagaaagtactgcgagagcctggcctgctgcagacccctgagcaccgccaacttcggcaagatcatcagagagatcttccccgacatcaaggccagaagactgggcggcagaggccagagcaagtactgctacagcggcatcagaagaaagaccctggtgagcatgccccccctgcccggcctggacctgaagggcagcgagagccccgagatgggccccgaggtgacccccgcccccagagacgagctggtggaggccgcctgcgccctgacctgcgactgggccgagagaatcctgaagagaagcttcagcagcatcgtggaggtggccagattcctgtag

SEQ ID NO: 29103 - DNA, 372 bp, Artificial Sequence
  derived and/or modified sequence
atggccgaggacgagcccgacgccaagagccccaagaccggcggcagagccccccccggcggcgccgaggccggcgagcccaccaccctgctgcagagactgagaggcaccatcagcaaggccgtgcagaacaaggtggagggcatcctgcaggacgtgcagaagttcagcgacaacgacaagctgtacctgtacctgcagctgcccagcggccccaccaccggcgacaagagcagcgagcccagcaccctgagcaacgaggagtacatgtacgcctacagatggatcagaaaccacctggaggagcacaccgacacctgcctgcccaagcagagcgtgtacgacgcctacagaaagtactgcgagagctag

SEQ ID NO: 29104 - DNA, 291 bp, Artificial Sequence
  derived and/or modified sequence
atggccgaggacgagcccgacgccaagagccccaagaccggcggcagagccccccccggcggcgccgaggccggcgagcccaccaccctgctgcagagactgagaggcaccatcagcaaggccgtgcagaacaaggtggagggcatcctgcaggacgtgcagaagttcagcgacaacgacaagctgtacctgtacctgcagctgcccagcggccccaccaccggcgacaagagcagcgagcccagcaccctgagcaacgaggagtacatgtacgcctacagatggatctag

SEQ ID NO: 29105 - DNA, 321 bp, Artificial Sequence
  derived and/or modified sequence
atggccgaggacgagcccgacgccaagagccccaagaccggcggcagagccccccccggcggcgccgaggccggcgagcccaccaccctgctgcagagactgagaggcaccatcagcaaggccgtgcagaacaaggtggagggcatcctgcaggacgtgcagaagttcagcgacaacgacaagctgtacctgtacctgcagctgcccagcggccccaccaccggcgacaagagcagcgagcccagcaccctgagcaacgaggagtacatgtacgcctacagatggatcagaaaccacctggaggagcacaccgacacctag

SEQ ID NO: 29106 - DNA, 555 bp, Artificial Sequence
  derived and/or modified sequence
atggccgaggacgagcccgacgccaagagccccaagaccggcggcagagccccccccggcggcgccgaggccggcgagcccaccaccctgctgcagagactgagaggcaccatcagcaaggccgtgcagaacaaggtggagggcatcctgcaggacgtgcagaagttcagcgacaacgacaagctgtacctgtacctgcagctgcccagcggccccaccaccggcgacaagagcagcgagcccagcaccctgagcaacgaggagtacatgtacgcctacagatggatcagaaaccacctggaggagcacaccgacacctgcctgcccaagcagagcgtgtacgacgcctacagaaagtactgcgagagcctggcctgctgcagacccctgagcaccgccaacttcggcaagatcatcagagagatcttccccgacatcaaggccagaagactgggcggcagaggccagagcaagtactgctacagcggcatcagaagaaagaccctggtgagcatgccccccctgcccggcctggacctgaagggcagcgagtag

SEQ ID NO: 29107 - DNA, 1731 bp, Artificial Sequence
  derived and/or modified sequence
atggccgaggacgagcccgacgccaagagccccaagaccggcggcagagccccccccggcggcgccgaggccggcgagcccaccaccctgctgcagagactgagaggcaccatcagcaaggccgtgcagaacaaggtggagggcatcctgcaggacgtgcagaagttcagcgacaacgacaagctgtacctgtacctgcagctgcccagcggccccaccaccggcgacaagagaaagtactgcgagagcctggcctgctgcagacccctgagcaccgccaacttcggcaagatcatcagagagatcttccccgacatcaaggccagaagactgggcggcagaggccagagcaagtactgctacagcggcatcagaagaaagaccctggtgagcatgccccccctgcccggcctggacctgaagggcagcgagagccccgagatgggccccgaggtgacccccgcccccagagacgagctggtggaggccgcctgcgccctgacctgcgactgggccgagagaatcctgaagagaagcttcagcagcatcgtggaggtggccagattcctgctgcagcagcacctgatcagcgccagaagcgcccacgcccacgtgctgaaggccatgggcctggccgaggaggacgagcacgcccccagagagagaagcagcaagcccaagaacggcctggagaaccccgagggcggcgcccacaagaagcccgagagactggcccagccccccaaggacctggaggccagaaccggcgccggccccctggccagaggcgagagaaagaagagcgtggtggagagcagcgcccccggcgccaacaacctgcaggtgaacgccctggtggccagactgcccctgctgctgcccagagcccccagaagcctgatcccccccatccccgtgagcccccccatcctggcccccagactgagcagcggcgccctgaaggtggccaccctgcccctgagcagcagagccggcgccccccccgccgccgtgcccatcatcaacatgatcctgcccaccgtgcccgccctgcccggccccggccccggccccggcagagccccccccggcggcctgacccagcccagaggcaccgagaacagagaggtgggcatcggcggcgaccagggcccccacgacaagggcgtgaagagaaccgccgaggtgcccgtgagcgaggccagcggccaggccccccccgccaaggccgccaagcaggacatcgaggacaccgccagcgacgccaagagaaagagaggcagacccagaaagaagagcggcggcagcggcgagagaaacagcacccccctgaagagcgccgccgccatggagagcgcccagagcagcagactgccctgggagacctggggcagcggcggcgagggcaacagcgccggcggcgccgagagacccggccccatgggcgaggccgagaagggcgccgtgctggcccagggccagggcgacggcaccgtgagcaagggcggcagaggccccggcagccagcacaccaaggaggccgaggacaagatccccctggtgcccagcaaggtgagcgtgatcaagggcagcagaagccagaaggaggccttccccctggccaagggcgaggtggacaccgccccccagggcaacaaggacctgaaggagcacgtgctgcagagcagcctgagccaggagcacaaggaccccaaggccacccccccctag

SEQ ID NO: 29108 - DNA, 498 bp, Artificial Sequence
  derived and/or modified sequence
atggccgaggacgagcccgacgccaagagccccaagaccggcggcagagccccccccggcggcgccgaggccggcgagcccaccaccctgctgcagagactgagaggcaccatcagcaaggccgtgcagaacaaggtggagggcatcctgcaggacgtgcagaagttcagcgacaacgacaagctgtacctgtacctgcagctgcccagcggccccaccaccggcgacaagagcagcgagcccagcaccctgagcaacgaggagtacatgtacgcctacagatggatcagaaaccacctggaggagcacaccgacacctgcctgcccaagcagagcgtgtacgacgcctacagaaagtactgcgagagcctggcctgctgcagacccctgagcaccgccaacttcggcaagatcatcagagagatcttccccgacatcaaggccagaagactgggcggcagaggccagagcaagtactgctacagcggcatcagatag

SEQ ID NO: 29109 - protein, 402 aa, Artificial Sequence
  derived and/or modified sequence
MRSGGVRSFALELARGPGGAYRGGERLCGRVLLEAAAPLRVRALEVKARGGAATHWLEGRSVGVNAVSSDYAAAETYLRRRQLLLRDTGETTTLPPGRHEFLFSFQLPPTLVTSFEGKHGSVRYCIKATLHRPWVPARRARKVFTVIEPVDINTPALLAPQAGAREKVARSWYCNRGLVSLSAKIDRKGYTPGEVIPVFAEIDNGSTRPVLPRAAVVQTQTFMARGARKQKRAVVASLAGEPVGPGQRALWQGRALRIPPVGPSILHCRVLHVDYALKVCVDIPGTSKLLLELPLVIGTIPLHPFGSRSSSVGSHASFLLDWRLGALPERPEAPPEYSEVVADTEEAALGQSPFPLPQDPDMSLEGPFFAYIQEFRYRPPPLYSEEDPNPLLGDMRPRCMTC

SEQ ID NO: 29110 - DNA, 1209 bp, Artificial Sequence
  derived and/or modified sequence
atgagaagcggcggcgtgagaagcttcgccctggagctggccagaggccccggcggcgcctacagaggcggcgagagactgtgcggcagagtgctgctggaggccgccgcccccctgagagtgagagccctggaggtgaaggccagaggcggcgccgccacccactggctggagggcagaagcgtgggcgtgaacgccgtgagcagcgactacgccgccgccgagacctacctgagaagaagacagctgctgctgagagacaccggcgagaccaccaccctgccccccggcagacacgagttcctgttcagcttccagctgccccccaccctggtgaccagcttcgagggcaagcacggcagcgtgagatactgcatcaaggccaccctgcacagaccctgggtgcccgccagaagagccagaaaggtgttcaccgtgatcgagcccgtggacatcaacacccccgccctgctggccccccaggccggcgccagagagaaggtggccagaagctggtactgcaacagaggcctggtgagcctgagcgccaagatcgacagaaagggctacacccccggcgaggtgatccccgtgttcgccgagatcgacaacggcagcaccagacccgtgctgcccagagccgccgtggtgcagacccagaccttcatggccagaggcgccagaaagcagaagagagccgtggtggccagcctggccggcgagcccgtgggccccggccagagagccctgtggcagggcagagccctgagaatcccccccgtgggccccagcatcctgcactgcagagtgctgcacgtggactacgccctgaaggtgtgcgtggacatccccggcaccagcaagctgctgctggagctgcccctggtgatcggcaccatccccctgcaccccttcggcagcagaagcagcagcgtgggcagccacgccagcttcctgctggactggagactgggcgccctgcccgagagacccgaggccccccccgagtacagcgaggtggtggccgacaccgaggaggccgccctgggccagagccccttccccctgccccaggaccccgacatgagcctggagggccccttcttcgcctacatccaggagttcagatacagacccccccccctgtacagcgaggaggaccccaaccccctgctgggcgacatgagacccagatgcatgacctgctag

SEQ ID NO: 29111 - DNA, 1209 bp, Artificial Sequence
  derived and/or modified sequence
atgaggagtggcggcgtgagatcgtttgctttggagctggctcgcggccctggtggcgcttaccgtggcggcgaacggctttgcggaagggtattgttggaagccgccgctcctttacgcgtgcgtgccctcgaagttaaggctcgcggcggtgctgcaactcattggttggaagggaggtcagtgggagtaaacgcagtatcatcagactatgcagccgcagagacctacctaaggcgcaggcaacttctgcttcgggacactggggagacaaccactttacccccgggtagacacgaatttctgttcagcttccagctgccccccacgcttgttacctcattcgaagggaaacatgggtccgtccgatattgcatcaaagccacccttcataggccctgggtgcccgcccggcgcgcccgcaaggtattcaccgtgatagaacctgtcgatatcaatacccctgcgctgctagctccccaggcgggagctcgtgagaaagtcgcccgcagctggtattgcaaccgaggtctggtgtcgctatccgctaaaatagatcgtaagggatatacaccaggcgaggtaatccctgtatttgctgaaatcgataacggatctacccgcccagtgctcccccgcgcagcagtggtccaaactcaaactttcatggccagaggagcccgcaagcaaaaaagggctgtcgtcgccagcctggcgggggagcccgttggcccagggcagagagcactctggcagggtcgcgcacttcgcatccccccggtaggaccatccatcctgcactgccgggtcctgcatgtggattacgctttgaaggtgtgcgtcgatatccctggtacatctaagctcctgctcgagttgcccctagtgatcgggacgataccccttcacccctttgggtcccgatcttcctcggttggtagtcatgcctctttccttttagactggcgcctgggcgcactgccggaaaggcccgaagccccccccgagtacagcgaagtagtggccgatacggaagaagcagctcttggccagtccccattcccactcccccaggaccccgacatgagtctagaaggccctttcttcgcctatatccaagaatttcgatacaggcctcccccactgtattccgaggaggatcccaaccccctgctgggagacatgcgtccccggtgtatgacctgttag

SEQ ID NO: 29112 - DNA, 1209 bp, Artificial Sequence
  derived and/or modified sequence
atgaggtctggaggagtgcgcagctttgccctggagctggcccggggccctggaggagcctacagaggaggagagcggctgtgtggccgggtgctgctggaggccgccgcccccctgcgggtgcgggccctggaggtgaaggcccggggcggggccgccacccactggctggagggccgctctgtgggcgtgaatgctgtgtccagtgactatgctgctgctgagacctacctgcggcggcggcagctgctgctgcgggacaccggggagaccaccaccctgcccccaggaagacatgagttcctgttctccttccagctgccccccaccctggtgaccagctttgagggcaagcacggctctgtgcgctactgcatcaaggccaccctgcaccggccctgggtgcctgcccggcgggccaggaaggtgttcaccgtgattgagcctgtggacatcaacaccccagccctgctggccccccaggccggggcccgggagaaggtggcccgctcctggtactgcaacagaggcctggtgtccctgagcgccaagattgacaggaagggctacaccccaggagaggtgattcctgtgtttgctgagattgacaatggcagcaccaggcctgtgctgcccagggctgctgtggtgcagacccagaccttcatggcccggggggccaggaagcagaagagagctgtggtggccagcctggccggggagcctgtgggccctggccagagggccctgtggcagggccgggccctgcgcatcccccctgtgggccccagcatcctgcactgccgggtgctgcacgtggactatgccctgaaggtgtgtgtggacatccctggcaccagcaagctgctgctggagctgcccctggtgattggcaccatccccctgcaccccttcggcagccgcagcagctctgtgggcagccacgccagcttcctgctggactggaggctgggcgccctgcctgagaggcctgaggcccctcctgagtacagcgaggtggtggccgacacagaggaggccgccctgggccagagccccttccccctgccccaggaccctgacatgagcctggagggccccttctttgcctacatccaggagttccgctacagacctccacccctgtacagcgaggaggaccccaaccccctgctgggggacatgaggccccgctgcatgacctgctag

SEQ ID NO: 29113 - DNA, 1209 bp, Artificial Sequence
  derived and/or modified sequence
atgcggagcggcggcgtgcggagcttcgccctggagctggcccgggggcccggcggggcctaccgaggcggggagcgtctgtgcggacgcgtgctgttggaagccgcagcccccctgcgagtgagggcgctggaagttaaggcgcgcggaggcgccgccactcactggctcgaagggcgctccgttggcgtgaatgccgtttcaagcgactacgctgcagctgaaacctatcttcgccgccgacaactgctgttacgcgatactggcgagaccaccaccctgccacctggaagacatgaatttctgtttagctttcagctaccaccaaccttagtaaccagctttgagggaaagcacggatcagtccgttactgtatcaaggcgacactgcacaggccctgggtgcctgcacgaagagcccgcaaggtgttcacagtgatcgagcccgtcgacatcaacacacctgcactgcttgcccctcaggctggcgcaagggagaaggtggcacggagctggtactgtaaccgaggacttgtgtctttaagtgcaaagatcgaccgaaagggatatacacccggagaagtaattccagtctttgctgaaattgataatgggagtactagacctgtcctgcctcgtgctgcagtggttcagactcagacatttatggctcgtggggctcggaaacagaaaagagctgtggtggcctcattagcaggggaacctgttggccccgggcagagggcactgtggcaggggcgtgcgctgcgaattccaccggtgggccccagtattttgcactgccgggtacttcacgtggactacgccctcaaagtatgcgtggatatacccggaacctcaaagctgctgctggaactgcctttggtcatcgggactatccctctgcacccatttggctccaggagctcatccgtgggttcccatgccagcttcttgctggactggaggctgggcgccctacctgaaaggcccgaggctccgcccgaatatagcgaagttgtcgccgatacagaagaggcagccctggggcagtctcccttccctcttccacaggatccggacatgtccctcgaaggacctttttttgcttatatccaagagttcagatatagaccaccgcctctctacagcgaggaggatcctaaccccttgctaggcgatatgaggccccgctgtatgacatgctag

SEQ ID NO: 29114 - DNA, 1209 bp, Artificial Sequence
  derived and/or modified sequence
atgagatcaggtggagtgcggtcttttgcacttgaactggccaggggtcctggcggtgcatacaggggtggggagaggctatgtggcagagtgctgctagaggcagcggctcccttgcgggtgcgagccctggaagttaaagcccgtggaggagctgccacacattggctcgaagggagatctgtaggcgtgaatgctgtctcgtctgattatgcagcagcagagacttatctgagacgaagacaattgttgctgcgagacacaggcgaaaccactactttgccacccggtcggcatgaattcctctttagctttcagctgcctcctaccctggtgactagctttgagggaaagcacggatctgtaagatactgtattaaggccaccctgcaccgtccctgggtgccagccaggcgggcaagaaaggtattcactgtcatagagccagtagatattaacaccccagcactcctggccccacaggccggagccagagaaaaagttgccagaagctggtactgtaacagagggctggtgtctttgtccgccaagatcgaccggaaaggatatactccaggagaggtgatcccagtatttgccgagatcgacaatgggagcacacgaccggtgctgcccagagctgccgtggtccaaacgcagaccttcatggccaggggtgcacgtaaacagaaaagggccgtggtggcttctcttgccggtgagccggtcggacccggtcagcgcgcactgtggcagggcagagcactgcgaatccctccagtgggaccatcaattcttcattgtcgggtgttgcatgttgactatgctttgaaagtttgcgtggacattccagggacaagcaagctcttgctagagctccccctcgtcattggcacaattcctctgcacccattcggctccagatcgtccagcgtgggatcacacgcatcattcctgctcgattggcggcttggagcccttccagagcgacccgaagcccctccagagtacagcgaagtggtagccgacactgaggaggccgctctcggacaatctcctttccctttgcctcaggacccagacatgagcctggagggccctttcttcgcatacattcaggagtttaggtaccgaccccctccgctgtactctgaggaggaccctaaccctctgttgggtgatatgcgccctagatgcatgacctgttag

SEQ ID NO: 29115 - DNA, 2517 bp, Artificial Sequence
  derived and/or modified sequence
ggaagttcgccgacgacgcgcccgccctgggccaccggcgccggcccaagttcgccgggggggcccggaggaagcttgggggacgcgacgggggaacgcggaaaccccggggatctgcaggcgcgcccgggccgtgtgccttctctccgcgtgtccaaaccgtgtccccagccgcgcgccatgcgctctgggggcgtgcgcagcttcgcgctggagctggcgcggggcccgggcggcgcctaccgcggcggggagcggctgtgcggccgggtgctgctggaggcggcggcgccgctgcgggtgcgagcgctcgaggtgaaggcgcgcggcggggcggccacccactggttggagggtcgcagcgtgggcgtcaacgccgtatccagcgactacgcggccgcggagacctacctgcggcgtcggcagctgctgctccgagataccggggagaccacgacgctgcctcctgggcgccatgagttcctgttcagcttccagctgcccccgaccctggtgacatccttcgagggcaaacacggtagtgtccgctactgtatcaaggccaccctgcaccggccctgggtcccagcacgccgggcaaggaaggtgttcactgtcatcgagcctgtggacatcaacacgccagccctgctggcacctcaagcgggggctcgggaaaaggttgcccgatcctggtactgtaaccgtggcctagtctccctttcggccaagatcgaccgcaagggctacaccccaggagaggtcatccctgtctttgccgagatcgacaacggctccacacgtcctgtgctgcctcgggcagccgtggtgcagacacagacgttcatggcccgaggcgcccgaaagcagaaacgggcagtggtggccagcctcgcgggcgagccggtgggccccgggcagcgggcgctgtggcagggccgggcactgcggatccccccagtgggtccttccatcctgcactgccgcgttctacacgtggactacgcactcaaggtctgtgtggatatcccaggaacgtccaagctgctgctggagctgccactggtgatcggcaccattcccttgcacccttttggcagccgttcctccagcgtgggcagccacgccagcttcctgctggactggaggctgggggccttgccggagcggcctgaggctcctcctgagtactcggaggtggtagccgacactgaggaggcagccttggggcagagccccttcccgcttccgcaggaccccgacatgagccttgaaggcccgttcttcgcctacatccaagagttccgctaccgcccgccacccctgtactctgaggaggatccaaacccactcttgggggacatgaggccgcgctgcatgacttgctgaacggcacagggacccctcgaggaacaaggttgcacaccagctttcagccaccatgactgtggggagtggctggaccaagggctgacctccccgactgcatcaaagttggggaaccaagtctcagagtgaggcgggggcctttcggatatcacatgggacagaggaagagcccggctggaatctgacttacctggaccgctgtccttgtgaggcattgaatgcccagtgcagtatccgagagactgtttaataacctgtcttcccagccaattggtggtgctggaatcccctaggagccttcagtctgggagaaacagagccagacatagacagttccagcatcacagaaccagaagaagagacctgcaactgtgagagtccagacaggaagcagagaaggcgtccttgcggaaagggcattttagctgaggctttggagtacgaataggagctcagcaggcagacgaatgaggaataaaggtcagagaaggtcagagctgagtgacgtttggaatccaccccgtttattgtagaactgggggttcagagggcaggtgcctcagagttgaggccacacagtgaggtctggtgggtgaaaggacccaggaacgaggcgttcaggaaagcaggttgtcagagctatgtggagtctgtgggtggcaggggcagccgctccagcctttgaagactttgaaagccagagattcctggcgcaggcttggacttcctgggagctcctccaagtacccaggggcatcagagctgcctgggtgttacatggcccagggaacccaggttcagggtaggacaggcaagaccagatacccaatgtgcaaagtgaaaacactgggctccctgttaaacgatgaagaattcaagacagtgacagcattacgtcacccctggggacagaggtcagcctaaggtgacacacggggactactgtgcttccggaggctccctgtgtcctggaggagaaaagcattagagggggcagctggacaagctcccaactgcagagtcccagccctggctggggcagggccccggcctgggactcagcatttctgatatgccttaagaattcattctgttttgtacaattattttttaaaagtaaacgtgtgg

SEQ ID NO: 29116 - protein, 288 aa, Artificial Sequence
  derived and/or modified sequence
MNNLSFSELCCLFCCPPCPGKIASKLAFLPPDPTYTLMCDESGSRWTLHLSERADWQYSSREKDAIECFMTRTSKGNRIACMFVRCSPNAKYTLLFSHGNAVDLGQMSSFYIGLGSRINCNIFSYDYSGYGASSGKPTEKNLYADIEAAWLALRTRYGIRPENVIIYGQSIGTVPSVDLAARYESAAVILHSPLTSGMRVAFPDTKKTYCFDAFPNIDKISKITSPVLIIHGTEDEVIDFSHGLALFERCQRPVEPLWVEGAGHNDVELYGQYLERLKQFVSQELVNL

SEQ ID NO: 29117 - DNA, 867 bp, Artificial Sequence
  derived and/or modified sequence
atgaataatctgtcattcagcgagctatgttgcctgttttgttgtcctccatgccctggcaagatcgccagcaaactcgcattccttccacctgaccctacctacactttgatgtgtgacgagagcgggagccgttggaccctgcatctaagcgagagggccgattggcaatactcctctcgggagaaggatgccattgaatgttttatgaccagaaccagtaaaggcaataggatagcttgcatgtttgtgcgatgttcaccaaacgccaaatacacattgctctttagtcatgggaatgccgtcgaccttggacagatgtctagcttttacattggtctgggatctcggattaattgtaacatctttagctatgattattctgggtacggggctagctctggcaagcctaccgagaaaaatctgtacgccgacatcgaggctgcttggcttgctcttagaactcgatacggaatacggccagagaatgtcattatatatggccagtccatcggtaccgtcccttcagtggatctcgccgctagatacgaatccgccgctgtaatcttgcattccccactgacctcaggaatgagagtggccttccctgacacaaaaaaaacttactgttttgatgccttccccaatatcgataaaatttccaaaatcacatccccagtgcttatcatacatggtaccgaagatgaggtgatcgacttctcacacggactcgccctattcgaaagatgtcagagacctgttgaacctctatgggtcgaaggagccggtcataatgatgtggagttgtacggtcagtatttggagaggctgaaacagtttgtgtcacaggagctggtgaatctctag

SEQ ID NO: 29118 - DNA, 867 bp, Artificial Sequence
  derived and/or modified sequence
atgaataatctgtcatttagtgaactttgctgcctgttttgttgtcccccttgccctggcaaaatcgctagcaagctcgcctttttacccccggatccaacctataccctgatgtgtgatgagtctggtagtagatggaccctccacctttctgaaagagcggactggcaatactcctctagagaaaaagatgccatagagtgctttatgacccgaacatctaaagggaatcggattgcctgcatgttcgttagatgtagtcccaacgccaaatacaccctactgttcagccacggcaacgcagtggatctgggccaaatgagcagcttttacatcggcctaggatcaagaatcaattgtaatattttctcctacgactattccggttacggcgcttccagcggaaaacctaccgaaaagaacctttacgccgacattgaggccgcttggctggcgctcagaacacgttacgggatcaggcccgagaacgtgatcatttatggacagtccatcggtacggtaccatccgtggatctagcagctaggtacgagtctgctgccgtgatcctacacagcccactcacctcaggcatgcgagtggccttccccgatactaagaagacatattgtttcgatgcatttccgaacattgacaaaatctctaagataactagccccgtcctgattattcacggcaccgaggatgaggtgattgattttagccacggtctggctctgttcgaaaggtgtcagcgtccagtggaacctttgtgggtggagggagctggacataacgacgtggaactgtacgggcaatatctggaaagactgaaacagttcgttagccaggagctcgtgaacctgtag

SEQ ID NO: 29119 - DNA, 867 bp, Artificial Sequence
  derived and/or modified sequence
atgaataatctgtcatttagtgaactttgctgcctgttttgttgtcccccttgccctggcaaaatcgctagcaagctcgcctttttacccccggatccaacctataccctgatgtgtgatgagtctggtagtagatggaccctccacctttctgaaagagcggactggcaatactcctctagagaaaaagatgccatagagtgctttatgacccgaacatctaaagggaatcggattgcctgcatgttcgttagatgtagtcccaacgccaaatacaccctactgttcagccacggcaacgccgttgacctgggacagatgagctccttctatattggactcggaagccgaataaattgtaatattttttcttacgactactcaggatatggggcaagtagtggaaaaccaaccgaaaaaaacctatatgcagacattgaagcagcttggctggccttaagaactaggtacggaatcaggcctgagaacgtgatcatttatggtcagagcatcggcacggtcccttccgtggatctagctgcgcgatatgagtccgccgccgtcatcctgcactcccctttgactagtggcatgcgagtcgctttccctgacaccaagaagacttactgctttgacgctttccctaacatcgataagatctcaaagatcacatctcccgtgttgattatacacggtacagaggatgaagtgatagatttttcccacggactggcactattcgaacgctgtcagagaccagtcgaacctctctgggttgaaggcgctggtcacaatgacgtagaattatatggacaatatttagagagattgaaacagttcgtgagccaggaactcgttaacctttag

SEQ ID NO: 29120 - DNA, 867 bp, Artificial Sequence
  derived and/or modified sequence
atgaacaacctgagcttcagcgagctgtgctgcctgttctgctgccccccctgccccggcaagatcgccagcaagctggccttcctgccccccgaccccacctacaccctgatgtgcgacgagagcggcagcagatggaccctgcacctgagcgagagagccgactggcagtacagcagcagagagaaggacgccatcgagtgcttcatgaccagaaccagcaagggcaacagaatcgcctgcatgttcgtgagatgcagccccaacgccaagtacaccctgctgttcagccacggcaacgccgtggacctgggccagatgagcagcttctacatcggcctgggcagcagaatcaactgcaacatcttcagctacgactacagcggctacggcgccagcagcggcaagcccaccgagaagaacctgtacgccgacatcgaggccgcctggctggccctgagaaccagatacggcatcagacccgagaacgtgatcatctacggccagagcatcggcaccgtgcccagcgtggacctggccgccagatacgagagcgccgccgtgatcctgcacagccccctgaccagcggcatgagagtggccttccccgacaccaagaagacctactgcttcgacgccttccccaacatcgacaagatcagcaagatcaccagccccgtgctgatcatccacggcaccgaggacgaggtgatcgacttcagccacggcctggccctgttcgagagatgccagagacccgtggagcccctgtgggtggagggcgccggccacaacgacgtggagctgtacggccagtacctggagagactgaagcagttcgtgagccaggagctggtgaacctgtag

SEQ ID NO: 29121 - DNA, 2614 bp, Artificial Sequence
  derived and/or modified sequence
cggacggcgcccggagcgcggatctcgccttgtggaggacagcgcgtcggctgcggttctctctcgaccccttctgcccggcgcttcggcccgggccgctcaggtgcagagcatgaataatctttcatttagtgagctatgttgcctcttctgctgtccaccttgtccagggaagattgcttcaaaattagcgtttttgccacctgatccaacttacacactgatgtgtgatgaaagcggaagccgttggactttacatctgtctgaacgagcagactggcagtattcttctagagaaaaagatgctattgagtgtttcatgactagaaccagtaaaggcaacagaattgcttgtatgtttgtacgttgttcacccaatgcgaaatacactttactcttctcacatggaaatgctgttgatcttggtcaaatgagcagcttttacataggactaggatcacggattaattgtaatatattctcatatgattattctggatatggtgccagttccgggaaacccacagagaagaacctctatgcagacattgaagctgcttggcttgctcttaggacaagatatggcattcgccctgaaaatgtgattatatatggccaaagtatagggacagtaccgtctgtggatcttgctgctcgatatgagagtgctgctgttattcttcattctcctctgacttcgggaatgcgagttgcctttcctgataccaagaagacctactgttttgatgcattcccaaacattgacaaaatctctaagataacctctccagtattaataattcatgggactgaagatgaagtcattgacttttcacatggcctcgcattgtttgaacgttgccaaagacctgtggagcctctctgggttgaaggagcaggtcacaatgatgtggaactttatggacagtatcttgaaaggttgaaacagtttgtgtcacaggaactggtaaatttgtaaaatattctgtaaatttgctactgggttttcctttcttgctgaactgcactctttggtaaataacataaaacctgaaggttttgtttgcaaatcatgtcagttgccttcataaatgtacaggtaatgatttgttaacagacttaatgaaggttttaattaccagaactaaaaactggaaataacagtaccgtgcagtcaggctgtgtaatttatattttttctgtgaatttttttttaacatcaagatgagtactgtatgagattttaattctataaaatcaaatgctgtaaaagtattgccaaatgcttttgcatactagaaacaaatttataaatatttttaaaacatctcaatatattaaatcttatcctggaatacaactgtaatattttgaaaaaagctatgtatctaaagcaatttaagtactcataatggaatgaactgtaaaagagatttaaaaccatgcaagttcactagaattaacctaaaccctgttgtacagggatagaggtttaaagttattttattgtaaaatacattgaattttctgtatactctgattacatacatttatcctttaaaaaagatgtaaatcttaatttttatgccatctattaatttaccaatgagttaccttgtaaatgagaagtcatgatagcactgaattttaactagttttgacttctaagtttggtactgtgaggcaagtacttaaaattttcatgctggttacttaaaaggcatttagagatttcaagaatgattttgtatacgatgttttaaattttgactgatctcatagtcttcatagaattgcagtagtcttcattgtatgaaatcccgaaagtccatgagttgatcttaaagaccactaacagactggctatcagatcccttttcactttggctatttttttcattttttgagatggagtcttgctgtgtcactgaggctggagtgcagtggcgcgatcttgattcactgcaacctctgcctcccgggatcaagtgattctcctgcctcagcctcctgagtagctggtattacagatgcttgccaccacgcctggctaatttttgtatttttagtagagacagggttttgccatgttgatcaggctggtcttgaactcctgacctcatgatctgcccttggcctcccaaagtgtcggaattacaggcatgagccactgcgcctggcccactttagctatttttaaaaataggacctattgttttggattactatctgagaatttcatggattcactcctgggtataggagataagaatacgtttaattcataacttttatattaaccaatatagtaaaaaaataaagctcacacatacaaaaactaagttgcctttccttgaatgaaccctgtctgaataaaacaatgaaaaataaaaataaaattaatggtatgtagtctaatttgtaaatgaatgaatatggaaataatacacactgtggatatattttaaggccttatgtagttttaattgttctgctcgttccgtggttatgtttaagactatagtatatgactctcttcaaagtatatcaagtattgtgaatgctttggttcagatgtgtcaaattaacagtaaaacaacaaatataccactga

SEQ ID NO: 29122 - DNA, 867 bp, Artificial Sequence
  derived and/or modified sequence
atgaataatctatctttctccgagttgtgttgtctattctgctgccctccctgcccaggcaaaatcgccagtaagctggcatttctcccaccagaccccacctacacactgatgtgcgatgaatcaggtagcaggtggaccttacatctgagcgagagagccgactggcagtactcgtcccgagagaaagacgctatcgagtgctttatgacccggacttcgaagggaaatcgaatagcctgcatgtttgtgagatgttccccaaacgccaaatatactttgctgttttcccacggaaatgccgttgacctgggacagatgagctccttctacatcggcctggggtccagaatcaactgcaatatattcagttacgattatagcggttacggagctagcagcggcaagcccaccgaaaaaaacctctatgccgacatcgaagcggcctggctggctctccgaacccggtatggaatccggcccgaaaacgtgatcatctacggtcaatccattggcactgtaccgtcagtcgacctggcagcccgctacgaatccgcagctgtgatcctacattcacccctgaccagcgggatgcgggtagctttcccagatacaaaaaagacctactgctttgacgcttttcccaatatcgacaaaataagtaaaatcaccagtccagtgctgatcattcacggtacagaggacgaagtcattgacttctctcatggcctagctcttttcgagagatgccaacgaccagtggaaccactgtgggtcgagggagcgggtcacaatgacgtagaactgtatgggcaatatctggaaagactaaagcagttcgtcagccaggaactggtgaatctctag

SEQ ID NO: 29123 - DNA, 867 bp, Artificial Sequence
  derived and/or modified sequence
atgaacaacctgtccttcagcgagctgtgctgcctcttctgctgccccccctgccctgggaagatcgccagcaagctggccttcctgcccccagaccccacctacaccctgatgtgtgatgagagcggcagccgctggaccctgcacctgtctgaaagagctgactggcagtacagcagccgggagaaggatgccatcgagtgcttcatgaccaggaccagcaaaggaaacagaattgcctgcatgtttgtgcgctgcagccccaatgccaagtacaccctgctcttcagccacggcaatgctgtggacctgggccagatgagcagcttctacatcggcctgggcagccgcatcaactgcaacatcttctcctatgactacagcggctacggggccagcagcggcaagcccacagagaagaacctgtatgctgacatcgaggccgcctggctggccctgcggaccaggtatggcatccggccagaaaatgtcatcatctacggccagagcattggaacagtgcccagcgtggacctggccgcccgctatgaatctgctgctgtgatcctgcacagccccctgaccagcggcatgagggtggccttcccagacaccaagaagacctactgctttgatgccttccccaacatcgacaagatcagcaagatcaccagccctgtgctgatcatccatggaacagaagatgaagtcatcgacttcagccacggcctggccctgtttgagcgctgccagaggcctgtggagcccctgtgggtggagggcgccggccacaatgatgtggagctgtatggccagtacctggagcggctgaagcagtttgtgtcccaggagctggtgaacctgtag

SEQ ID NO: 29124 - DNA, 867 bp, Artificial Sequence
  derived and/or modified sequence
atgaacaacctgagcttcagcgagctgtgctgcctgttctgctgcccgccttgtccgggtaagattgcttcaaaattggccttcctgcctcccgatcctacctataccttaatgtgcgatgagagcggatcacgctggaccttgcacctctccgagcgcgctgattggcagtacagcagtcgtgagaaggacgcaattgaatgttttatgacaaggacttcaaaggggaacaggatagcttgcatgttcgtgcggtgttctcctaacgccaaatatacattgttgttttctcacgggaacgctgtagatttaggccagatgagtagcttttacatcggcctgggcagcagaatcaactgtaacattttttcctatgattactctggatacggggcaagtagcggtaagcctacagagaagaacctctatgccgatatcgaagcagcctggcttgcactgcgaacccgttatgggatcagacccgagaacgttattatctacggtcaaagcattgggaccgtgccatctgtggacctggctgctcggtacgagtccgctgcggtgatcctgcacagccccctaaccagtggaatgcgggtcgccttccccgacacgaagaagacctattgcttcgacgcattccccaacatcgataaaataagtaaaattacctccccagtgctcatcatccacggtaccgaagatgaggtgattgacttctcccacggactagccctgttcgaacgatgccagcgtcccgtggaaccattatgggtcgagggggcaggacacaatgacgtggagctgtatgggcagtatctggaaagactgaagcagtttgtgtctcaggaactcgtcaatctctag

SEQ ID NO: 29125 - RNA, 867 nt, Artificial Sequence
  derived and/or modified sequence
augaauaaucugucauuuagugaacuuugcugccuguuuuguugucccccuugcccuggcaaaaucgcuagcaagcucgccuuuuuacccccggauccaaccuauacccugaugugugaugagucugguaguagauggacccuccaccuuucugaaagagcggacuggcaauacuccucuagagaaaaagaugccauagagugcuuuaugacccgaacaucuaaagggaaucggauugccugcauguucguuagauguagucccaacgccaaauacacccuacuguucagccacggcaacgcaguggaucugggccaaaugagcagcuuuuacaucggccuaggaucaagaaucaauuguaauauuuucuccuacgacuauuccgguuacggcgcuuccagcggaaaaccuaccgaaaagaaccuuuacgccgacauugaggccgcuuggcuggcgcucagaacacguuacgggaucaggcccgagaacgugaucauuuauggacaguccaucgguacgguaccauccguggaucuagcagcuagguacgagucugcugccgugauccuacacagcccacucaccucaggcaugcgaguggccuuccccgauacuaagaagacauauuguuucgaugcauuuccgaacauugacaaaaucucuaagauaacuagccccguccugauuauucacggcaccgaggaugaggugauugauuuuagccacggucuggcucuguucgaaaggugucagcguccaguggaaccuuuguggguggagggagcuggacauaacgacguggaacuguacgggcaauaucuggaaagacugaaacaguucguuagccaggagcucgugaaccuguag

SEQ ID NO: 29126 - RNA, 867 nt, Artificial Sequence
  derived and/or modified sequence
augaauaaucugucauuuagugaacuuugcugccuguuuuguugucccccuugcccuggcaaaaucgcuagcaagcucgccuuuuuacccccggauccaaccuauacccugaugugugaugagucugguaguagauggacccuccaccuuucugaaagagcggacuggcaauacuccucuagagaaaaagaugccauagagugcuuuaugacccgaacaucuaaagggaaucggauugccugcauguucguuagauguagucccaacgccaaauacacccuacuguucagccacggcaacgccguugaccugggacagaugagcuccuucuauauuggacucggaagccgaauaaauuguaauauuuuuucuuacgacuacucaggauauggggcaaguaguggaaaaccaaccgaaaaaaaccuauaugcagacauugaagcagcuuggcuggccuuaagaacuagguacggaaucaggccugagaacgugaucauuuauggucagagcaucggcacggucccuuccguggaucuagcugcgcgauaugaguccgccgccgucauccugcacuccccuuugacuaguggcaugcgagucgcuuucccugacaccaagaagacuuacugcuuugacgcuuucccuaacaucgauaagaucucaaagaucacaucucccguguugauuauacacgguacagaggaugaagugauagauuuuucccacggacuggcacuauucgaacgcugucagagaccagucgaaccucucuggguugaaggcgcuggucacaaugacguagaauuauauggacaauauuuagagagauugaaacaguucgugagccaggaacucguuaaccuuuag

SEQ ID NO: 29127 - protein, 915 aa, Artificial Sequence
  derived and/or modified sequence
MQGPDAPLLLSARELGPGRRGSASWYRQEGGAVCNWLRKPQPLEPRTSFPSARRSEFRPPRRLPWAGPASAQSEEGHAGGRCQAGSPAPARRLSGAFKTLVPGTHAQGASDTHPLGPPHTPVLDPSPQDGFPVLWRGSSKASHMNRLRNAKIYVERAVKQKKIFTIQGCYPVIRCLLRRRGWVEKKMVHRSGPTLLPPQKDLDSSAMGDSDTTEDEDEDEDEEFQPSQLFDFDDLLKFDDLDGTHALMVGLCLNLRNLPWFDEVDANSFFPRCYCLGAEDDKKAFIEDFWLTAARNVLKLVVKSEWKSYPIQAVEEEASGDKQPKKQEKNPVLVSPEFVDEALCACEEYLSNLAHMDIDKDLEAPLYLTPEGWSLFLQRYYQVVHEGAELRHLDTQVQRCEDILQQLQAVVPQIDMEGDRNIWIVKPGAKSRGRGIMCMDHLEEMLKLVNGNPVVMKDGKWVVQKYIERPLLIFGTKFDLRQWFLVTDWNPLTVWFYRDSYIRFSTQPFSLKNLDNSVHLCNNSIQKHLENSCHRHPLLPPDNMWSSQRFQAHLQEMGAPNAWSTIIVPGMKDAVIHALQTSQDTVQCRKASFELYGADFVFGEDFQPWLIEINASPTMAPSTAVTARLCAGVQADTLRVVIDRMLDRNCDTGAFELIYKQPAVEVPQYVGIRLLVEGFTIKKPMAMCHRRMGVRPAVPLLTQRGSGEARHHFPSLHTKAQLPSPHVLRHQGQVLRRQHSKLVGTKALSTTGKALRTLPTAKVFISLPPNLDFKVAPSILKPRKAPALLCLRGPQLEVPCCLCPLKSEQFLAPVGRSRPKANSRPDCDKPRAEACPMKRLSPLKPLPLVGTFQRRRGLGDMKLGKPLLRFPTALVLDPTPNKKKQVKYLGLDSIAVGGSRVDGARPCTPGSTARA

SEQ ID NO: 29128 - protein, 434 aa, Artificial Sequence
  derived and/or modified sequence
MDIDKDLEAPLYLTPEGWSLFLQRYYQVVHEGAELRHLDTQVQRCEDILQQLQAVVPQIDMEGDRNIWIVKPGAKSRGRGIMCMDHLEEMLKLVNGNPVVMKDGKWVVQKYIERPLLIFGTKFDLRQWFLVTDWNPLTVWFYRDSYIRFSTQPFSLKNLDNSVHLCNNSIQKHLENSCHRHPLLPPDNMWSSQRFQAHLQEMGAPNAWSTIIVPGMKDAVIHALQTSQDTVQCRKASFELYGADFVFGEDFQPWLIEINASPTMAPSTAVTARLCAGVQADTLRVVIDRMLDRNCDTGAFELIYKQPAVEVPQYVGIRLLVEGFTIKKPMAMCHRRMGVRPAVPLLTQRGSGEARHHFPSLHTKAQLPSPHVLRHQGQVLRRQHSKLVGTKALSTTGKALRTLPTAKVFISLPPNLDFKVAPSILKPRKVGLDL

SEQ ID NO: 29129 - protein, 772 aa, Artificial Sequence
  derived and/or modified sequence
MNRLRNAKIYVERAVKQKKIFTIQGCYPVIRCLLRRRGWVEKKMVHRSGPTLLPPQKDLDSSAMGDSDTTEDEDEDEDEEFQPSQLFDFDDLLKFDDLDGTHALMVGLCLNLRNLPWFDEVDANSFFPRCYCLGAEDDKKAFIEDFWLTAARNVLKLVVKSEWKSYPIQAVEEEASGDKQPKKQEKNPVLVSPEFVDEALCACEEYLSNLAHMDIDKDLEAPLYLTPEGWSLFLQRYYQVVHEGAELRHLDTQVQRCEDILQQLQAVVPQIDMEGDRNIWIVKPGAKSRGRGIMCMDHLEEMLKLVNGNPVVMKDGKWVVQKYIERPLLIFGTKFDLRQWFLVTDWNPLTVWFYRDSYIRFSTQPFSLKNLDNSVHLCNNSIQKHLENSCHRHPLLPPDNMWSSQRFQAHLQEMGAPNAWSTIIVPGMKDAVIHALQTSQDTVQCRKASFELYGADFVFGEDFQPWLIEINASPTMAPSTAVTARLCAGVQADTLRVVIDRMLDRNCDTGAFELIYKQPAVEVPQYVGIRLLVEGFTIKKPMAMCHRRMGVRPAVPLLTQRGSGEARHHFPSLHTKAQLPSPHVLRHQGQVLRRQHSKLVGTKALSTTGKALRTLPTAKVFISLPPNLDFKVAPSILKPRKAPALLCLRGPQLEVPCCLCPLKSEQFLAPVGRSRPKANSRPDCDKPRAEACPMKRLSPLKPLPLVGTFQRRRGLGDMKLGKPLLRFPTALVLDPTPNKKKQVKYLGLDSIAVGGSRVDGARPCTPGSTARA

SEQ ID NO: 29130 - DNA, 2748 bp, Artificial Sequence
  derived and/or modified sequence
atgcagggccccgacgcccccctgctgctgagcgccagagagctgggccccggcagaagaggcagcgccagctggtacagacaggagggcggcgccgtgtgcaactggctgagaaagccccagcccctggagcccagaaccagcttccccagcgccagaagaagcgagttcagaccccccagaagactgccctgggccggccccgccagcgcccagagcgaggagggccacgccggcggcagatgccaggccggcagccccgcccccgccagaagactgagcggcgccttcaagaccctggtgcccggcacccacgcccagggcgccagcgacacccaccccctgggccccccccacacccccgtgctggaccccagcccccaggacggcttccccgtgctgtggagaggcagcagcaaggccagccacatgaacagactgagaaacgccaagatctacgtggagagagccgtgaagcagaagaagatcttcaccatccagggctgctaccccgtgatcagatgcctgctgagaagaagaggctgggtggagaagaagatggtgcacagaagcggccccaccctgctgcccccccagaaggacctggacagcagcgccatgggcgacagcgacaccaccgaggacgaggacgaggacgaggacgaggagttccagcccagccagctgttcgacttcgacgacctgctgaagttcgacgacctggacggcacccacgccctgatggtgggcctgtgcctgaacctgagaaacctgccctggttcgacgaggtggacgccaacagcttcttccccagatgctactgcctgggcgccgaggacgacaagaaggccttcatcgaggacttctggctgaccgccgccagaaacgtgctgaagctggtggtgaagagcgagtggaagagctaccccatccaggccgtggaggaggaggccagcggcgacaagcagcccaagaagcaggagaagaaccccgtgctggtgagccccgagttcgtggacgaggccctgtgcgcctgcgaggagtacctgagcaacctggcccacatggacatcgacaaggacctggaggcccccctgtacctgacccccgagggctggagcctgttcctgcagagatactaccaggtggtgcacgagggcgccgagctgagacacctggacacccaggtgcagagatgcgaggacatcctgcagcagctgcaggccgtggtgccccagatcgacatggagggcgacagaaacatctggatcgtgaagcccggcgccaagagcagaggcagaggcatcatgtgcatggaccacctggaggagatgctgaagctggtgaacggcaaccccgtggtgatgaaggacggcaagtgggtggtgcagaagtacatcgagagacccctgctgatcttcggcaccaagttcgacctgagacagtggttcctggtgaccgactggaaccccctgaccgtgtggttctacagagacagctacatcagattcagcacccagcccttcagcctgaagaacctggacaacagcgtgcacctgtgcaacaacagcatccagaagcacctggagaacagctgccacagacaccccctgctgccccccgacaacatgtggagcagccagagattccaggcccacctgcaggagatgggcgcccccaacgcctggagcaccatcatcgtgcccggcatgaaggacgccgtgatccacgccctgcagaccagccaggacaccgtgcagtgcagaaaggccagcttcgagctgtacggcgccgacttcgtgttcggcgaggacttccagccctggctgatcgagatcaacgccagccccaccatggcccccagcaccgccgtgaccgccagactgtgcgccggcgtgcaggccgacaccctgagagtggtgatcgacagaatgctggacagaaactgcgacaccggcgccttcgagctgatctacaagcagcccgccgtggaggtgccccagtacgtgggcatcagactgctggtggagggcttcaccatcaagaagcccatggccatgtgccacagaagaatgggcgtgagacccgccgtgcccctgctgacccagagaggcagcggcgaggccagacaccacttccccagcctgcacaccaaggcccagctgcccagcccccacgtgctgagacaccagggccaggtgctgagaagacagcacagcaagctggtgggcaccaaggccctgagcaccaccggcaaggccctgagaaccctgcccaccgccaaggtgttcatcagcctgccccccaacctggacttcaaggtggcccccagcatcctgaagcccagaaaggcccccgccctgctgtgcctgagaggcccccagctggaggtgccctgctgcctgtgccccctgaagagcgagcagttcctggcccccgtgggcagaagcagacccaaggccaacagcagacccgactgcgacaagcccagagccgaggcctgccccatgaagagactgagccccctgaagcccctgcccctggtgggcaccttccagagaagaagaggcctgggcgacatgaagctgggcaagcccctgctgagattccccaccgccctggtgctggaccccacccccaacaagaagaagcaggtgaagtacctgggcctggacagcatcgccgtgggcggcagcagagtggacggcgccagaccctgcacccccggcagcaccgccagagcctag

SEQ ID NO: 29131 - DNA, 1305 bp, Artificial Sequence
  derived and/or modified sequence
atggacatcgacaaggacctggaggcccccctgtacctgacccccgagggctggagcctgttcctgcagagatactaccaggtggtgcacgagggcgccgagctgagacacctggacacccaggtgcagagatgcgaggacatcctgcagcagctgcaggccgtggtgccccagatcgacatggagggcgacagaaacatctggatcgtgaagcccggcgccaagagcagaggcagaggcatcatgtgcatggaccacctggaggagatgctgaagctggtgaacggcaaccccgtggtgatgaaggacggcaagtgggtggtgcagaagtacatcgagagacccctgctgatcttcggcaccaagttcgacctgagacagtggttcctggtgaccgactggaaccccctgaccgtgtggttctacagagacagctacatcagattcagcacccagcccttcagcctgaagaacctggacaacagcgtgcacctgtgcaacaacagcatccagaagcacctggagaacagctgccacagacaccccctgctgccccccgacaacatgtggagcagccagagattccaggcccacctgcaggagatgggcgcccccaacgcctggagcaccatcatcgtgcccggcatgaaggacgccgtgatccacgccctgcagaccagccaggacaccgtgcagtgcagaaaggccagcttcgagctgtacggcgccgacttcgtgttcggcgaggacttccagccctggctgatcgagatcaacgccagccccaccatggcccccagcaccgccgtgaccgccagactgtgcgccggcgtgcaggccgacaccctgagagtggtgatcgacagaatgctggacagaaactgcgacaccggcgccttcgagctgatctacaagcagcccgccgtggaggtgccccagtacgtgggcatcagactgctggtggagggcttcaccatcaagaagcccatggccatgtgccacagaagaatgggcgtgagacccgccgtgcccctgctgacccagagaggcagcggcgaggccagacaccacttccccagcctgcacaccaaggcccagctgcccagcccccacgtgctgagacaccagggccaggtgctgagaagacagcacagcaagctggtgggcaccaaggccctgagcaccaccggcaaggccctgagaaccctgcccaccgccaaggtgttcatcagcctgccccccaacctggacttcaaggtggcccccagcatcctgaagcccagaaaggtgggcctggacctgtag

SEQ ID NO: 29132 - DNA, 2748 bp, Artificial Sequence
  derived and/or modified sequence
atgcaaggacccgacgcccctctgctgctttccgcgcgagagctgggacctgggcggagggggtctgcctcctggtatcgacaggaaggtggcgcggtgtgtaattggctgcgaaagccacagccactcgaacctcggacatcgttccctagcgcgagaaggtccgagtttcgccccccccggcgactgccatgggcaggaccagcgtcagcccagagtgaggaaggacatgcaggtggaaggtgccaggcaggctcgccagcccctgctcgccggctgagcggtgcattcaaaaccttggtaccgggcactcatgcccagggagcttccgatactcaccccttgggacccccccatacacccgtcctggacccatcgccccaagatggctttccagtgttgtggcgggggtcctcaaaggccagccatatgaatcgtttaaggaacgcaaagatatatgtagagagagccgtcaagcagaaaaaaatttttaccatacagggctgctatcctgtcattagatgtttgttgcgacgtcgcggctgggtggaaaagaagatggtgcacagatctggacccacgctgctcccaccccagaaggatctagattcttctgcaatgggggacagcgatacaaccgaagacgaagacgaggacgaggatgaggagtttcaacccagtcagttattcgattttgatgatctgctgaagttcgacgatctggacggcacacatgccctgatggttgggctgtgtctcaatctgaggaatttaccctggtttgacgaagtcgacgctaactcttttttcccccggtgttactgtcttggcgccgaggacgataagaaagccttcattgaggacttctggttgaccgctgccagaaatgtgttgaaactggtcgtgaagagcgaatggaaatcatacccaatccaagctgtggaggaggaggcatccggtgacaagcagcctaaaaaacaggaaaaaaatccggttttggtgtcccctgaattcgtcgatgaggctctctgtgcatgtgaggaatacctgagcaacctggcccatatggacatagacaaggacctggaagctcccttataccttactcccgaaggttggtcgctgtttctgcagagatactaccaagtggtacacgaaggcgctgaacttcggcacttagatacacaggtgcaacggtgtgaggatatcctacagcagcttcaggccgttgtgccacagatcgacatggagggtgataggaacatttggatcgtgaaacccggcgcaaaatcacgtggccggggtattatgtgcatggaccacctggaggagatgctgaagcttgtgaacggtaatcctgtggtgatgaaggacgggaagtgggttgttcaaaaatatatagaacgcccactcttgattttcggcaccaaatttgatctgaggcagtggttccttgtgactgactggaatccactgacggtctggttctatcgcgacagctacatccgcttctcgacacaaccgttttcacttaaaaatctggataattccgtccacctttgcaataactcaatccagaagcacttggagaattcttgtcacagacatccccttttgccacctgacaacatgtggtcttctcagagatttcaggcccaccttcaagagatgggggcaccaaatgcatggtcaaccataatagttcctggcatgaaggacgccgtgatccacgctctgcagacatcgcaagacactgtgcagtgtagaaaggcctcattcgagctgtatggggccgattttgtgtttggtgaagacttccagccatggctcattgaaataaacgcctcccccaccatggctccaagtactgccgtgactgctcggttatgcgctggagtccaggcagacacactgcgggtggttatcgaccggatgctggaccgaaactgcgatacaggcgcatttgaactgatatacaaacagcccgctgttgaagtgcctcagtatgtgggaattagactgctagtcgaggggtttacaatcaaaaagccaatggccatgtgtcaccgcagaatgggcgtccggcccgccgtgcctcttctgacacaacgcggcagcggcgaggccaggcaccactttccatcacttcacacgaaggctcagctcccgtcacctcacgtgctgagacatcaaggccaagtgttgagaaggcaacactccaagctcgtaggaacaaaggctctctctaccacaggcaaagctcttagaactctgcctactgccaaagtttttatcagtcttccgcccaacctggattttaaagtggccccaagcattctgaaaccaaggaaagcacccgcattgctctgtctgcggggcccccagctcgaagtcccttgctgcctgtgccccttaaaaagcgagcagttcctggccccagtgggcagaagccgccctaaggccaactcccgccccgactgcgacaaaccccgcgccgaggcatgtccaatgaaacggctgagccccctaaagcctctacccctggttggcacattccagagaagaagggggctgggagacatgaagcttggcaagcctctccttcggttccccaccgcgctggtgctcgatcctacccctaataagaagaaacaggttaagtacttaggattagactccatagccgtcggaggcagccgggtcgatggagctaggccctgcacgcctggaagcactgccagggcttag

SEQ ID NO: 29133 - DNA, 1305 bp, Artificial Sequence
  derived and/or modified sequence
atggacattgataaagatcttgaggccccactgtacctgacaccagaagggtggtcgttattcttacagcgttactaccaagtagtccacgagggcgccgaattacggcacctggacactcaggtgcaacgctgcgaagatatcctgcaacaactccaagccgtggttcctcagatcgacatggagggcgatagaaatatttggattgtcaagccaggcgcaaaatccaggggtagggggataatgtgcatggaccatcttgaagagatgctgaagctggtaaacgggaatccagttgtgatgaaagacggcaagtgggtggtccaaaagtatatcgaaagaccgttgctgatattcggaaccaagtttgacttgcggcagtggtttttagtgacagactggaatccattaaccgtgtggttctacagggattcctacattagattctccacgcagccttttagccttaagaatctcgacaacagcgtccatttgtgcaataatagcatccagaaacacctcgaaaattcctgtcaccggcaccccctgctgccaccagacaatatgtggagctcgcagcggttccaagcccaccttcaggagatgggcgcccctaatgcctggagcactataatcgtgccaggtatgaaagacgctgtcattcacgccctccagacaagccaggacaccgtccagtgccggaaggcaagcttcgaactgtatggtgcagatttcgtctttggtgaggacttccagccatggcttatcgaaatcaacgcaagtccaactatggcccccagcactgccgtgacggcccggctttgtgccggcgtgcaggctgacacattgagagttgttattgaccgcatgctcgaccgtaattgtgataccggtgcctttgaactgatctataaacagcccgctgtcgaagtgcctcaatatgttggcatcagattgttggtggagggattcaccataaagaagccgatggctatgtgccaccggagaatgggcgtgcgccctgctgtccctctcttgactcaaaggggcagtggtgaagccaggcatcattttccctctctgcatacaaaagcacagctgccatcaccgcatgtgctcagacatcagggtcaggtactcaggcggcaacacagcaagctggttggcactaaagctctgtctaccaccggcaaggcgctgcgcaccttacccacagccaaggtctttatctcattacctcccaatctggactttaaagtcgccccctctatcctcaaaccacgaaaggtgggcctggatctgtag

SEQ ID NO: 29134 - DNA, 2748 bp, Artificial Sequence
  derived and/or modified sequence
atgcagggcccagatgcccccctgctgctgagcgcccgggagctgggccctggaagaagaggcagcgcctcctggtaccggcaggagggcggcgctgtgtgcaactggctgaggaagccccagcccctggagcccaggaccagcttccccagcgccaggagaagtgagttccggcccccccggcggctgccctgggccggccctgccagcgcccagagcgaggagggccacgccggcggccgctgccaggccggcagccctgccccagcccggcggctgagcggggccttcaagaccctggtgcccggcacccacgcccagggcgccagtgacacccaccccctgggccccccccacacccctgtgctggaccccagcccccaggacggcttccctgtgctgtggaggggcagcagcaaggccagccacatgaaccggctgagaaatgccaagatctacgtggagagagctgtgaagcagaagaagatcttcaccatccagggctgctaccctgtgatccgctgcctgctgcggcggcggggctgggtggagaagaagatggtgcacaggagcggccccaccctgctgcccccccagaaggacctggacagcagcgccatgggagacagcgacaccacagaagatgaagatgaagatgaagatgaggagttccagcccagccagctgtttgattttgatgacctgctgaagtttgatgacctggatggcacccacgccctgatggtgggcctgtgcctgaacctgaggaacctgccctggtttgatgaggtggatgccaacagcttcttcccccgctgctactgcctgggcgcagaagatgacaagaaggccttcatcgaggacttctggctgacagctgccagaaatgtgctgaagctggtggtgaagtctgagtggaagagctaccccatccaggccgtggaggaggaggccagcggggacaagcagcccaagaagcaggagaagaaccctgtgctggtgtccccagagtttgtggatgaggccctgtgtgcctgtgaggagtacctgagcaacctggcccacatggacatcgacaaggacctggaggcccccctgtacctgaccccagagggctggagcctcttcctgcagcgctactaccaggtggtgcatgaaggagctgagctgcggcacctggacacccaggtgcagagatgtgaggacatcctgcagcagctgcaggccgtggtgccccagattgacatggagggggacaggaacatctggatcgtgaagccaggggccaagagccggggccggggcatcatgtgcatggaccacctggaggagatgctgaagctggtgaatggaaatcctgtggtgatgaaggatggcaagtgggtggtgcagaagtacatcgagcggcccctgctgatcttcggcaccaagtttgacctgcggcagtggttcctggtgacagactggaaccccctgactgtgtggttctacagagacagctacatccgcttcagcacccagcccttcagcctgaagaacctggacaacagcgtgcacctgtgcaacaacagcatccagaagcacctggagaacagctgccaccgccaccccctgctgcccccagacaacatgtggagcagccagcgcttccaggcccacctgcaggagatgggcgccccaaatgcctggagcaccatcatcgtgcccggcatgaaggatgctgtgattcatgccctgcagaccagccaggacacagtgcagtgcaggaaggccagctttgagctgtatggagctgactttgtgtttggagaggacttccagccctggctgattgagatcaatgccagccccaccatggcccccagcacagctgtgacagcccggctgtgtgccggcgtgcaggccgacaccctgcgggtggtgattgacaggatgctggacaggaactgtgacaccggggcctttgagctgatctacaagcagcctgctgtggaggtgccccagtatgtgggcatccggctgctggtggagggcttcaccatcaagaagcccatggccatgtgccacaggaggatgggcgtgcggcctgctgtgcccctgctgacccagaggggcagcggggaggcccggcaccacttccccagcctgcacaccaaggcccagctgcccagcccccacgtgctgcggcaccagggccaggtgctgcggcggcagcacagcaagctggtgggcaccaaggccctgagcaccaccgggaaggccctgcggaccctgcccacagccaaggtgttcatcagcctgccccccaacctggacttcaaggtggcccccagcatcctgaagcccaggaaggccccagccctgctgtgcctgcggggcccccagctggaggtgccctgctgcctgtgccccctgaagtctgagcagttcctggcccctgtgggccgcagccggcccaaggccaacagcaggccagactgtgacaagcccagggctgaggcctgccccatgaagaggctgagccccctgaagcccctgcccctggtgggcaccttccagaggagaagaggcctgggggacatgaagctgggcaagcccctgctgcgcttccccacagccctggtgctggaccccacccccaacaagaagaagcaggtgaagtacctgggcctggacagcattgctgtgggcggcagccgggtggatggagcccggccctgcaccccaggcagcacagcccgggcctag

SEQ ID NO: 29135 - DNA, 1305 bp, Artificial Sequence
  derived and/or modified sequence
atggacatcgacaaggacctggaggcccccctgtacctgaccccagagggctggagcctcttcctgcagcgctactaccaggtggtgcatgagggcgctgagctgcggcacctggacacccaggtgcagagatgtgaggacatcctgcagcagctgcaggccgtggtgccccagattgacatggagggggacaggaacatctggatcgtgaagccaggggccaagagccggggccggggcatcatgtgcatggaccacctggaggagatgctgaagctggtgaatggaaatcctgtggtgatgaaggatggcaagtgggtggtgcagaagtacatcgagcggcccctgctgatcttcggcaccaagtttgacctgcggcagtggttcctggtgacagactggaaccccctgactgtgtggttctacagagacagctacatccgcttcagcacccagcccttcagcctgaagaacctggacaacagcgtgcacctgtgcaacaacagcatccagaagcacctggagaacagctgccaccgccaccccctgctgcccccagacaacatgtggagcagccagcgcttccaggcccacctgcaggagatgggcgccccaaatgcctggagcaccatcatcgtgcccggcatgaaggatgctgtgatccacgccctgcagaccagccaggacacagtgcagtgcaggaaggccagctttgagctgtatggagctgactttgtgtttggagaggacttccagccctggctgattgagatcaatgccagccccaccatggcccccagcacagctgtgacagcccggctgtgtgccggcgtgcaggccgacaccctgcgggtggtgattgacaggatgctggacaggaactgtgacacaggagcctttgagctgatctacaagcagcctgctgtggaggtgccccagtatgtgggcatccggctgctggtggagggcttcaccatcaagaagcccatggccatgtgccacaggaggatgggcgtgcggcctgctgtgcccctgctgacccagaggggcagcggggaggcccggcaccacttccccagcctgcacaccaaggcccagctgcccagcccccacgtgctgcggcaccagggccaggtgctgcggcggcagcacagcaagctggtgggcaccaaggccctgagcaccaccgggaaggccctgcggaccctgcccacagccaaggtgttcatcagcctgccccccaacctggacttcaaggtggcccccagcatcctgaagcccaggaaggtgggcctggacctgtag

SEQ ID NO: 29136 - DNA, 3257 bp, Artificial Sequence
  derived and/or modified sequence
cagtccgaggagggtcacgcaggcggcagatgccaggcgggcagccccgcccctgcgcgccgcctcagcggcgccttcaagacgctggtcccaggcacccacgcccagggcgcctcggatacccaccccctcggccccccgcacaccccggtcctcgacccctctccgcaggatggtttcccggtcctctggcgaggatcctccaaggcgtctcacatgaaccggctcagaaacgccaaaatctacgtggagagagctgtcaagcagaagaagatctttacaatccaaggctgctacccggtgatccggtgtctcttgcgccggaggggctgggtggagaagaagatggtccatcgctcaggccccaccctgctgccaccccagaaggatctggatagctcagcgatgggtgacagtgacaccactgaggatgaggatgaagatgaggacgaggagttccagccatcacagctgttcgacttcgatgatttactgaaatttgatgacctagatggaacacatgctctgatggtgggtctatgtctcaatctccggaatttgccgtggtttgatgaggttgatgccaactccttcttcccacgctgctactgcctgggggctgaggatgacaaaaaagccttcatagaggacttctggctgactgctgcccgcaacgttctcaagctggtggtgaagtctgagtggaagtcataccctattcaggcagtagaggaagaggcctcaggagacaagcagcccaagaaacaggagaaaaacccagtgttggtgtccccagagtttgtggatgaagctctgtgtgcgtgcgaggagtaccttagcaacttggcccacatggacatcgacaaggacctggaggccccgctgtacctcacccccgagggctggtccctcttcctccagcgctactaccaagtggtccacgaaggggcagaactcaggcacctcgacactcaggtccagcgctgtgaggacatcctgcagcagctgcaggccgtggtaccccagatagacatggaaggggatcgcaacatctggatcgtgaagccaggagccaagtcccgcggacgaggcatcatgtgcatggaccacctggaggagatgctgaagctggtgaacggcaaccccgtggtgatgaaggacggcaagtgggtggtgcagaagtatattgagcggcccctcctcatctttggcaccaagtttgacctcagacagtggttcctggtaactgactggaacccacttaccgtgtggttctaccgcgacagctatatccgcttttccacgcagcccttctccctgaagaacctggacaactcagtgcacctgtgcaacaactccatccagaagcacctggagaactcatgccatcggcatccactgcttccgccagacaacatgtggtctagccagaggttccaggcccacctgcaggagatgggtgccccaaatgcttggtccaccatcatcgtgcctggcatgaaggatgctgtgatccacgcacttcagacctcccaggacaccgtgcagtgtcggaaggccagctttgagctctatggcgctgacttcgtgttcggggaggacttccagccctggctgattgagatcaacgccagccccacgatggcaccctccacagcagtcactgcccggctctgtgctggcgtgcaagctgacaccctgcgcgtggtcattgaccggatgctggaccgcaactgtgacacaggagcctttgagctcatctataagcagcccgtcaccacttccccagcctccacaccaaggcccagctgccttctccccatgtactccgacaccagggccaggtcctcagacgacagcacagcaagctggtgggcactaaggccctgtcgaccacaggcaaggccttgaggactctacccacggctaaggtcttcatttccctcccaccgaaccttgatttcaaggtggcacccagcatcctgaagccaagaaaggctcctgctctcctgtgcctccgaggcccccagctggaagtgccttgttgcctctgccctttgaagtcggaacaattcctagcacctgtcggaaggtcaaggccaaaggcaaattcaaggccagactgtgacaaacccagggctgaggcctgccccatgaagaggctgagccccctgaaacccctgccccttgttggtacattccagaggcgcaggggcctgggggatatgaagctagggaagcccctgcttcgattccccactgcccttgtcctggatccaacaccaaataaaaagaaacaagtgaagtatttggggcttgactccattgctgttggagggtcaagagtggatggggcgaggccgtgtaccccagggtccacagcaagagcctgaggccatcagcagctcctccgtgcagcgaggcccagaattcccacctaaggacagacatggggcttcctatttagggactcccccagcatctccgatccaggggtggggagcgtgagccttcactttacagatgaagaaactgagtctgaaagaggaggcatggcttacccaagatcacgtggcagtgagtcgacgcagggacatattgccagaactgccgagcactgggagccccccaaccccagagaacaagccaagctagcagaatgacacctaccgggcataggaacgttaatgccatgagacaggggaaggaattggccttgcctaaacctcagcccttctgcagagggcatgggtctatcccttcttcagcaaggggccaaggtcacctaaaaatgaaacatccaataagccacacccacctgaagaaaagtgtggcactgcttagttgtagtgggttgaactgtggtcccctgaaaagagatgtctacttggaccctgtgaatgtgaccttatgtgggaaaagagtctttgtagctgggtatggtggctcacacctgttatcccagcactttgagaggccaaggcaggagatcgcttgagcccgcaagttcaagaccagtctgggcaacatggtgaaaccgtttctacagaaaattagctgggtgtggtggcacacacctgtagtcctagctactcgggaggcctaggtgggaggattacctgagcctgggaagatcaaaactgtggtgagctgtgatcacgccactgcgctctgagcctgggagacagagtgaaaccctaaatcaaaaaaaaaaaaaaaggtctttgcagatgtaaataaatttaagatcttaaatg

SEQ ID NO: 29137 - DNA, 2748 bp, Artificial Sequence
  derived and/or modified sequence
atgcagggccccgacgcccccctgctgctgagcgcccgggagctgggtcccggtagacgagggtccgcctcctggtatagacaagaggggggcgccgtgtgtaactggcttcggaagccgcagcccctggagccccgaacgagctttccctctgctcgccggagcgaattccgtccaccccgccgactgccctgggcggggcccgcaagcgcacaatctgaagaagggcatgcaggtggcagatgtcaggccggaagtcctgcccccgccagacgcctatcaggggccttcaaaactctcgttccgggaactcacgcgcagggggctagtgacacccacccactggggccccctcacacccctgtgctcgatcctagccctcaagacggctttccagtcctttggcgcgggtcaagcaaagcttcccatatgaatcgactcaggaacgcaaaaatctatgtggagcgggccgtgaaacagaagaaaatctttactattcagggttgttatccggtgatcagatgcctgctccgaagaaggggatgggtggaaaagaagatggtgcatcggtcaggccctacactgctgccacctcagaaagaccttgattcctccgcaatgggcgactcagacaccacagaagacgaagacgaagacgaggacgaagagttccagccaagccagttgttcgatttcgatgacttgctgaaatttgatgaccttgatggcactcatgcgctaatggttgggctgtgcctaaacttgcgcaatctgccatggttcgacgaagtcgacgcaaattctttttttccccggtgttactgcttgggagcggaggatgataagaaggctttcatcgaagatttctggcttaccgcagcgcgaaatgtgctcaagctagtcgtgaagtctgagtggaaaagctaccctatccaggcagttgaggaggaggccagtggagacaagcagcccaaaaaacaggagaaaaaccccgtccttgtgagtccggagtttgtagatgaggccctctgcgcatgtgaagaatatttaagcaatctggcacatatggatatcgataaagatctcgaagctcccctttacctcactcctgaaggctggtcactcttcttgcagcgatattaccaggtggttcatgaaggtgctgagctgcgccatttggacacccaggttcagaggtgcgaagacatcctgcagcagctgcaggccgtggtaccacagattgatatggagggcgatcgaaatatctggattgtgaaacctggggccaagtcccgcgggaggggtatcatgtgcatggaccacctggaagaaatgctgaagctggtcaacggtaacccagtagttatgaaggacgggaagtgggtggtccagaaatacattgagcggcccttgctcattttcggtactaagtttgacctgcggcagtggtttctggtcaccgactggaacccccttactgtatggttctatcgggattcctatatccgcttcagtacacaacctttcagtcttaagaacctggacaattccgtacacctctgtaacaattctatacagaaacaccttgagaattcctgccatcgacatccgttattaccacccgacaatatgtggagcagtcagcgcttccaggcccacctgcaggagatgggagcccctaacgcctggtccaccattattgtacctggcatgaaagacgcagtcatccatgccctacaaactagtcaggatacggtccaatgtaggaaagcttcctttgaactgtatggcgccgattttgtttttggagaagattttcagccatggctcatcgaaataaacgcttcccctacgatggctcctagtacagctgtgacggctcgtctgtgcgcgggtgtgcaggccgacactttgcgagtggtgattgatcggatgctggatcggaattgcgatactggcgcttttgaactcatttacaagcagcccgccgttgaagtaccacaatatgtggggatacgcctgttagtggaaggcttcaccattaaaaaacccatggcaatgtgtcacaggcgcatgggcgtgcgccccgcagtgcccctacttactcagaggggctccggggaagctcgccaccattttccaagtctccataccaaggcacagttaccctcaccccatgtgctgaggcatcaaggccaggtacttcgcagacagcatagcaagctggtcgggaccaaggctttgtccacaacgggaaaggcgttacgcacactgccaacagccaaagtatttatttcgctcccccccaatctggactttaaagtagctccatctatcctcaagcctaggaaagccccggccttgctgtgtttgcgcgggccacagttggaagtgccttgctgcctctgccctctgaaaagcgaacagttcctggcccctgtgggccgctcgaggcccaaagccaactcccggcctgattgtgataagcctcgcgccgaggcttgcccaatgaaaagactgagtcccctgaaacctctgccgctcgttggaacatttcagcgtcgccgtggactaggagacatgaaattggggaaaccactcttgcggttcccaactgcactggtgttagaccctacccccaataaaaaaaagcaggtcaagtacctgggacttgattcaatcgccgtgggcggaagccgtgtggacggcgcacgaccatgcaccccgggtagcaccgctcgggcatag

SEQ ID NO: 29138 - DNA, 1305 bp, Artificial Sequence
  derived and/or modified sequence
atggacatcgacaaggacctggaggcccccctgtacctgacccccgaaggctggtccttgtttttacagaggtattaccaggttgtgcacgagggtgctgagctgcgccacctggatacacaggtccaaagatgtgaggatatcttacagcagctccaggcagtcgtgccacagatcgacatggagggagacaggaatatctggatagtcaaaccaggcgcgaagagcagaggtcgcggaataatgtgcatggatcaccttgaagaaatgctgaaactagtcaatggcaatccagtggtgatgaaggatggcaaatgggttgtgcaaaaatatatcgaacggcctctgctcatctttggaactaagtttgacctacggcagtggtttctggtaacggactggaacccccttactgtttggttctatagggactcttatataagattctcaacccagccattttccttaaaaaacctcgataattcggtgcacctgtgtaacaactcaattcagaaacacttggaaaattcatgtcacaggcaccccttgctacctcccgacaatatgtggtcttcccagcgatttcaggctcacctccaggaaatgggcgcgccaaacgcctggagcaccataatcgttccaggaatgaaagatgccgttatacatgccctgcagacaagtcaggacactgttcagtgtaggaaggctagctttgagctgtacggcgctgactttgtatttggggaagacttccagccctggcttattgagattaacgcgagcccaactatggcgcccagtactgccgttaccgctaggttgtgcgccggcgtgcaagctgacactctgcgggtggtcatcgacagaatgttggatcgcaactgtgatactggtgccttcgaattaatctataagcagcctgctgttgaagtcccccaatatgtaggcatccgacttctcgtcgaaggatttacaatcaagaagcctatggcaatgtgccatcgaaggatgggcgtacggcctgcagtccccttactgacacagagagggagtggtgaagccagacatcattttccctctctccatactaaggcccaactgccctctcctcacgtgctccgccaccagggacaggtcttacgacggcagcactctaaattagtggggactaaagcactatccactaccgggaaggccctgcggacattgccgacggctaaggtgttcatctctctgcccccaaatctcgactttaaagtggccccaagcatcctaaaaccgagaaaggtgggcctcgacctttag

SEQ ID NO: 29139 - DNA, 2748 bp, Artificial Sequence
  derived and/or modified sequence
atgcagggccctgacgcccctttactgctgtccgcaagggaactcggacccggaagacggggaagcgcgagctggtatcgacaggaaggaggtgccgtctgcaattggctgagaaagccccagccactggaacccaggacctcttttcccagtgccagacgctccgaatttagacccccacgcagactcccatgggcaggccctgcctcagcccagagcgaggaaggccacgctgggggtaggtgccaggcgggtagccccgctcccgctagacggctctctggtgcgtttaaaactttggtgcccggaacccacgctcagggggctagcgatacacaccccctgggccctccccatacccccgtcttggaccccagccctcaagatgggttccctgtgctttggaggggctccagcaaggcatctcacatgaatagactccgtaacgccaagatttatgtggagcgtgcagtgaagcagaaaaaaatattcactatccagggttgctaccctgtgatccgctgtcttctaaggcgccgtggctgggttgaaaagaagatggtgcatagatctggccctacattactgccgccacagaaagatttggacagctcggcgatgggcgacagcgatacaaccgaagatgaggatgaggacgaggatgaggagttccagccttcacagctctttgacttcgacgatctgctcaagttcgacgatcttgacggaacccatgcgttgatggttggactctgtctcaacctgagaaacctcccctggttcgacgaagtggacgcaaacagcttcttcccgagatgttattgccttggggcagaagatgacaagaaggcctttatcgaggacttctggctgacagccgcacggaacgtgttgaagttggtggtgaaatccgagtggaagagctatcccattcaggccgtggaagaggaagcctcgggagacaaacagcccaaaaaacaggagaagaatccggttctcgtgagtcctgagttcgttgacgaagcgctatgcgcctgcgaggaatacctgtccaatctggcccacatggacattgataaagatctcgaagcccctctttacctgacccccgagggctggagtcttttcctgcagagatactaccaggtggtgcacgagggggcagaactgcgacacctcgacacgcaggttcagagatgtgaagacatcctccagcagctccaggcggtagtacctcaaattgatatggagggcgacaggaacatctggatagtcaagccgggagccaagtcacgaggtcggggtattatgtgtatggaccacctcgaggagatgttgaagcttgttaatggtaatccagttgtgatgaaggatggaaagtgggtcgtgcagaaatacatcgagaggcctcttcttattttcggtacaaaattcgacctgcgccaatggtttttggtcactgattggaatccacttaccgtctggttctacagagactcctatatccggttctcgacccaaccatttagcctgaagaaccttgacaattccgtacatctgtgcaataatagtatacaaaaacatctggagaacagttgccatcggcaccccctgctgcctcctgacaatatgtggtcctctcaaaggtttcaagcccacttacaggagatgggtgcccctaacgcctggtctaccattatagttccaggcatgaaagatgcagtgatccatgcactacaaacttcccaagataccgtacagtgtaggaaagccagtttcgaactgtacggcgctgatttcgtgtttggggaagacttccagccctggctgattgaaatcaatgcctctcctacaatggccccaagcaccgcagtcaccgccagactgtgcgccggagtgcaggctgacacccttagggtggtcatcgatcgtatgctggacagaaattgcgacactggggcatttgaactcatttacaagcagccagccgtcgaggtccctcagtacgtcggcattagactgttagtggagggcttcaccattaaaaaaccaatggcgatgtgccatcggcgaatgggggttcgaccagccgtacccctgctgactcaacggggtagcggtgaagccagacatcactttcccagcttgcatacgaaggctcagttgccctcaccccatgttctccggcaccagggacaggttctccggcgacaacatagcaaactggtaggcacaaaggctctgtcgactacaggcaaagccctgcgaactctgccgacagcaaaagttttcattagtttgcccccaaatctcgattttaaagtggccccatccattctgaagccacggaaggccccagccttactgtgcctcagagggccacagctggaggttccctgttgtctgtgtccgcttaagagtgaacaatttctggccccagtggggaggtcgcgtcctaaggccaacagcagacccgactgtgacaaacctagggcagaagcttgccctatgaagagactgtcccccttgaagccacttcccttggtcggtactttccagaggcggagagggttgggggatatgaagttgggtaagcctctgctccggttccccaccgcactcgtcttggacccgacacctaataagaaaaagcaggttaaatatcttggacttgactcgatagctgtggggggttccagagtagacggggcacggccttgtactcccggatctactgccagggcctag

SEQ ID NO: 29140 - DNA, 1305 bp, Artificial Sequence
  derived and/or modified sequence
atggacatcgacaaggacctagaggccccactgtacctgactcccgagggatggtctctcttcttacagcggtactatcaggtggtacacgagggggctgaacttaggcatttggacacacaggtacagagatgtgaagacatcctgcagcaactccaggctgtggtgccccaaatcgacatggagggtgaccgcaacatatggatcgtgaaacccggagcaaaatcccgaggaaggggcatcatgtgtatggatcatcttgaggaaatgctaaagctggtgaacgggaatcccgtggtcatgaaggatggtaaatgggtggttcagaaatatattgagcggcctctgcttatcttcggcaccaagttcgatttaagacagtggttcctggtcacagactggaacccattaaccgtctggttctacagggacagctatattcggttctctacccaacccttttcccttaagaacttggacaatagtgtccatctctgtaacaattcgatccagaagcacctcgaaaacagttgtcaccgccatccccttcttcccccagataatatgtggagcagtcagcgctttcaggcacacctgcaggaaatgggcgctcctaatgcctggtccacaatcatcgtgcccggaatgaaggacgccgtcatccatgcgctgcagacatctcaagacaccgttcagtgtcggaaagcttccttcgagctctatggggctgactttgtattcggagaagactttcagccgtggctcattgagataaacgcatcgcctacaatggctccaagcacagcagtgacagctaggctttgtgccggagtgcaggccgacacccttagggtggtgatcgaccgaatgctggacagaaactgtgacactggagcattcgaattgatttataagcaaccggcagtggaagtgcctcagtatgtgggcattcggctgctggtagagggctttaccataaagaaacccatggctatgtgccataggagaatgggtgtgaggcctgctgtgccactgttgactcagcggggtagcggtgaggctagacaccacttcccctctctacacacaaaggcacaactgcctagcccacatgtgttgcggcatcaaggacaggttctgaggcgacagcactcaaaattggtcggcactaaggctctgtccacaacaggcaaggcgctgcgcactctccccactgctaaagtgttcattagcttacctcccaatctggacttcaaggtagcaccgtcaatccttaagcccagaaaggttggtcttgatttatag

SEQ ID NO: 29141 - DNA, 2767 bp, Artificial Sequence
  derived and/or modified sequence
cgagcgcggcgaggggcgcatgcagggccccgacgcgccactgctcctgagcgcgagggagctggggcccgggcgccggggctcggcctcctggtaccgccaggagggcggcgcggtgtgcaactggctgcggaagccgcagccgctcgagccacgcaccagtttcccctcggcgcgccgctccgagttccgtccacccaggaggctgccatgggccggccctgcctccgcccagtccgaggagggtcacgcaggcggcagatgccaggcgggcagccccgcccctgcgcgccgcctcagcggcgccttcaagacgctggtcccaggcacccacgcccagggcgcctcggatacccaccccctcggccccccgcacaccccggtcctcgacccctctccgcaggatggtttcccggtcctctggcgaggatcctccaaggcgtctcacatgaaccggctcagaaacgccaaaatctacgtggagagagctgtcaagcagaagaagatctttacaatccaaggctgctacccggtgatccggtgtctcttgcgccggaggggctgggtggagaagaagatggtccatcgctcaggccccaccctgctgccaccccagaaggatctggatagctcagcgatgggtgacagtgacaccactgaggatgaggatgaagatgaggacgaggagttccagccatcacagctgttcgacttcgatgatttactgaaatttgatgacctagatggaacacatgctctgatggtgggtctatgtctcaatctccggaatttgccgtggtttgatgaggttgatgccaactccttcttcccacgctgctactgcctgggggctgaggatgacaaaaaagccttcatagaggacttctggctgactgctgcccgcaacgttctcaagctggtggtgaagtctgagtggaagtcataccctattcaggcagtagaggaagaggcctcaggagacaagcagcccaagaaacaggagaaaaacccagtgttggtgtccccagagtttgtggatgaagctctgtgtgcgtgcgaggagtaccttagcaacttggcccacatggacatcgacaaggacctggaggccccgctgtacctcacccccgagggctggtccctcttcctccagcgctactaccaagtggtccacgaaggggcagaactcaggcacctcgacactcaggtccagcgctgtgaggacatcctgcagcagctgcaggccgtggtaccccagatagacatggaaggggatcgcaacatctggatcgtgaagccaggagccaagtcccgcggacgaggcatcatgtgcatggaccacctggaggagatgctgaagctggtgaacggcaaccccgtggtgatgaaggacggcaagtgggtggtgcagaagtatattgagcggcccctcctcatctttggcaccaagtttgacctcagacagtggttcctggtaactgactggaacccacttaccgtgtggttctaccgcgacagctatatccgcttttccacgcagcccttctccctgaagaacctggacaactcagtgcacctgtgcaacaactccatccagaagcacctggagaactcatgccatcggcatccactgcttccgccagacaacatgtggtctagccagaggttccaggcccacctgcaggagatgggtgccccaaatgcttggtccaccatcatcgtgcctggcatgaaggatgctgtgatccacgcacttcagacctcccaggacaccgtgcagtgtcggaaggccagctttgagctctatggcgctgacttcgtgttcggggaggacttccagccctggctgattgagatcaacgccagccccacgatggcaccctccacagcagtcactgcccggctctgtgctggcgtgcaagctgacaccctgcgcgtggtcattgaccggatgctggaccgcaactgtgacacaggagcctttgagctcatctataagcagcctgctgtggaggtgcctcaatatgtgggcatccggctcctggtagagggcttcaccatcaagaagcccatggcgatgtgtcatcggcggatgggggtccgcccagcagtccctctgctgacccagcgaggctctggggaagcccgtcaccacttccccagcctccacaccaaggcccagctgccttctccccatgtactccgacaccagggccaggtcctcagacgacagcacagcaagctggtgggcactaaggccctgtcgaccacaggcaaggccttgaggactctacccacggctaaggtcttcatttccctcccaccgaaccttgatttcaaggtggcacccagcatcctgaagccaagaaaggctcctgctctcctgtgcctccgaggcccccagctggaagtgccttgttgcctctgccctttgaagtcggaacaattcctagcacctgtcggaaggtcaaggccaaaggcaaattcaaggccagactgtgacaaacccagggctgaggcctgccccatgaagaggctgagccccctgaaacccctgccccttgttggtacattccagaggcgcaggggcctgggggatatgaagctagggaagcccctgcttcgattccccactgcccttgtcctggatccaacaccaaataaaaagaaacaagtgaagtatttggggcttgactccattgctgttggagggtcaagagtggatggggcgaggccgtgtaccccagggtccacagcaagagcctga

SEQ ID NO: 29142 - DNA, 1561 bp, Artificial Sequence
  derived and/or modified sequence
cttcgatgatttactgaaatttgatgacctagatggaacacatgctctgatgtcccgcatggtccagaatgagatcccctacttcatctggaccactcggcgggatgtgctcgactgtcgcttcctctccaaggatcagatgataaaccactacgcccgggctggctcctttaccacaaaggtgggtctatgtctcaatctccggaatttgccgtggtttgatgaggttgatgccaactccttcttcccacgctgctactgcctgggggctgaggatgacaaaaaagccttcatagaggacttctggctgactgctgcccgcaacgttctcaagctggtggtgaagtctgagtggaagtcataccctattcaggcagtagaggaagaggcctcaggagacaagcagcccaagaaacaggagaaaaacccagtgttggtgtccccagagtttgtggatgaagctctgtgtgcgtgcgaggagtaccttagcaacttggcccacatggacatcgacaaggacctggaggccccgctgtacctcacccccgagggctggtccctcttcctccagcgctactaccaagtggtccacgaaggggcagaactcaggcacctcgacactcaggtccagcgctgtgaggacatcctgcagcagctgcaggccgtggtaccccagatagacatggaaggggatcgcaacatctggatcgtgaagccaggagccaagtcccgcggacgaggcatcatgtgcatggaccacctggaggagatgctgaagctggtgaacggcaaccccgtggtgatgaaggacggcaagtgggtggtgcagaagtatattgagcggcccctcctcatctttggcaccaagtttgacctcagacagtggttcctggtaactgactggaacccacttaccgtgtggttctaccgcgacagctatatccgcttttccacgcagcccttctccctgaagaacctggacaactcagtgcacctgtgcaacaactccatccagaagcacctggagaactcatgccatcggcatccactgcttccgccagacaacatgtggtctagccagaggttccaggcccacctgcaggagatgggtgccccaaatgcttggtccaccatcatcgtgcctggcatgaaggatgctgtgatccacgcacttcagacctcccaggacaccgtgcagtgtcggaaggccagctttgagctctatggcgctgacttcgtgttcggggaggacttccagccctggctgattgagatcaacgccagccccacgatggcaccctccacagcagtcactgcccggctctgtgctggcgtgcaagctgacaccctgcgcgtggtcattgaccggatgctggaccgcaactgtgacacaggagcctttgagctcatctataagcagcccgtcaccacttccccagcctccacaccaaggcccagctgccttctccccatgtactccgacaccagggccaggtcctcagacgacagcacagcaagctggtgggcactaaggccctgtcgaccacaggcaaggccttga

SEQ ID NO: 29143 - DNA, 2097 bp, Artificial Sequence
  derived and/or modified sequence
gccttggggacatttagggcagagcctcgagtgacaggtcctgggacagtgggagccaagggcaagtgctagagttgcagtgaatttagagcaaagcctcagctaagtgacacatcccagggcagtaggggatctatctaggttcgtgctgggcctcaggtaagtgacaggccttaggacaatgggggctgtggcatgcgtcaggttacctgccttgatatgggatcgtgacaggcccctccctatgtgcaggagacaagcagcccaagaaacaggagaaaaacccagtgttggtgtccccagagtttgtggatgaagctctgtgtgcgtgcgaggagtaccttagcaacttggcccacatggacatcgacaaggacctggaggccccgctgtacctcacccccgagggctggtccctcttcctccagcgctactaccaagtggtccacgaaggggcagaactcaggcacctcgacactcaggtccagcgctgtgaggacatcctgcagcagctgcaggccgtggtaccccagatagacatggaaggggatcgcaacatctggatcgtgaagccaggagccaagtcccgcggacgaggcatcatgtgcatggaccacctggaggagatgctgaagctggtgaacggcaaccccgtggtgatgaaggacggcaagtgggtggtgcagaagtatattgagcggcccctcctcatctttggcaccaagtttgacctcagacagtggttcctggtaactgactggaacccacttaccgtgtggttctaccgcgacagctatatccgcttttccacgcagcccttctccctgaagaacctggacaactcagtgcacctgtgcaacaactccatccagaagcacctggagaactcatgccatcggcatccactgcttccgccagacaacatgtggtctagccagaggttccaggcccacctgcaggagatgggtgccccaaatgcttggtccaccatcatcgtgcctggcatgaaggatgctgtgatccacgcacttcagacctcccaggacaccgtgcagtgtcggaaggccagctttgagctctatggcgctgacttcgtgttcggggaggacttccagccctggctgattgagatcaacgccagccccacgatggcaccctccacagcagtcactgcccggctctgtgctggcgtgcaagctgacaccctgcgcgtggtcattgaccggatgctggaccgcaactgtgacacaggagcctttgagctcatctataagcagcctgctgtggaggtgcctcaatatgtgggcatccggctcctggtagagggcttcaccatcaagaagcccatggcgatgtgtcatcggcggatgggggtccgcccagcagtccctctgctgacccagcgaggctctggggaagcccgtcaccacttccccagcctccacaccaaggcccagctgccttctccccatgtactccgacaccagggccaggtcctcagacgacagcacagcaagctggtgggcactaaggccctgtcgaccacaggcaaggccttgaggactctacccacggctaaggtcttcatttccctcccaccgaaccttgatttcaaggtggcacccagcatcctgaagccaagaaaggtgggcctcgacctgtgactcacacccagtggacagtgctgagcacggggtcagggctggagggcacaggcagagggcagctcccaggctggctggcaccccaagggaagagctggtctccctcagaagccccttcctccacagacttctgatcatctccctcttctcccctcctttcacaccgaggctcctgctctcctgtgcctccgaggcccccagctggaagtgccttgttgcctctgccctttgaagtcggaacaattcctagcacctgtcggaaggtcaaggccaaaggcaaattcaaggccagactgtgacaaacccagggctgaggcctgccccatgaagaggctgagccccctgaaacccctgccccttgttggtacattccagaggcgcaggggcctgggggatatgaagctagggaagcccctgcttcgattccccactg

SEQ ID NO: 29144 - DNA, 2319 bp, Artificial Sequence
  derived and/or modified sequence
atgaaccgcctgcgcaatgccaaaatctacgtcgagcgggccgtaaaacagaagaaaatttttacaattcagggctgctatcctgtgatcaggtgtctcctccggagacgcggttgggtggagaagaaaatggtgcaccgatcagggcccactctcctaccgccacaaaaagatttagattctagcgcaatgggggatagcgacactaccgaggatgaagatgaggacgaggacgaagagttccagccttctcaactcttcgattttgacgacctcctgaagtttgacgatttagacggcactcacgccctcatggtgggcttgtgtctgaacctcagaaacttaccatggtttgacgaggtggatgctaattccttttttccgcgttgctattgtctgggcgccgaggatgataagaaagccttcatagaagacttttggctgactgccgcccgcaatgttctcaaactggtggtgaaaagcgagtggaagagctatccgatccaagccgtagaggaggaagcttccggagacaagcaaccaaaaaagcaggagaaaaacccagtgttggttagccccgaatttgtggacgaagccctctgtgcctgtgaggagtacctgtctaatctggcacacatggacattgacaaggacttggaggcaccattatacctgaccccagagggttggtcactgttcttgcagagatattaccaggtcgtgcacgagggggcagaactacggcacctggatacccaggtgcagcggtgtgaggatattttgcaacagttgcaggcagtcgtgccccagattgacatggaaggggatcgaaacatttggatagtaaaacccggagctaagagcagaggccgcggtatcatgtgcatggaccatctggaggaaatgttaaaactcgttaatggaaacccagttgtgatgaaggatggaaagtgggtggttcaaaaatacatcgagaggcctctgttgatcttcgggacaaagtttgacctcaggcaatggttcttggtgactgactggaatccattgaccgtttggttctacagagactcctacattaggttttccactcagccgttcagcctgaaaaacctcgataattctgtgcacttgtgtaataattcgatacagaaacacctggagaactcttgtcatcgccaccccctcctcccccccgataatatgtggtcttcccagcggttccaggctcacttacaagagatgggtgctcccaacgcctggtccaccatcatcgtgcccggaatgaaagacgccgtgatccatgcactccaaacttcgcaagatactgtccaatgtaggaaagcaagctttgagctgtacggtgctgattttgtctttggggaagacttccagccatggctcatcgagatcaatgccagtcccactatggccccctcgaccgcggtcaccgcacgcttatgtgctggggtgcaagcggatactctgcgtgtggttatcgaccgcatgctggacaggaattgtgataccggcgccttcgagctgatttataaacaacctgccgtggaggtaccccagtatgtgggcatcaggctgctcgtggagggcttcacgattaagaagcccatggcgatgtgccataggcgtatgggcgtcaggccggcagttcccttgttgacccaaagaggttcaggcgaggcccgacaccatttccccagtctacataccaaagctcagctgccttccccccacgtgctacgacatcaagggcaggttctgaggcgacagcattccaaactggtcgggacaaaggcccttagcacaaccgggaaagcgcttaggacgctgcctactgctaaagtgtttatctccctcccgccaaatctggatttcaaggtggcgccctccatcctcaagccacggaaggctcccgcccttttatgtctgcgcgggccccagctggaggttccttgttgcctctgcccacttaagagcgagcagttccttgcacccgttggtcgcagtcggcccaaagctaactccagacccgactgcgacaaacctcgggctgaggcttgcccaatgaagcgtctctcaccactgaagccactgcccttggttgggacatttcagagacggcggggacttggggacatgaaactgggaaagcctctcctcagattccccaccgccttagtgctcgaccccaccccaaataagaaaaagcaggttaaatatctcgggctggattcaatagcagtggggggctcacgcgtggatggtgcaaggccgtgtactcccgggagcaccgcccgagcctag

SEQ ID NO: 29145 - DNA, 2319 bp, Artificial Sequence
  derived and/or modified sequence
atgaaccggctgagaaatgccaagatctacgtggagagagctgtgaagcagaagaagatcttcaccatccagggctgctaccctgtgatccgctgcctgctgcggcggcggggctgggtggagaagaagatggtgcacaggagcggccccaccctgctgcccccccagaaggacctggacagcagcgccatgggagacagcgacaccacagaagatgaagatgaagatgaagatgaggagttccagcccagccagctgtttgattttgatgacctgctgaagtttgatgacctggatggcacccacgccctgatggtgggcctgtgcctgaacctgaggaacctgccctggtttgatgaggtggatgccaacagcttcttcccccgctgctactgcctgggcgcagaagatgacaagaaggccttcatcgaggacttctggctgacagctgccagaaatgtgctgaagctggtggtgaagtctgagtggaagagctaccccatccaggccgtggaggaggaggccagcggggacaagcagcccaagaagcaggagaagaaccctgtgctggtgtccccagagtttgtggatgaggccctgtgtgcctgtgaggagtacctgagcaacctggcccacatggacatcgacaaggacctggaggcccccctgtacctgaccccagagggctggagcctcttcctgcagcgctactaccaggtggtgcatgagggcgctgagctgcggcacctggacacccaggtgcagagatgtgaggacatcctgcagcagctgcaggccgtggtgccccagattgacatggagggggacaggaacatctggatcgtgaagccaggggccaagagccggggccggggcatcatgtgcatggaccacctggaggagatgctgaagctggtgaatggaaatcctgtggtgatgaaggatggcaagtgggtggtgcagaagtacatcgagcggcccctgctgatcttcggcaccaagtttgacctgcggcagtggttcctggtgacagactggaaccccctgactgtgtggttctacagagacagctacatccgcttcagcacccagcccttcagcctgaagaacctggacaacagcgtgcacctgtgcaacaacagcatccagaagcacctggagaacagctgccaccgccaccccctgctgcccccagacaacatgtggagcagccagcgcttccaggcccacctgcaggagatgggcgccccaaatgcctggagcaccatcatcgtgcccggcatgaaggatgctgtgatccacgccctgcagaccagccaggacacagtgcagtgcaggaaggccagctttgagctgtatggagctgactttgtgtttggagaggacttccagccctggctgattgagatcaatgccagccccaccatggcccccagcacagctgtgacagcccggctgtgtgccggcgtgcaggccgacaccctgcgggtggtgattgacaggatgctggacaggaactgtgacacaggagcctttgagctgatctacaagcagcctgctgtggaggtgccccagtatgtgggcatccggctgctggtggagggcttcaccatcaagaagcccatggccatgtgccacaggaggatgggcgtgcggcctgctgtgcccctgctgacccagaggggcagcggggaggcccggcaccacttccccagcctgcacaccaaggcccagctgcccagcccccacgtgctgcggcaccagggccaggtgctgcggcggcagcacagcaagctggtgggcaccaaggccctgagcaccaccgggaaggccctgcggaccctgcccacagccaaggtgttcatcagcctgccccccaacctggacttcaaggtggcccccagcatcctgaagcccaggaaggccccagccctgctgtgcctgcggggcccccagctggaggtgccctgctgcctgtgccccctgaagtctgagcagttcctggcccctgtgggccgcagccggcccaaggccaacagcaggccagactgtgacaagcccagggctgaggcctgccccatgaagaggctgagccccctgaagcccctgcccctggtgggcaccttccagaggcggcggggcctgggggacatgaagctgggcaagcccctgctgcgcttccccacagccctggtgctggaccccacccccaacaagaagaagcaggtgaagtacctgggcctggacagcattgctgtgggcggcagccgggtggatggagcccggccctgcaccccaggcagcacagcccgggcctag

SEQ ID NO: 29146 - DNA, 2319 bp, Artificial Sequence
  derived and/or modified sequence
atgaaccggctgcggaacgccaagatctacgtggagcgggccgtgaaacaaaagaagattttcaccattcagggttgttaccccgttattcgctgtctacttaggcgccgtggttgggtagagaagaaaatggtgcaccgctcagggcccactctgctacccccacagaaagacttggacagcagtgctatgggagatagtgatacaaccgaggacgaagacgaggatgaagatgaggaatttcagccctcacaactatttgatttcgacgacttactgaagtttgatgatctggatggcacgcacgcactaatggtaggcttgtgcctcaatttgaggaaccttccctggttcgacgaggtggatgctaattccttctttcctcggtgttattgtctgggtgcggaagacgataaaaaggcttttattgaagatttctggttgaccgcagcaaggaacgtgttgaagctggtggtaaaatcggagtggaagtcttaccctatccaggccgtagaggaggaggcttctggcgacaaacagcctaagaagcaggagaaaaacccggtgctggtgtcacctgagtttgtcgacgaagccttatgcgcgtgtgaagaatatttgtcaaatctcgcccacatggatatcgataaagatctcgaggctccactgtatctgacacccgagggttggtctctgtttctccaacggtattaccaggtcgttcacgagggtgcagagcttcggcaccttgacacccaggttcagaggtgcgaagacatattacaacagcttcaggctgttgtaccccagatagacatggaaggcgaccgtaatatctggatcgttaagccaggggccaagtcgaggggccgcgggattatgtgcatggaccacctggaagaaatgctaaaattggtgaatggtaaccctgtcgtgatgaaagatgggaaatgggtggtacagaagtacattgagcggcccctcttgattttcggaaccaagtttgacttgaggcaatggtttcttgtgacagattggaaccccttaacagtctggttctaccgcgacagctacatccgattcagcacacagcccttctcactgaaaaacctggacaatagtgtgcacctgtgtaacaacagcatccagaaacatcttgaaaattcatgtcaccgccatcccctgcttccacccgataacatgtggtcctcccagcggtttcaggcacacctgcaagagatgggagcccccaatgcttggtccacaattattgtacccggtatgaaagatgcggtcatccacgcactccagaccagccaagacactgtgcagtgccggaaggcctcttttgagttgtatggggcggacttcgtgttcggggaagatttccagccatggctgattgaaattaacgcaagccccacaatggcacctagcaccgcagtgaccgctagactgtgcgccggcgtgcaagcagacacactccgagtcgttatcgatagaatgcttgatcgcaattgtgacacaggagctttcgagctgatctacaagcagcctgccgttgaagtgcctcagtacgtggggatccggcttctagtcgagggcttcacaattaaaaaacccatggccatgtgccacagacgaatgggggtacggcccgcagtccccctcctaacccagcgtgggtcaggtgaggcgcggcatcatttcccgtctctgcacactaaggctcagttgccatcccctcacgtgctacgccatcagggacaggttttgaggagacagcatagcaaactcgtgggtacaaaggccctgagcaccacagggaaagcactgcggacactgccaacggctaaggtttttatttctctgcctcccaacttggactttaaggtcgcccccagtatcttgaaacctagaaaggcacccgccctgctgtgtctccgcgggccccaactggaagtgccctgttgcctctgccccctgaagtcggagcagtttctggcacccgtggggagatctcgtcctaaagccaacagccgcccagactgcgataagccaagagcagaagcttgccccatgaagcgactctcccctttaaagccactgccgctggtgggaactttccagcgcaggagagggcttggcgatatgaaattgggtaagccgcttctgaggtttcctaccgcacttgtccttgatcccacccctaataagaagaaacaagtgaagtatctcggtctggacagcatcgctgtgggcggttccagggtggatggcgccagaccctgtacccctggaagtactgccagggcgtag

SEQ ID NO: 29147 - DNA, 2319 bp, Artificial Sequence
  derived and/or modified sequence
atgaatcgacttaggaatgcaaagatctatgtcgaacgggcagtgaaacagaagaaaattttcactattcagggctgttatcccgtgattcgatgcttgttgagacgccgtggatgggttgaaaagaaaatggtacaccgctcaggacctactctcctccctccacagaaggatctggacagctccgccatgggagactccgacaccactgaggatgaagatgaggatgaggatgaagagttccagccctcacagcttttcgatttcgacgatctactgaagtttgatgacttggatggaacccatgccctgatggtggggctttgtctcaatctccgaaaccttccatggttcgatgaagtcgatgctaactctttttttcccaggtgttattgtttgggggctgaggatgataaaaaggcatttatagaagacttttggctaacagccgctcgcaacgtgctgaaactggtggttaagagcgaatggaagagttatccaattcaggccgtggaagaggaggcaagcggcgataagcaaccaaaaaagcaggaaaaaaacccagtgttagtttctcccgaattcgtcgacgaggctctgtgtgcatgtgaggagtatttaagtaatctggcccatatggacatcgataaggatctcgaggctccgctttatttgactccagagggctggtctctcttcctgcagcgctattaccaggtggtgcatgagggcgctgaactgaggcatctggatactcaggtacagcgctgcgaggatatcctccagcaactgcaagccgtggtgccccagattgatatggagggggaccgcaatatatggatagtgaagcctggagccaagtccagagggagaggcatcatgtgcatggatcacctggaagagatgcttaagcttgtgaatgggaatcctgtcgtgatgaaggacgggaagtgggttgtccagaaatacatagagagaccgctgctgatctttgggacaaagttcgacctgcggcaatggtttctggtgaccgattggaaccccctaactgtgtggttttacagagatagctacattaggttctccactcaaccatttagcctaaagaatctggataactccgtgcacctgtgcaataactctatccagaagcacctcgaaaattcctgtcatcggcatcccttgcttccacctgataatatgtggtcgagccagagattccaggcgcatttacaggaaatgggagcaccaaacgcatggtccaccatcatcgtgcctggcatgaaggatgcagtgatccatgccctgcagacatcgcaagatacagtccagtgcagaaaagcgtccttcgaactttacggggctgactttgtgttcggggaggatttccagccttggctgattgagatcaatgcttccccgacaatggctccctctacggccgttaccgctcggttgtgcgccggagttcaggcggacacactgagggtagtgatagacaggatgttggaccgcaactgtgatacaggggctttcgaattgatttataagcaaccggcagtggaagtaccccagtacgtgggcatccggcttctcgtcgagggctttaccatcaagaaacctatggcaatgtgtcacagacgaatgggagtgcgccctgctgtccccctcctcacccagagggggtcgggcgaagccagacatcactttcctagtcttcataccaaggcgcagcttccttcgccccacgtgcttagacaccaaggccaggtgttgcggagacaacattccaaactagttggaacgaaggcactaagcactactggcaaggctctgcgcacactgccaaccgcaaaggtgttcatctcattgccccctaacttagacttcaaggtcgccccaagcatcttgaagcccagaaaagcgccagccctgctttgcctgagaggccctcagcttgaggtcccatgttgtctgtgtcctttgaaaagcgaacaatttctagctcccgtggggagaagccggcctaaagcaaattctagaccggactgtgacaagcccagagccgaggcgtgtcctatgaagagactgtcacccttaaaacccctccctctggttggaacctttcagaggagacgcggactcggagacatgaagctcgggaaaccactccttcgatttcccacagcacttgtgctcgacccgacacccaataaaaagaagcaggtgaaatacctggggttggatagcatagcagtggggggatcccgcgtggatggagctcgaccttgcacgccagggtctacagccagagcctag

SEQ ID NO: 29148 - DNA, 3399 bp, Artificial Sequence
  derived and/or modified sequence
cagtccgaggagggtcacgcaggcggcagatgccaggcgggcagccccgcccctgcgcgccgcctcagcggcgccttcaagacgctggtcccaggcacccacgcccagggcgcctcggatacccaccccctcggccccccgcacaccccggtcctcgacccctctccgcaggatggtttcccggtcctctggcgaggatcctccaaggcgtctcacatgaaccggctcagaaacgccaaaatctacgtggagagagctgtcaagcagaagaagatctttacaatccaaggctgctacccggtgatccggtgtctcttgcgccggaggggctgggtggagaagaagatggtccatcgctcaggccccaccctgctgccaccccagaaggatctggatagctcagcgatgggtgacagtgacaccactgaggatgaggatgaagatgaggacgaggagttccagccatcacagctgttcgacttcgatgatttactgaaatttgatgacctagatggaacacatgctctgatggtgggtctatgtctcaatctccggaatttgccgtggtttgatgaggttgatgccaactccttcttcccacgctgctactgcctgggggctgaggatgacaaaaaagccttcatagaggacttctggctgactgctgcccgcaacgttctcaagctggtggtgaagtctgagtggaagtcataccctattcaggcagtagaggaagaggcctcaggagacaagcagcccaagaaacaggagaaaaacccagtgttggtgtccccagagtttgtggatgaagctctgtgtgcgtgcgaggagtaccttagcaacttggcccacatggacatcgacaaggacctggaggccccgctgtacctcacccccgagggctggtccctcttcctccagcgctactaccaagtggtccacgaaggggcagaactcaggcacctcgacactcaggtccagcgctgtgaggacatcctgcagcagctgcaggccgtggtaccccagatagacatggaaggggatcgcaacatctggatcgtgaagccaggagccaagtcccgcggacgaggcatcatgtgcatggaccacctggaggagatgctgaagctggtgaacggcaaccccgtggtgatgaaggacggcaagtgggtggtgcagaagtatattgagcggcccctcctcatctttggcaccaagtttgacctcagacagtggttcctggtaactgactggaacccacttaccgtgtggttctaccgcgacagctatatccgcttttccacgcagcccttctccctgaagaacctggacaactcagtgcacctgtgcaacaactccatccagaagcacctggagaactcatgccatcggcatccactgcttccgccagacaacatgtggtctagccagaggttccaggcccacctgcaggagatgggtgccccaaatgcttggtccaccatcatcgtgcctggcatgaaggatgctgtgatccacgcacttcagacctcccaggacaccgtgcagtgtcggaaggccagctttgagctctatggcgctgacttcgtgttcggggaggacttccagccctggctgattgagatcaacgccagccccacgatggcaccctccacagcagtcactgcccggctctgtgctggcgtgcaagctgacaccctgcgcgtggtcattgaccggatgctggaccgcaactgtgacacaggagcctttgagctcatctataagcagcctgctgtggaggtgcctcaatatgtgggcatccggctcctggtagagggcttcaccatcaagaagcccatggcgatgtgtcatcggcggatgggggtccgcccagcagtccctctgctgacccagcgaggctctggggaagcccgtcaccacttccccagcctccacaccaaggcccagctgccttctccccatgtactccgacaccagggccaggtcctcagacgacagcacagcaagctggtgggcactaaggccctgtcgaccacaggcaaggccttgaggactctacccacggctaaggtcttcatttccctcccaccgaaccttgatttcaaggtggcacccagcatcctgaagccaagaaaggctcctgctctcctgtgcctccgaggcccccagctggaagtgccttgttgcctctgccctttgaagtcggaacaattcctagcacctgtcggaaggtcaaggccaaaggcaaattcaaggccagactgtgacaaacccagggctgaggcctgccccatgaagaggctgagccccctgaaacccctgccccttgttggtacattccagaggcgcaggggcctgggggatatgaagctagggaagcccctgcttcgattccccactgcccttgtcctggatccaacaccaaataaaaagaaacaagtgaagtatttggggcttgactccattgctgttggagggtcaagagtggatggggcgaggccgtgtaccccagggtccacagcaagagcctgaggccatcagcagctcctccgtgcagcgaggcccagaattcccacctaaggacagacatggggcttcctatttagggactcccccagcatctccgatccaggggtggggagcgtgagccttcactttacagatgaagaaactgagtctgaaagaggaggcatggcttacccaagatcacgtggcagtgagtcgacgcagggacatattgccagaactgccgagcactgggagccccccaaccccagagaacaagccaagctagcagaatgacacctaccgggcataggaacgttaatgccatgagacaggggaaggaattggccttgcctaaacctcagcccttctgcagagggcatgggtctatcccttcttcagcaaggggccaaggtcacctaaaaatgaaacatccaataagccacacccacctgaagaaaagtgtggcactgcttagttgtagtgggttgaactgtggtcccctgaaaagagatgtctacttggaccctgtgaatgtgaccttatgtgggaaaagagtctttgtagctgggtatggtggctcacacctgttatcccagcactttgagaggccaaggcaggagatcgcttgagcccgcaagttcaagaccagtctgggcaacatggtgaaaccgtttctacagaaaattagctgggtgtggtggcacacacctgtagtcctagctactcgggaggcctaggtgggaggattacctgagcctgggaagatcaaaactgtggtgagctgtgatcacgccactgcgctctgagcctgggagacagagtgaaaccctaaatcaaaaaaaaaaaaaaaggtctttgcagatgtaaataaatttaagatcttaaatg

SEQ ID NO: 29149 - DNA, 2319 bp, Artificial Sequence
  derived and/or modified sequence
atgaacagactgagaaacgccaagatctacgtggagagagccgtgaagcagaagaagatcttcaccatccagggctgctaccccgtgatcagatgcctgctgagaagaagaggctgggtggagaagaagatggtgcacagaagcggccccaccctgctgcccccccagaaggacctggacagcagcgccatgggcgacagcgacaccaccgaggacgaggacgaggacgaggacgaggagttccagcccagccagctgttcgacttcgacgacctgctgaagttcgacgacctggacggcacccacgccctgatggtgggcctgtgcctgaacctgagaaacctgccctggttcgacgaggtggacgccaacagcttcttccccagatgctactgcctgggcgccgaggacgacaagaaggccttcatcgaggacttctggctgaccgccgccagaaacgtgctgaagctggtggtgaagagcgagtggaagagctaccccatccaggccgtggaggaggaggccagcggcgacaagcagcccaagaagcaggagaagaaccccgtgctggtgagccccgagttcgtggacgaggccctgtgcgcctgcgaggagtacctgagcaacctggcccacatggacatcgacaaggacctggaggcccccctgtacctgacccccgagggctggagcctgttcctgcagagatactaccaggtggtgcacgagggcgccgagctgagacacctggacacccaggtgcagagatgcgaggacatcctgcagcagctgcaggccgtggtgccccagatcgacatggagggcgacagaaacatctggatcgtgaagcccggcgccaagagcagaggcagaggcatcatgtgcatggaccacctggaggagatgctgaagctggtgaacggcaaccccgtggtgatgaaggacggcaagtgggtggtgcagaagtacatcgagagacccctgctgatcttcggcaccaagttcgacctgagacagtggttcctggtgaccgactggaaccccctgaccgtgtggttctacagagacagctacatcagattcagcacccagcccttcagcctgaagaacctggacaacagcgtgcacctgtgcaacaacagcatccagaagcacctggagaacagctgccacagacaccccctgctgccccccgacaacatgtggagcagccagagattccaggcccacctgcaggagatgggcgcccccaacgcctggagcaccatcatcgtgcccggcatgaaggacgccgtgatccacgccctgcagaccagccaggacaccgtgcagtgcagaaaggccagcttcgagctgtacggcgccgacttcgtgttcggcgaggacttccagccctggctgatcgagatcaacgccagccccaccatggcccccagcaccgccgtgaccgccagactgtgcgccggcgtgcaggccgacaccctgagagtggtgatcgacagaatgctggacagaaactgcgacaccggcgccttcgagctgatctacaagcagcccgccgtggaggtgccccagtacgtgggcatcagactgctggtggagggcttcaccatcaagaagcccatggccatgtgccacagaagaatgggcgtgagacccgccgtgcccctgctgacccagagaggcagcggcgaggccagacaccacttccccagcctgcacaccaaggcccagctgcccagcccccacgtgctgagacaccagggccaggtgctgagaagacagcacagcaagctggtgggcaccaaggccctgagcaccaccggcaaggccctgagaaccctgcccaccgccaaggtgttcatcagcctgccccccaacctggacttcaaggtggcccccagcatcctgaagcccagaaaggcccccgccctgctgtgcctgagaggcccccagctggaggtgccctgctgcctgtgccccctgaagagcgagcagttcctggcccccgtgggcagaagcagacccaaggccaacagcagacccgactgcgacaagcccagagccgaggcctgccccatgaagagactgagccccctgaagcccctgcccctggtgggcaccttccagagaagaagaggcctgggcgacatgaagctgggcaagcccctgctgagattccccaccgccctggtgctggaccccacccccaacaagaagaagcaggtgaagtacctgggcctggacagcatcgccgtgggcggcagcagagtggacggcgccagaccctgcacccccggcagcaccgccagagcctag

SEQ ID NO: 29150 - protein, 437 aa, Artificial Sequence
  derived and/or modified sequence
MALRAKAEVCMAVPWLSLQRAQALGTRAARVPRTVLPFEAMPRRPGNRWLRLLQIWREQGYEDLHLEVHQTFQELGPIFRYDLGGAGMVCVMLPEDVEKLQQVDSLHPHRMSLEPWVAYRQHRGHKCGVFLLNGPEWRFNRLRLNPEVLSPNAVQRFLPMVDAVARDFSQALKKKVLQNARGSLTLDVQPSIFHYTIEASNLALFGERLGLVGHSPSSASLNFLHALEVMFKSTVQLMFMPRSLSRWTSPKVWKEHFEAWDCIFQYGDNCIQKIYQELAFSRPQQYTSIVAELLLNAELSPDAIKANSMELTAGSVDTTVFPLLMTLFELARNPNVQQALRQESLAAAASISEHPQKATTELPLLRAALKETLRLYPVGLFLERVASSDLVLQNYHIPAGVLKHLQVETLTQEDIKMVYSFILRPSMFPLLTFRAIN

SEQ ID NO: 29151 - DNA, 1314 bp, Artificial Sequence
  derived and/or modified sequence
atggccctaagagcaaaagctgaggtctgtatggctgttccatggctttcccttcagcgcgcacaagcccttggcactcgcgcagccagggtccctcgtactgtcctgcctttcgaggccatgccgcgaagaccgggcaacaggtggcttcgcctgttacagatttggcgcgaacagggttatgaggacttgcacctcgaggtacaccagacgtttcaggaacttggccccattttccgctacgatctcggaggagcaggcatggtctgtgtgatgttgcctgaggatgtggagaagttgcagcaagtggattctctgcacccgcataggatgagtttggaaccatgggttgcctataggcagcaccgaggccacaagtgtggagtatttctgttaaacgggcctgagtggagatttaacagactgcgcctgaaccctgaggttctgtctcctaacgccgtgcaacggttcctgccaatggtggatgccgtcgctagagacttctctcaggccttgaaaaagaaggtgttgcagaatgcaagaggctctctgaccctggacgtgcagccatccatattccattacaccatcgaagcttccaacctcgcgcttttcggtgaacgccttggcttggttggccactcaccctcgagcgcgagcctcaattttctgcatgctttagaggtcatgttcaagagtaccgtacaactcatgtttatgcccagaagtctgtccaggtggacaagcccaaaggtttggaaggaacatttcgaagcttgggattgtatctttcaatatggtgataactgtatccagaagatttatcaggagttggcttttagccgccctcagcagtacacatccatcgttgcggaactcctgctgaacgctgaattgtcaccggacgccatcaaagccaattcaatggaactcacagccggaagcgtggataccacagtctttccactattgatgaccctgttcgaactggcaagaaaccctaatgtgcaacaagcccttaggcaggagagcttggccgccgcagcttctatttccgagcacccgcagaaggcgactacagagttgccactcctcagggcagccctgaaagagacactgaggctgtatccagtgggtctgttccttgagcgcgttgctagctccgaccttgttctccagaactaccacattcccgccggagttctgaaacatctgcaagtagaaactctcacacaggaggatatcaaaatggtttactccttcatccttagaccttccatgttcccgttgctcacattccgagctatcaactag

SEQ ID NO: 29152 - DNA, 1314 bp, Artificial Sequence
  derived and/or modified sequence
atggccctgcgggccaaggccgaggtgtgcatggctgtgccctggctgagcctgcagagggcccaggccctgggcacccgggccgcccgggtgcccaggacagtgctgccctttgaggccatgcccaggaggcctggcaaccgctggctgcggctgctgcagatctggagggagcagggctatgaggacctgcacctggaggtgcaccagaccttccaggagctgggccccatcttccgctatgacctgggcggggccggcatggtgtgtgtgatgctgcctgaagatgtggagaagctgcagcaggtggacagcctgcacccccacaggatgagcctggagccctgggtggcctaccggcagcaccggggccacaagtgtggggtcttcctgctgaatggacctgagtggaggttcaaccggctgcggctgaaccctgaggtgctgagccccaatgctgtgcagcgcttcctgcccatggtggatgctgtggcccgggacttcagccaggccctgaagaagaaggtgctgcagaatgcccggggcagcctgaccctggatgtgcagcccagcatcttccactacaccatcgaggccagcaacctggccctgtttggagagcggctgggcctggtgggccacagccccagcagcgccagcctgaacttcctgcacgccctggaggtgatgttcaagagcacagtgcagctgatgttcatgcccaggagcctgagccgctggaccagccccaaggtgtggaaggagcactttgaggcctgggactgcatcttccagtacggggacaactgcatccagaagatctaccaggagctggccttcagccggccccagcagtacaccagcatcgtggccgagctgctgctgaatgctgagctgagcccagatgccatcaaggccaacagcatggagctgacagctggctctgtggacaccaccgtcttccccctgctgatgaccctgtttgagctggccaggaaccccaacgtgcagcaggccctgcggcaggagagcctggccgccgccgccagcatcagcgagcacccccagaaggccaccacagagctgcccctgctgcgggccgccctgaaggagaccctgcggctgtaccctgtgggcctcttcctggagcgggtggccagcagtgacctggtgctgcagaactaccacatcccagctggggtgctgaagcacctgcaggtggagaccctgacccaggaggacatcaagatggtgtacagcttcatcctgcggcccagcatgttccccctgctgaccttccgggccatcaactag

SEQ ID NO: 29153 - DNA, 1314 bp, Artificial Sequence
  derived and/or modified sequence
atggccctgcgggccaaggccgaggtgtgcatggccgtgccctggctgtcactgcaacgagcacaagccctcggtacgagagcagcgagagtgcctcgcacagtgctccccttcgaagccatgccaaggagacccgggaaccgctggctgcgcctgctccaaatttggcgggaacaggggtacgaagacctacatctcgaggtgcaccagacatttcaagaacttggacccatttttcgttacgatctgggaggcgctggcatggtctgtgtcatgcttcctgaagatgtggagaagttacaacaggttgacagcctgcaccctcatcggatgagccttgagccatgggttgcttatagacagcaccgcggccacaagtgcggagtctttctcctcaacggccctgaatggcgattcaatagactgagacttaacccggaagtgctctcccctaatgccgtccagcggtttctacctatggtagacgccgtagcaagagattttagccaggcgctgaagaagaaggtgcttcagaatgcgcggggaagccttactctggacgtccaaccaagtatcttccactacacgattgaggctagcaacttagccctctttggcgaacggttaggcctagtcggccacagccccagctcagcgagcctaaatttcctgcacgccctggaggtcatgttcaagagcacagttcagcttatgttcatgccccgttccctttctcggtggacatccccgaaggtctggaaggaacacttcgaagcatgggactgcattttccagtatggcgacaattgcattcagaagatctatcaggagctggcctttagtcggccccagcagtacacgagtattgtggccgagctgttgctgaatgctgaactgtcacctgatgccatcaaagcgaactctatggaattgactgccggtagcgtggatacaaccgtttttccactgctgatgaccctcttcgagcttgcccggaaccccaatgtgcaacaggctttgcggcaagagtccttggccgcagccgccagcatcagcgagcacccacagaaggccacaactgagctccccctgcttcgagcagcgctgaaagagactctcagactatatcctgttggcttatttttagagcgggttgcctccagtgacctggtgctacagaattatcacattcctgcaggcgtgctcaagcacctgcaggtggaaacactcacgcaagaagacatcaagatggtgtatagctttatccttagaccatcaatgttccccctgctgacttttcgagcaatcaactag

SEQ ID NO: 29154 - DNA, 1314 bp, Artificial Sequence
  derived and/or modified sequence
atggccctgcgcgctaaggccgaggtatgtatggcagttccctggttgagcctgcagcgagctcaggccctcgggaccagagccgcacgggtaccgaggaccgtgctgccttttgaggccatgccccgtaggccaggcaatcgatggctgcgattgttgcaaatctggcgcgagcagggttacgaagatttgcacctcgaggtgcaccagacgtttcaggaactgggtccgatttttaggtacgacctaggtggagccggtatggtttgcgtgatgctgcctgaagacgtcgagaaactccagcaggtggactccttgcacccacacaggatgagtctggagccctgggtcgcgtacaggcagcacagaggacacaaatgcggcgtgttcttgctcaatggtcccgagtggcgctttaataggctccggttgaaccctgaagtactctcgccaaacgcggtgcaacggttccttccaatggtcgacgcggtggcccgagacttctcccaggcactcaaaaaaaaggtgcttcagaacgctagggggtcactgactcttgatgtgcaaccctctatcttccactataccatcgaggcctctaacctggccttgttcggggaacgcttgggtctcgtgggccacagccccagctcggcctctttgaactttctgcacgcccttgaggtgatgtttaagagcactgtgcagctgatgtttatgcccaggagtttgtccaggtggaccagccctaaagtgtggaaggagcattttgaagcttgggactgcatcttccaatatggcgataactgtatccagaagatttaccaggagttagccttttcacgcccacaacaatacacctccatcgtcgcggaactgctgctgaacgcagagctctcgccggatgccatcaaagcaaacagcatggaactcaccgcaggatcagttgataccaccgtcttccccctcttgatgacactgtttgagttggccaggaatcccaacgtccaacaggccctgcgccaggaaagtctggccgcagctgcctctatttccgaacacccccaaaaagccacaaccgaattacctctccttagagcagccttaaaagagaccctcagattgtacccagtcggtctcttcttggagcgcgtggcttcctctgatctggtcttgcagaattatcatatccccgctggcgttctcaaacatctccaggtggagaccctgacgcaggaagatattaagatggtgtactcgtttatcctgcggccatctatgtttcctttgctgacatttagagctatcaactag

SEQ ID NO: 29155 - DNA, 1874 bp, Artificial Sequence
  derived and/or modified sequence
ggagcattggaatggcactcagggcaaaggcagaggtgtgcatggcagtgccctggctgtccctgcaaagggcacaggcactgggcacgagagccgcccgggtccccaggacagtgctgccctttgaagccatgccccggcgtccaggcaacaggtggctgaggctgctgcagatctggagggagcagggttatgaggacctgcacctggaagtacaccagaccttccaggaactagggcccattttcaggtacgacttgggaggagcaggcatggtgtgtgtgatgctgccggaggacgtggagaagctgcaacaggtggacagcctgcatccccacaggatgagcctggagccctgggtggcctacagacaacatcgtgggcacaaatgtggcgtgttcttgctgaatgggcctgaatggcgcttcaaccgattgcggctgaatccagaagtgctgtcgcccaacgctgtgcagaggttcctcccgatggtggatgcagtggccagggacttctcccaggccctgaagaagaaggtgctgcagaacgcccgggggagcctgaccctggacgtccagcccagcatcttccactacaccatagaagccagcaacttggctctttttggagagcggctgggcctggttggccacagccccagttctgccagcctgaacttcctccatgccctggaggtcatgttcaaatccaccgtccagctcatgttcatgcccaggagcctgtctcgctggaccagccccaaggtgtggaaggagcactttgaggcctgggactgcatcttccagtacggcgacaactgtatccagaaaatctatcaggaactggccttcagccgccctcaacagtacaccagcatcgtggcggagctcctgttgaatgcggaactgtcgccagatgccatcaaggccaactctatggaactcactgcagggagcgtggacacgacggtgtttcccttgctgatgacgctctttgagctggctcggaaccccaacgtgcagcaggccctgcgccaggagagcctggccgccgcagccagcatcagtgaacatccccagaaggcaaccaccgagctgcccttgctgcgtgcggccctcaaggagaccttgcggctctaccctgtgggtctgtttctggagcgagtggcgagctcagacttggtgcttcagaactaccacatcccagctggggtgctgaaacacctccaggtggagacactaacccaagaggacataaagatggtctacagcttcatattgaggcccagcatgttccccctcctcaccttcagagccatcaactaatcacgtctctgcacccagggtcccagcctggccaccagcctccctttctgcctgaccccaggccacccctcttctctcccacatgcacagcttcctgagtcacccctctgtctaaccagccccagcacaaatggaactcccgagggcctctaggaccagggtttgccaggctaagcagcaatgccagggcacagctggggaagatcttgctgaccttgtccccagccccacctggccctttctccagcaagcactgtcctctgggcagtttgcccccatccctcccagtgctggctccaggctcctcgtgtggccatacaagggtgctgtggttttgtcccttgccttcctgcctagtctcacatgtccctgttcctcttcccctggccagggcccctgcgcagactgtcagagtcattaagcgggatcccagcatctcagagtccagtcaagttccctcctgcagcctgacccctaggcagctcgagcatgccctgagctctctgaaagttgtcaccctggaatagggtcctgcagggtagaataaaa

SEQ ID NO: 29156 - DNA, 1314 bp, Artificial Sequence
  derived and/or modified sequence
atggccctgagagccaaggccgaggtgtgcatggccgtgccctggctgagcctgcagagagcccaggccctgggcaccagagccgccagagtgcccagaaccgtgctgcccttcgaggccatgcccagaagacccggcaacagatggctgagactgctgcagatctggagagagcagggctacgaggacctgcacctggaggtgcaccagaccttccaggagctgggccccatcttcagatacgacctgggcggcgccggcatggtgtgcgtgatgctgcccgaggacgtggagaagctgcagcaggtggacagcctgcacccccacagaatgagcctggagccctgggtggcctacagacagcacagaggccacaagtgcggcgtgttcctgctgaacggccccgagtggagattcaacagactgagactgaaccccgaggtgctgagccccaacgccgtgcagagattcctgcccatggtggacgccgtggccagagacttcagccaggccctgaagaagaaggtgctgcagaacgccagaggcagcctgaccctggacgtgcagcccagcatcttccactacaccatcgaggccagcaacctggccctgttcggcgagagactgggcctggtgggccacagccccagcagcgccagcctgaacttcctgcacgccctggaggtgatgttcaagagcaccgtgcagctgatgttcatgcccagaagcctgagcagatggaccagccccaaggtgtggaaggagcacttcgaggcctgggactgcatcttccagtacggcgacaactgcatccagaagatctaccaggagctggccttcagcagaccccagcagtacaccagcatcgtggccgagctgctgctgaacgccgagctgagccccgacgccatcaaggccaacagcatggagctgaccgccggcagcgtggacaccaccgtgttccccctgctgatgaccctgttcgagctggccagaaaccccaacgtgcagcaggccctgagacaggagagcctggccgccgccgccagcatcagcgagcacccccagaaggccaccaccgagctgcccctgctgagagccgccctgaaggagaccctgagactgtaccccgtgggcctgttcctggagagagtggccagcagcgacctggtgctgcagaactaccacatccccgccggcgtgctgaagcacctgcaggtggagaccctgacccaggaggacatcaagatggtgtacagcttcatcctgagacccagcatgttccccctgctgaccttcagagccatcaactag

SEQ ID NO: 29157 - protein, 84 aa, Artificial Sequence
  derived and/or modified sequence
MPLAKDLLHPSPEEEKRKHKKKRLVQSPNSYFMDVKCPGCYKITTVFSHAQTVVLCVGCSTVLCQPTGGKARLTEGCSFRRKQH

SEQ ID NO: 29158 - protein, 66 aa, Artificial Sequence
  derived and/or modified sequence
MPLAKDLLHPSPEEEKRKHKKKRLVQSPNSYFMDVKCPGEETACCSGESTGPQQLENVVVLAVSYP

SEQ ID NO: 29159 - protein, 53 aa, Artificial Sequence
  derived and/or modified sequence
MAKKPWKKKYGYGIRPCQRCGHVGPGLIRKYGLNLCRQCFREIAHKLGFKKLD

SEQ ID NO: 29160 - protein, 50 aa, Artificial Sequence
  derived and/or modified sequence
MIVLPRKYGKASRKCSRCGDHSALVRRYGLMLCRQCFRELAPKIGFKKYN

SEQ ID NO: 29161 - protein, 53 aa, Artificial Sequence
  derived and/or modified sequence
MTKEPFKTKYGQGSKVCKRCGRKGPGIIRKYGLDLCRQCFRELAPKLGFKKYD

SEQ ID NO: 29162 - protein, 55 aa, Artificial Sequence
  derived and/or modified sequence
GHQQLYWSHPRKFGQGSRSCRVCSNRHGLIRKYGLNMCRQCFRQYAKDIGFIKLD

SEQ ID NO: 29163 - protein, 56 aa, Artificial Sequence [sequence omitted]

SEQ ID NO: 29164 - DNA, 171 bp, Artificial Sequence
  derived and/or modified sequence
atgggacatcaacagctgtactggtcccatccgcgcaagttcgggcaaggaagccgctcatgccgcgtctgctcaaaccgccatggactgattagaaaatacggattgaatatgtgccgacagtgtttccgccagtatgccaaagatattggatttatcaagttggactag

SEQ ID NO: 29165 - DNA, 171 bp, Artificial Sequence
  derived and/or modified sequence
atgggccaccagcagctgtactggagccaccccaggaagtttggccagggcagccgcagctgccgggtgtgcagcaacagacatggcctcatcagaaaatatggcctgaacatgtgccggcagtgcttccggcagtatgccaaggacatcggcttcatcaagctggactag

SEQ ID NO: 29166 - DNA, 171 bp, Artificial Sequence
  derived and/or modified sequence
atgggccaccagcagctgtactggagccacccccggaagttcggccaggggagtcggagctgtcgagtgtgttcaaatagacacggtttgataaggaaatacgggctgaatatgtgcagacaatgcttcaggcagtatgctaaagacatcggatttataaaacttgactag

SEQ ID NO: 29167 - DNA, 171 bp, Artificial Sequence
  derived and/or modified sequence
atgggccaccagcagctatactggagccaccctcggaaattcgggcagggatcccgctcttgtcgcgtgtgtagcaaccgacacgggctcatcaggaaatacggactgaatatgtgtaggcagtgtttcagacaatacgctaaggatatcggattcattaagctcgattag

SEQ ID NO: 29168 - DNA, 296 bp, Artificial Sequence
  derived and/or modified sequence
cttttacctcgttgcactgctgagagcaagatgggtcaccagcagctgtactggagccacccgcgaaaattcggccagggttctcgctcttgtcgtgtctgttcaaaccggcacggtctgatccggaaatatggcctcaatatgtgccgccagtgtttccgtcagtacgcgaaggatatcggtttcattaagttggactaaatgctcttccttcagaggattatccggggcatctactcaatgaaaaaccatgataattctttgtatataaaataaacatttgaaaaaacccttca

SEQ ID NO: 29169 - DNA, 171 bp, Artificial Sequence
  derived and/or modified sequence
atgggccaccagcagctgtactggagccaccccagaaagttcggccagggcagcagaagctgcagagtgtgcagcaacagacacggcctgatcagaaagtacggcctgaacatgtgcagacagtgcttcagacagtacgccaaggacatcggcttcatcaagctggactag

SEQ ID NO: 29170 - protein, 792 aa, Artificial Sequence
  derived and/or modified sequence
MHVIKRDGRQERVMFDKITSRIQKLCYGLNMDFVDPAQITMKVIQGLYSGVTTVELDTLAAETAATLTTKHPDYAILAARIAVSNLHKETKKVFSDVMEDLYNYINPHNGKHSPMVAKSTLDIVLANKDRLNSAIIYDRDFSYNYFGFKTLERSYLLKINGKVAERPQHMLMRVSVGIHKEDIDAAIETYNLLSERWFTHASPTLFNAGTNRPQLSSCFLLSMKDDSIEGIYDTLKQCALISKSAGGIGVAVSCIRATGSYIAGTNGNSNGLVPMLRVYNNTARYVDQGGNKRPGAFAIYLEPWHLDIFEFLDLKKNTGKEEQRARDLFFALWIPDLFMKRVETNQDWSLMCPNECPGLDEVWGEEFEKLYASYEKQGRVRKVVKAQQLWYAIIESQTETGTPYMLYKDSCNRKSNQQNLGTIKCSNLCTEIVEYTSKDEVAVCNLASLALNMYVTSEHTYDFKKLAEVTKVVVRNLNKIIDINYYPVPEACLSNKRHRPIGIGVQGLADAFILMRYPFESAEAQLLNKQIFETIYYGALEASCDLAKEQGPYETYEGSPVSKGILQYDMWNVTPTDLWDWKVLKEKIAKYGIRNSLLIAPMPTASTAQILGNNESIEPYTSNIYTRRVLSGEFQIVNPHLLKDLTERGLWHEEMKNQIIACNGSIQSIPEIPDDLKQLYKTVWEISQKTVLKMAAERGAFIDQSQSLNIHIAEPNYGKLTSMHFYGWKQGLKTGMYYLRTRPAANPIQFTLNKEKLKDKEKVSKEEEEKERNTAAMVCSLENRDECLMCGS

SEQ ID NO: 29171 - protein, 695 aa, Artificial Sequence
  derived and/or modified sequence
MEDLYNYINPHNGKHSPMVAKSTLDIVLANKDRLNSAIIYDRDFSYNYFGFKTLERSYLLKINGKVAERPQHMLMRVSVGIHKEDIDAAIETYNLLSERWFTHASPTLFNAGTNRPQLSSCFLLSMKDDSIEGIYDTLKQCALISKSAGGIGVAVSCIRATGSYIAGTNGNSNGLVPMLRVYNNTARYVDQGGNKRPGAFAIYLEPWHLDIFEFLDLKKNTGKEEQRARDLFFALWIPDLFMKRVETNQDWSLMCPNECPGLDEVWGEEFEKLYASYEKQGRVRKVVKAQQLWYAIIESQTETGTPYMLYKDSCNRKSNQQNLGTIKCSNLCTEIVEYTSKDEVAVCNLASLALNMYVTSEHTYDFKKLAEVTKVVVRNLNKIIDINYYPVPEACLSNKRHRPIGIGVQGLADAFILMRYPFESAEAQLLNKQIFETIYYGALEASCDLAKEQGPYETYEGSPVSKGILQYDMWNVTPTDLWDWKVLKEKIAKYGIRNSLLIAPMPTASTAQILGNNESIEPYTSNIYTRRVLSGEFQIVNPHLLKDLTERGLWHEEMKNQIIACNGSIQSIPEIPDDLKQLYKTVWEISQKTVLKMAAERGAFIDQSQSLNIHIAEPNYGKLTSMHFYGWKQGLKTGMYYLRTRPAANPIQFTLNKEKLKDKEKVSKEEEEKERNTAAMVCSLENRDECLMCGS

SEQ ID NO: 29172 - protein, 454 aa, Artificial Sequence
  derived and/or modified sequence
MKRVETNQDWSLMCPNECPGLDEVWGEEFEKLYASYEKQGRVRKVVKAQQLWYAIIESQTETGTPYMLYKDSCNRKSNQQNLGTIKCSNLCTEIVEYTSKDEVAVCNLASLALNMYVTSEHTYDFKKLAEVTKVVVRNLNKIIDINYYPVPEACLSNKRHRPIGIGVQGLADAFILMRYPFESAEAQLLNKQIFETIYYGALEASCDLAKEQGPYETYEGSPVSKGILQYDMWNVTPTDLWDWKVLKEKIAKYGIRNSLLIAPMPTASTAQILGNNESIEPYTSNIYTRRVLSGEFQIVNPHLLKDLTERGLWHEEMKNQIIACNGSIQSIPEIPDDLKQLYKTVWEISQKTVLKMAAERGAFIDQSQSLNIHIAEPNYGKLTSMHFYGWKQGLKTGMYYLRTRPAANPIQFTLNKEKLKDKEKVSKEEEEKERNTAAMVCSLENRDECLMCGS

SEQ ID NO: 29173 - DNA, 2379 bp, Artificial Sequence
  derived and/or modified sequence
atgcatgtcatcaaaagagatgggagacaggagcgtgtcatgtttgacaagattaccagtagaatacagaaactgtgttacggccttaatatggactttgtggaccctgcccaaattaccatgaaagtgattcagggactgtactccggagtgacgaccgtggagctggacacactggccgcagagacagcggctacactgaccactaaacaccctgactacgctattctggccgctcgaatagcggtgagtaacctacacaaagaaaccaagaaggttttctctgatgtgatggaggatctctacaattatattaacccacacaatggaaagcacagtccaatggtagccaagagcactctcgacatcgttctagcaaataaggacaggctcaattctgctatcatctacgacagagatttttcatataactattttggctttaagacgctggaacgctcctatctcctcaaaatcaatggtaaggtggcggagcgcccccagcatatgctcatgagggtgtctgtggggatccacaaagaggacatagacgcagctatagagacgtacaacctgctgtcagagaggtggttcacccatgcatcgccaactctgtttaacgccggcactaacaggccgcagctttcctcatgctttctgctcagcatgaaggacgattcaattgaaggaatctacgatacccttaagcagtgcgcgctgatctctaagtctgccggcggaattggcgtggcggtgtcctgtattagagccactgggtcatacatcgcaggaacaaatggtaattctaatggcctcgttcctatgctacgggtgtacaataacacagctagatacgtcgatcaagggggcaacaaaagaccaggggcatttgctatctacctggagccgtggcatctcgatatctttgaatttcttgacctgaaaaagaacactggtaaggaggagcaacgtgctcgcgaccttttcttcgccctgtggattccagacttattcatgaaaagggtagaaacaaatcaggactggtccttaatgtgtcctaacgagtgccccggcctggatgaagtctggggggaagagttcgaaaagctctacgcgtcctacgagaaacaagggagggtgaggaaggtagtcaaggcccaacagctttggtacgctataatcgagtcccaaactgaaaccggaacaccgtacatgctgtacaaggactcatgcaaccggaaatccaatcaacagaaccttggcactattaaatgttctaatctgtgcactgagattgtcgaatatacatccaaagatgaagtggccgtgtgtaacctcgcctctctggccctgaatatgtacgtgacttccgagcacacctatgattttaaaaagttagcagaagtcaccaaagtcgttgtgcggaatttgaacaagatcattgacattaactactacccggtgccagaggcgtgcttgtcgaataaaaggcatagacccattggtatcggtgtccaagggctggctgacgcattcattctgatgcgctatccctttgagtctgcggaggctcagctcctgaacaagcagatcttcgagaccatctactatggggctctggaggcgtcttgcgatctggccaaggaacaggggccatatgaaacttacgaaggaagccccgtctcaaagggaattcttcagtatgatatgtggaatgttaccccaacagatctctgggactggaaagtcttaaaagaaaagatcgctaaatacggaatccggaattcactcctgatcgcccctatgcctaccgcctctaccgcccagattctgggaaataatgagagcatcgagccttacacctctaatatttacacccgccgggtcctgtccggtgagtttcagattgtcaacccacacctgctgaaggacctgaccgaaagaggactgtggcacgaggaaatgaaaaatcagatcatcgcctgcaacggcagcattcagtccattcctgagattcccgacgacctcaaacagctttataaaacggtgtgggaaatcagtcagaagacggttctcaagatggccgcagaaaggggcgcattcattgaccagtcacagtcactgaatatccatatcgcggagcctaactacggtaagttgacctcaatgcatttttacggttggaagcagggcttaaagactggcatgtattatctaagaaccaggccagcagccaacccaatccagttcaccctgaataaagagaagttgaaagataaagagaaagtcagcaaggaggaggaagaaaaggagcggaataccgccgccatggtgtgctctctggagaaccgggacgaatgcctaatgtgtggatcttag

SEQ ID NO: 29174 - DNA, 2379 bp, Artificial Sequence
  derived and/or modified sequence
atgcacgtgatcaagagagatggccggcaggagcgggtgatgtttgacaagatcaccagccgcatccagaagctgtgctacggcctgaacatggactttgtggaccctgcccagatcaccatgaaggtgatccagggcctgtacagcggcgtgaccaccgtggagctggacaccctggccgctgagacagctgccaccctgaccaccaagcacccagactatgccatcctggccgccagaattgctgtgagcaacctgcacaaggagaccaagaaggtgttcagtgatgtgatggaggacctgtacaactacatcaacccccacaacgggaagcacagccccatggtggccaagagcaccctggacatcgtgctggccaacaaggaccggctgaacagcgccatcatctatgaccgggacttctcctacaactacttcggcttcaagaccctggagaggagctacctgctgaagatcaacgggaaggtggccgagcggccccagcacatgctgatgagggtgtctgtgggcatccacaaggaggacattgatgctgccatcgagacctacaacctgctgtctgagcgctggttcacccacgccagccccaccctcttcaatgccggcaccaaccggccccagctgagcagctgcttcctgctgtccatgaaggatgacagcattgagggcatctatgacaccctgaagcagtgtgccctgatcagcaagtctgctgggggcatcggcgtggccgtgtcctgcatccgggccaccggcagctacatcgccggcaccaacggcaacagcaatggcctggtgcccatgctgcgggtgtacaacaacacagcccgctacgtggaccagggcggcaacaagaggcctggggcctttgccatctacctggagccctggcacctggacatctttgagttcctggacctgaagaagaacacaggcaaggaggagcagagggcccgggacctcttctttgccctgtggatcccagacctcttcatgaagagggtggagaccaaccaggactggagcctgatgtgccccaatgaatgtcctggcctggatgaggtgtggggcgaggagtttgagaagctgtatgccagctatgagaagcagggccgggtgaggaaggtggtgaaggcccagcagctgtggtacgccatcatcgagagccagacagagaccggcaccccctacatgctgtacaaggacagctgcaacaggaagagcaaccagcagaacctgggcaccatcaagtgcagcaacctgtgcacagagatcgtggagtacaccagcaaggatgaggtggccgtgtgcaacctggccagcctggccctgaacatgtatgtgaccagcgagcacacctatgacttcaagaagctggccgaggtgaccaaggtggtggtgaggaacctgaacaagatcatcgacatcaactactaccctgtgcctgaggcctgcctgagcaacaagaggcaccggcccatcggcattggagtgcagggcctggctgatgccttcatcctgatgagatacccctttgaatctgctgaggcccagctgctgaacaagcagatctttgagaccatctactatggagccctggaggccagctgtgacctggccaaggagcagggcccctatgagacctatgagggcagccctgtgtccaagggcatcctgcagtatgacatgtggaatgtgacccccacagacctgtgggactggaaggtgctgaaggagaagatcgccaagtatggcatccggaacagcctgctgattgcccccatgcccacagccagcacagcccagatcctgggcaacaatgaaagcattgagccctacaccagcaacatctacaccaggagagtgctgtctggagagttccagatcgtgaacccccacctgctgaaggacctgacagagcggggcctgtggcatgaggagatgaagaaccagatcatcgcctgcaatggcagcatccagagcatccctgagatcccagatgacctgaagcagctgtacaagacagtgtgggagatcagccagaagacagtgctgaagatggctgctgagcggggggccttcatcgaccagagccagagcctgaacatccacatcgccgagcccaactacggcaagctgacctccatgcacttctacggctggaagcagggcctgaagacaggcatgtactacctgcggaccaggcctgctgccaaccccatccagttcaccctgaacaaggagaagctgaaggacaaggagaaggtgtccaaggaggaggaggagaaggagaggaacacagctgccatggtgtgcagcctggagaacagagatgagtgcctgatgtgtggcagctag

SEQ ID NO: 29175 - DNA, 2379 bp, Artificial Sequence
  derived and/or modified sequence
atgcacgtgatcaagcgggacggccggcaggagcgggtgatgttcgacaaaattacgagtcgtatccagaaactatgctacggcctcaacatggatttcgttgaccctgcccagattaccatgaaggtaatacagggcctgtatagcggggtgacgactgtggagctggacacacttgccgcagagacagccgccaccctgaccaccaagcatccggattatgctatcctggccgcaaggattgccgtgtccaatcttcacaaagagacaaaaaaagttttttccgacgtcatggaagacctgtacaattatatcaaccctcacaacggaaagcacagtccaatggtggccaagtcaacccttgacatagtactggccaacaaagaccgtctgaacagtgctataatatatgaccgggatttctcctacaactatttcgggttcaagaccctcgaacggagttatttgctgaagatcaacgggaaagtagcagagagaccccagcatatgctcatgagagtcagtgtggggatacacaaggaggacatagacgctgccattgagacgtataatttattgtccgaacgatggtttacacatgcctcaccaacgttgtttaacgccggtactaatagaccccagcttagtagctgcttcttactttcgatgaaagatgactctattgagggcatctacgatactttaaagcaatgcgcactgatctcaaaaagcgccggcggcattggcgttgccgtgtcttgcattcgagcaacagggtcttacattgctggcaccaacggaaattctaatgggttggtaccgatgttgagggtatataacaataccgcgcgctatgttgaccagggcgggaacaaacgacctggagctttcgcgatttatcttgaaccctggcatctcgatatatttgagtttttagacctcaaaaagaatactggcaaagaagaacaacgcgctcgagacctgtttttcgcactctggattcccgatttattcatgaaaagggtggaaactaaccaggattggtcactgatgtgccctaatgagtgtccaggcttggacgaggtctggggcgaggagttcgaaaaattgtacgcatcatacgagaagcaagggcgcgtgcggaaagtcgttaaagcccagcagttgtggtatgcaattatcgagagccagaccgagacgggtaccccgtacatgctgtacaaggatagttgcaataggaagtcaaatcagcaaaatttggggaccatcaagtgctctaacctttgtacagagattgtggagtacacttctaaggacgaagttgctgtctgcaacctggcctccttggctctgaacatgtacgttacgagcgaacacacttatgactttaaaaaactggccgaggtgaccaaggtcgtggtgagaaatctcaacaagatcattgacatcaactattaccctgtgcccgaagcttgtctgtccaataaaaggcaccgtccaattggtatcggtgtccagggcttggccgatgctttcatcctgatgagatacccctttgagtccgccgaggcccagctactgaataagcagatcttcgagacaatctactacggggctcttgaggccagttgtgacttagccaaagaacaggggccatacgagacttatgagggaagccccgtttctaaaggcattctccagtacgatatgtggaacgtcaccccaacggacctgtgggattggaaggtgctgaaggagaagattgctaaatatggcatacgaaattcactgttgatcgccccaatgccaacggctagcacagctcaaatactagggaataatgagagcattgaaccttatacttctaacatttacacaaggcgcgtgctctcgggcgaattccagattgttaatccacacctgctgaaggacctgacagagaggggactgtggcacgaagagatgaagaaccagattatagcctgcaatggatctatccagtccatacctgagattcccgacgacctcaaacagttgtacaagactgtctgggaaatttcccagaaaaccgttctgaagatggccgccgagaggggtgccttcatcgatcagtcccagtcgctgaatattcacatagctgagccgaactacggaaaattgaccagcatgcatttctatggttggaaacagggccttaaaactgggatgtactatttgaggacgcgaccagcggccaatcccattcagttcactctcaataaggagaagttgaaggacaaggagaaggtgagcaaagaggaggaggaaaaggagaggaacaccgcagccatggtttgctccctggagaaccgggacgaatgcctaatgtgtgggtcctag

SEQ ID NO: 29176 - DNA, 2379 bp, Artificial Sequence
  derived and/or modified sequence
atgcatgtgattaagagggacggaagacaggagcgagttatgtttgacaaaatcacaagtaggattcaaaagttatgctatggtctcaatatggacttcgtcgacccagcccagatcacaatgaaagtgatccagggcctgtattctggagtgacaacagtggaactggacacactggcagctgaaacagccgcaactcttaccactaagcaccctgactatgccatcctggctgcgagaatcgctgtttccaatttacataaggagaccaaaaaagttttttccgacgtaatggaggatctgtataattacataaacccccacaacggcaaacacagcccgatggtagcaaaaagcaccctcgatatcgtcctcgccaacaaagataggttaaactctgccatcatctacgacagggacttttcctataactattttggatttaagactctcgaaagaagttatctactcaagatcaacgggaaagtcgcggagcgtccgcagcatatgctcatgagggtctccgttggaatccacaaggaagatatcgatgcagcaatcgaaacctacaatcttctctcagaacgatggtttactcacgcttcaccgactttatttaacgctggaaccaatcggccacaactgtcctcttgctttttgctatcaatgaaagatgacagcattgaggggatctatgacactctcaaacagtgcgctctgatctcaaagtccgccggtggaattggcgttgccgtgtcgtgtataagagctactggatcttatattgctggtacaaacggaaactccaacggacttgtccccatgctgagagtgtataataacacagctcgttacgtggaccagggagggaataagcgtcccggtgcatttgccatctatcttgagccttggcacctggatatctttgagttcctcgacctcaagaagaacaccgggaaggaagaacagcgcgcaagagatctgttcttcgctttgtggatccctgaccttttcatgaagcgggtggagacaaaccaggattggtcccttatgtgccccaatgagtgccctgggcttgatgaggtctggggcgaagagttcgaaaaactttacgcgtcctatgaaaaacagggccgagtccggaaggtggtgaaagcgcagcagctgtggtatgccatcatagaatctcagaccgaaacaggaacaccgtacatgctatataaggatagttgcaaccggaagtccaaccagcagaatcttggtaccataaaatgtagcaacttatgtacagagatcgtagagtacacaagtaaggatgaggtcgcggtctgcaatctagcctctctcgcgcttaacatgtacgtaacaagcgagcacacatatgatttcaagaagttagctgaagtgactaaggtagtggttaggaaccttaataagatcatcgatatcaactactatcctgttcccgaggcctgtttgtctaataagcggcatcggccaatcggcatcggcgtgcaggggctggcagacgcttttattctgatgcgctacccttttgagtccgcagaggctcaactccttaataagcaaatcttcgaaaccatatactatggcgcactggaggcatcctgcgacctggctaaggaacaggggccttacgagacatacgaggggtcacccgtatcgaaaggaattctgcagtatgatatgtggaatgtaactcccacagatctctgggattggaaagtgctgaaggaaaaaatcgcgaaatacggtatccgtaactccttgctgattgctccaatgccaacggcatctaccgcccagattctgggcaataacgagtccatcgagccttacacgagtaacatctatacgcgaagggtattgagcggcgagtttcaaatcgttaatccccacctgttgaaagacctgacagaaaggggcctgtggcatgaggaaatgaagaaccagatcatagcttgcaacggatcgattcagagtattcccgagatccctgacgatctaaaacagctatacaagaccgtctgggagatctctcagaaaacggtcctgaagatggcagccgaacgcggagcttttattgaccagtcccagtccctgaacatccacatcgccgagcccaactatgggaaactcacttccatgcacttctatgggtggaagcaaggcctgaagactggaatgtattacctccgaacccgtcccgctgcaaacccaattcagtttactctcaacaaagaaaagctgaaggataaagagaaggtatcaaaagaagaagaggagaaggaaaggaacacagccgcaatggtgtgcagccttgaaaatcgtgacgaatgccttatgtgtgggagttag

SEQ ID NO: 29177 - DNA, 3076 bp, Artificial Sequence
  derived and/or modified sequence
gtcacgggtggcgggcgcgggaaggggatttggattgttgcgcctctgctctgaagaaagtgctgtctggctccaactccagttctttcccctgagcagcgcctggaacctaacccttcccactctgtcaccttctcgatcccgccggcgctttagagccgcagtccagtcttggatccttcagagcctcagccactagctgcgatgcatgtgatcaagcgagatggccgccaagaacgagtcatgtttgacaaaattacatctcgaatccagaagctttgttatggactcaatatggattttgttgatcctgctcagatcaccatgaaagtaatccaaggcttgtacagtggggtcaccacagtggaactagatactttggctgctgaaacagctgcaaccttgactactaagcaccctgactatgctatcctggcagccaggatcgctgtctctaacttgcacaaagaaacaaagaaagtgttcagtgatgtgatggaagacctctataactacataaatccacataatggcaaacactctcccatggtggccaagtcaacattggatattgttctggccaataaagatcgcctgaattctgctattatctatgaccgagatttctcttacaattacttcggctttaagacgctagagcggtcttatttgttgaagatcaatggaaaagtggctgaaagaccacaacatatgttgatgagagtatctgttgggatccacaaagaagacattgatgcagcaattgaaacatataatcttctttctgagaggtggtttactcatgcttcgcccactctcttcaatgctggtaccaaccgcccacaactttctagctgttttcttctgagtatgaaagatgacagcattgaaggcatttatgacactctaaagcaatgtgcattgatttctaagtctgctggaggaattggtgttgctgtgagttgtattcgggctactggcagctacattgctgggactaatggcaattccaatggccttgtaccgatgctgagagtatataacaacacagctcgatatgtggatcaaggtgggaacaagcgtcctggggcatttgctatttacctggagccttggcatttagacatctttgaattccttgatttaaagaagaacacaggaaaggaagagcagcgtgccagagatcttttctttgctctttggattccggatctcttcatgaaacgagtggagactaatcaggactggtctttgatgtgtccaaatgagtgtcctggtctggatgaggtttggggagaggaatttgagaaactatatgcaagttatgagaaacaaggtcgtgtccgcaaagttgtaaaagctcagcagctttggtatgccatcattgagtctcagacggaaacaggcaccccgtatatgctctacaaagattcctgtaatcgaaagagcaaccagcagaacctgggaaccatcaaatgcagcaacctgtgcacagaaatagtggagtacaccagcaaagatgaggttgctgtttgtaatttggcttccctggccctgaatatgtatgtcacatcagaacacacatacgactttaagaagttggctgaagtcactaaagtcgttgtccgaaacttgaataaaattattgatataaactactatcctgtaccagaggcatgcctatcaaataaacgccatcgccccattggaattggggtacaaggtctggcagatgcttttatcctgatgagatacccttttgagagtgcagaagcccagttactgaataagcagatctttgaaactatttattatggtgctctggaagccagctgtgaccttgccaaggagcagggcccatacgaaacctatgagggctctccagttagcaaaggaattcttcagtatgatatgtggaatgttactcctacagacctatgggactggaaggttctcaaggagaagattgcaaagtatggtataagaaacagtttacttattgccccgatgcctacagcttccactgctcagatcctggggaataatgagtccattgaaccttacaccagcaacatctatactcgcagagtcttgtcaggagaatttcagattgtaaatcctcacttattgaaagatcttaccgagcggggcctatggcatgaagagatgaaaaaccagattattgcatgcaatggctctattcagagcataccagaaattcctgatgacctgaagcaactttataaaactgtgtgggaaatctctcagaaaactgttctcaagatggcagctgagagaggtgctttcattgatcaaagccaatctttgaacatccacattgctgagcctaactatggcaaactcactagtatgcacttctacggctggaagcagggtttgaagactgggatgtattatttaaggacaagaccagcggctaatccaatccagttcactctaaataaggagaagctaaaagataaagaaaaggtatcaaaagaggaagaagagaaggagaggaacacagcagccatggtgtgctctttggagaatagagatgaatgtctgatgtgtggatcctgaggaaagacttggaagagaccagcatgtcttcagtagccaaactacttcttgagcatagataggtatagtgggtttgcttgaggtggtaaggctttgctggaccctgttgcaggcaaaaggagtaattgatttaaagtactgttaatgatgataatgattttttttttaaactcatatattgggattttcaccaaaataatgcttttgaaaaaaagaaaaaaaaaacggatatattgagaatcaaagtagaagttttaggaatgcaaaataagtcatcttgcatacagggagtggttaagtaaggtttcatcacccctttagcactgcttttctgaagacttcagttttgttaaggagatttagttttactgctttgactggtgggtctctagaagcaaaactgagtgataactcatgagaagtactgataggacctttatctggatatggtcctataggttattctgaaataaagataaacatttctaagtga

SEQ ID NO: 29178 - DNA, 2863 bp, Artificial Sequence
  derived and/or modified sequence
ttgttgcgcctctgctctgaagaaagtgctgtctggctccaactccagttctttcccctgagcagcgcctggaacctaacccttcccactctgtcaccttctcgatcccgccggcgctttagagccgcagtccagtcttggatccttcagagcctcagccactagctgcgatgcatgtgatcaagcgagatggccgccaagaacgagtcatgtttgacaaaattacatctcgaatccagaagctttgttatggactcaatatggattttgttgatcctatgtgatggaagacctctataactacataaatccacataatggcaaacactctcccatggtggccaagtcaacattggatattgttctggccaataaagatcgcctgaattctgctattatctatgaccgagatttctcttacaattacttcggctttaagacgctagagcggtcttatttgttgaagatcaatggaaaagtggctgaaagaccacaacatatgttgatgagagtatctgttgggatccacaaagaagacattgatgcagcaattgaaacatataatcttctttctgagaggtggtttactcatgcttcgcccactctcttcaatgctggtaccaaccgcccacaactttctagctgttttcttctgagtatgaaagatgacagcattgaaggcatttatgacactctaaagcaatgtgcattgatttctaagtctgctggaggaattggtgttgctgtgagttgtattcgggctactggcagctacattgctgggactaatggcaattccaatggccttgtaccgatgctgagagtatataacaacacagctcgatatgtggatcaaggtgggaacaagcgtcctggggcatttgctatttacctggagccttggcatttagacatctttgaattccttgatttaaagaagaacacaggaaaggaagagcagcgtgccagagatcttttctttgctctttggattccggatctcttcatgaaacgagtggagactaatcaggactggtctttgatgtgtccaaatgagtgtcctggtctggatgaggtttggggagaggaatttgagaaactatatgcaagttatgagaaacaaggtcgtgtccgcaaagttgtaaaagctcagcagctttggtatgccatcattgagtctcagacggaaacaggcaccccgtatatgctctacaaagattcctgtaatcgaaagagcaaccagcagaacctgggaaccatcaaatgcagcaacctgtgcacagaaatagtggagtacaccagcaaagatgaggttgctgtttgtaatttggcttccctggccctgaatatgtatgtcacatcagaacacacatacgactttaagaagttggctgaagtcactaaagtcgttgtccgaaacttgaataaaattattgatataaactactatcctgtaccagaggcatgcctatcaaataaacgccatcgccccattggaattggggtacaaggtctggcagatgcttttatcctgatgagatacccttttgagagtgcagaagcccagttactgaataagcagatctttgaaactatttattatggtgctctggaagccagctgtgaccttgccaaggagcagggcccatacgaaacctatgagggctctccagttagcaaaggaattcttcagtatgatatgtggaatgttactcctacagacctatgggactggaaggttctcaaggagaagattgcaaagtatggtataagaaacagtttacttattgccccgatgcctacagcttccactgctcagatcctggggaataatgagtccattgaaccttacaccagcaacatctatactcgcagagtcttgtcaggagaatttcagattgtaaatcctcacttattgaaagatcttaccgagcggggcctatggcatgaagagatgaaaaaccagattattgcatgcaatggctctattcagagcataccagaaattcctgatgacctgaagcaactttataaaactgtgtgggaaatctctcagaaaactgttctcaagatggcagctgagagaggtgctttcattgatcaaagccaatctttgaacatccacattgctgagcctaactatggcaaactcactagtatgcacttctacggctggaagcagggtttgaagactgggatgtattatttaaggacaagaccagcggctaatccaatccagttcactctaaataaggagaagctaaaagataaagaaaaggtatcaaaagaggaagaagagaaggagaggaacacagcagccatggtgtgctctttggagaatagagatgaatgtctgatgtgtggatcctgaggaaagacttggaagagaccagcatgtcttcagtagccaaactacttcttgagcatagataggtatagtgggtttgcttgaggtggtaaggctttgctggaccctgttgcaggcaaaaggagtaattgatttaaagtactgttaatgatgataatgattttttttttaaactcatatattgggattttcaccaaaataatgcttttgaaaaaaagaaaaaaaaaacggatatattgagaatcaaagtagaagttttaggaatgcaaaataagtcatcttgcatacagggagtggttaagtaaggtttcatcacccctttagcactgcttttctgaagacttcagttttgttaaggagatttagttttactgctttgactggtgggtctctagaagcaaaactgagtgataactcatgagaagtactgataggacctttatctggatatggtcctataggttattctgaaataaagataaacatttctaagtg

SEQ ID NO: 29179 - DNA, 2379 bp, Artificial Sequence
  derived and/or modified sequence
atgcacgtgatcaagagagacggcagacaggagagagtgatgttcgacaagatcaccagcagaatccagaagctgtgctacggcctgaacatggacttcgtggaccccgcccagatcaccatgaaggtgatccagggcctgtacagcggcgtgaccaccgtggagctggacaccctggccgccgagaccgccgccaccctgaccaccaagcaccccgactacgccatcctggccgccagaatcgccgtgagcaacctgcacaaggagaccaagaaggtgttcagcgacgtgatggaggacctgtacaactacatcaacccccacaacggcaagcacagccccatggtggccaagagcaccctggacatcgtgctggccaacaaggacagactgaacagcgccatcatctacgacagagacttcagctacaactacttcggcttcaagaccctggagagaagctacctgctgaagatcaacggcaaggtggccgagagaccccagcacatgctgatgagagtgagcgtgggcatccacaaggaggacatcgacgccgccatcgagacctacaacctgctgagcgagagatggttcacccacgccagccccaccctgttcaacgccggcaccaacagaccccagctgagcagctgcttcctgctgagcatgaaggacgacagcatcgagggcatctacgacaccctgaagcagtgcgccctgatcagcaagagcgccggcggcatcggcgtggccgtgagctgcatcagagccaccggcagctacatcgccggcaccaacggcaacagcaacggcctggtgcccatgctgagagtgtacaacaacaccgccagatacgtggaccagggcggcaacaagagacccggcgccttcgccatctacctggagccctggcacctggacatcttcgagttcctggacctgaagaagaacaccggcaaggaggagcagagagccagagacctgttcttcgccctgtggatccccgacctgttcatgaagagagtggagaccaaccaggactggagcctgatgtgccccaacgagtgccccggcctggacgaggtgtggggcgaggagttcgagaagctgtacgccagctacgagaagcagggcagagtgagaaaggtggtgaaggcccagcagctgtggtacgccatcatcgagagccagaccgagaccggcaccccctacatgctgtacaaggacagctgcaacagaaagagcaaccagcagaacctgggcaccatcaagtgcagcaacctgtgcaccgagatcgtggagtacaccagcaaggacgaggtggccgtgtgcaacctggccagcctggccctgaacatgtacgtgaccagcgagcacacctacgacttcaagaagctggccgaggtgaccaaggtggtggtgagaaacctgaacaagatcatcgacatcaactactaccccgtgcccgaggcctgcctgagcaacaagagacacagacccatcggcatcggcgtgcagggcctggccgacgccttcatcctgatgagataccccttcgagagcgccgaggcccagctgctgaacaagcagatcttcgagaccatctactacggcgccctggaggccagctgcgacctggccaaggagcagggcccctacgagacctacgagggcagccccgtgagcaagggcatcctgcagtacgacatgtggaacgtgacccccaccgacctgtgggactggaaggtgctgaaggagaagatcgccaagtacggcatcagaaacagcctgctgatcgcccccatgcccaccgccagcaccgcccagatcctgggcaacaacgagagcatcgagccctacaccagcaacatctacaccagaagagtgctgagcggcgagttccagatcgtgaacccccacctgctgaaggacctgaccgagagaggcctgtggcacgaggagatgaagaaccagatcatcgcctgcaacggcagcatccagagcatccccgagatccccgacgacctgaagcagctgtacaagaccgtgtgggagatcagccagaagaccgtgctgaagatggccgccgagagaggcgccttcatcgaccagagccagagcctgaacatccacatcgccgagcccaactacggcaagctgaccagcatgcacttctacggctggaagcagggcctgaagaccggcatgtactacctgagaaccagacccgccgccaaccccatccagttcaccctgaacaaggagaagctgaaggacaaggagaaggtgagcaaggaggaggaggagaaggagagaaacaccgccgccatggtgtgcagcctggagaacagagacgagtgcctgatgtgcggcagctag

SEQ ID NO: 29180 - protein, 465 aa, Artificial Sequence
  derived and/or modified sequence
MHSSCRQRRNQNLSKEIPQTEFHTGYSMENEPGIVSPFKRVFLKGEKSRDKKAHEKVTERRPLHTVVLSLPERVEPDRLLSDYIEKEVKYLGQLTSIPGYLNPSSRTEILHFIDNAKRAHQLPGHLTQEHDAVLSLSAYNVKLAWRDGEDIILRVPIHDIAAVSYVRDDAAHLVVLKTAQDPGISPSQSLCAESSRGLSAGSLSESAVGPVEACCLVILAAESKVAAEELCCLLGQVFQVVYTESTIDFLDRAIFDGASTPTHHLSLHSDDSSTKVDIKETYEVEASTFCFPESVDVGGASPHSKTISESELSASATELLQDYMLTLRTKLSSQEIQQFAALLHEYRNGASIHEFCINLRQLYGDSRKFLLLGLRPFIPEKDSQHFENFLETIGVKDGRGIITDSFGRHRRALSTTSSSTTNGNRATGSSDDRSAPSEGDEWDRMISDISSDIEALGCSMDQDSA

SEQ ID NO: 29181 - protein, 438 aa, Artificial Sequence
  derived and/or modified sequence
MENEPGIVSPFKRVFLKGEKSRDKKAHEKVTERRPLHTVVLSLPERVEPDRLLSDYIEKEVKYLGQLTSIPGYLNPSSRTEILHFIDNAKRAHQLPGHLTQEHDAVLSLSAYNVKLAWRDGEDIILRVPIHDIAAVSYVRDDAAHLVVLKTAQDPGISPSQSLCAESSRGLSAGSLSESAVGPVEACCLVILAAESKVAAEELCCLLGQVFQVVYTESTIDFLDRAIFDGASTPTHHLSLHSDDSSTKVDIKETYEVEASTFCFPESVDVGGASPHSKTISESELSASATELLQDYMLTLRTKLSSQEIQQFAALLHEYRNGASIHEFCINLRQLYGDSRKFLLLGLRPFIPEKDSQHFENFLETIGVKDGRGIITDSFGRHRRALSTTSSSTTNGNRATGSSDDRSAPSEGDEWDRMISDISSDIEALGCSMDQDSA

SEQ ID NO: 29182 - DNA, 1398 bp, Artificial Sequence
  derived and/or modified sequence
atgcacagctcctgtaggcagcggagaaatcaaaatctctcaaaagagatcccccagacggagtttcacactggttattctatggagaacgagcccggcattgtgtctccattcaagcgggtgtttcttaagggggaaaagtcccgcgataagaaagcccatgagaaggtaactgaaagaaggccactgcacacagtcgtgcttagcctccccgagcgggttgagccagaccggctactgtccgactacattgagaaggaggtaaaatatctggggcaactcacaagcataccgggctacttgaacccctcatctcggaccgaaatcctccactttattgacaatgccaaaagggcccaccaactgcccggacatctaacacaggaacatgatgccgtgctgagcctttccgcatacaacgttaaactggcatggcgggatggggaagacatcattttgcgagtccctatccacgacattgccgccgtctcatatgtccgtgatgacgctgcccacctagtggtcctaaagactgctcaagatcctgggatctccccaagtcagagtctgtgtgctgaatccagccgcggactgtctgcgggctcactgagtgagagtgccgttggtccggtggaggcatgttgcctcgtcatattagccgcggaatctaaggtcgccgctgaagaactctgctgcctccttggacaggtctttcaggtggtgtatacggaaagtactatcgatttcctggacagggcgatctttgacggcgcttcaacacccacgcaccacttatctctacatagtgatgacagcagtactaaggttgatattaaagagacctacgaggtcgaggcttcaaccttctgcttccccgaatccgtagatgttggaggcgcgtctcctcactcaaagaccatctctgaatctgaactctcggcctcagcaaccgagttactccaagactatatgctcacgttaagaacaaagctgagcagtcaggagatccagcagtttgccgcactgctgcacgagtataggaatggtgcatccatacatgaattttgtataaatctccgccagctctacggcgattcacggaagtttctgctgctgggcctacggccttttataccagagaaagacagtcaacatttcgagaattttctggagaccattggggtgaaggacggaagggggatcataaccgatagctttggcagacacaggcgggccctgtcaactaccagtagttctacaacaaatgggaaccgcgctaccggctcaagcgatgatagatctgcccctagcgagggagacgagtgggaccggatgatctccgacatatcttctgatatcgaagcactgggctgttccatggaccaggactctgcttag

SEQ ID NO: 29183 - DNA, 1317 bp, Artificial Sequence
  derived and/or modified sequence
atggaaaatgaacccgggatcgtgtccccgttcaagagggttttcctgaagggagaaaagtccagagacaaaaaggcccatgagaaagtgaccgagcgacgccccctgcatactgtggtactctcattgcctgagcgcgtggagcccgaccggttgctgtcagattatatagagaaagaggtcaagtacctcggacagctcacctcaattccggggtacctgaatcctagctccaggaccgagatcctccatttcattgataatgccaaacgggcacatcaactcccaggtcacttgacccaagaacatgacgccgtcctgagtttatcagcttataatgttaagttggcttggagagacggggaggatatcatactaagggtcccaattcatgacatagcagccgtgagctacgtgagggatgacgcagctcacctcgtggtgttgaaaacagctcaggacccaggcatcagccccagtcagtctctgtgtgccgagagttcccggggtctttccgccggctcccttagtgagtctgccgtgggtcccgtggaagcctgctgcctggtgatacttgcagccgagtctaaagtagccgcagaggagctatgctgtttactaggtcaagtgtttcaggttgtgtacactgagtctacgatagatttcctggaccgggcgatctttgatggtgccagtacgccaacccaccacctgagcctccatagcgacgactctagcaccaaagtagacattaaggagacatatgaggttgaagcatcaaccttctgttttcctgagagcgtggacgtgggcggcgcaagccctcacagtaagactattagcgagtctgaactgtccgccagtgccacagagctgctacaggactatatgctgactctaaggacgaagcttagcagtcaagaaatacagcagttcgcggcactgctacatgaatacagaaatggtgcaagcatccacgaattttgcatcaatctgagacaactgtacggagatagtaggaagttcttactgctcgggttgagacctttcatccccgagaaggattcccaacactttgaaaactttctagagacaattggcgtaaaggatgggagaggcattattacggattctttcgggcgccaccggcgcgccttgtcaactacttcaagctctaccactaacggaaaccgcgctacagggtctagcgacgatcgcagcgccccgtcggagggtgacgaatgggacaggatgatctcggacatttcaagtgacattgaggctctcggctgctcaatggaccaagatagcgcttag

SEQ ID NO: 29184 - DNA, 1398 bp, Artificial Sequence
  derived and/or modified sequence
atgcacagcagctgccggcagaggaggaaccagaacctgagcaaggagatcccccagacagagttccacacaggctacagcatggagaatgagcccggcatcgtgagccccttcaagagggtcttcctgaagggggagaagagccgggacaagaaggcccacgagaaggtgacagagcggcggcccctgcacacagtggtgctgagcctgcctgagcgggtggagccagaccggctgctgagtgactacatcgagaaggaggtgaagtacctgggccagctgaccagcatccctggctacctgaaccccagcagcaggacagagatcctgcacttcatcgacaatgccaagagggcccaccagctgcccggccacctgacccaggagcatgatgctgtgctgagcctgagcgcctacaacgtgaagctggcctggagagatggagaggacatcatcctgcgggtgcccatccatgacattgctgctgtgtcctatgtgagagatgatgctgcccacctggtggtgctgaagacagcccaggaccccggcatcagccccagccagagcctgtgtgccgagagcagccggggcctgtctgctggcagcctgtctgagagcgctgtgggccctgtggaggcctgctgcctggtgatcctggccgctgagagcaaggtggccgctgaggagctgtgctgcctgctgggccaggtgttccaggtggtgtacacagagagcaccatcgacttcctggaccgggccatctttgatggagccagcacccccacccaccacctgagcctgcacagtgatgacagcagcaccaaggtggacatcaaggagacctatgaggtggaggccagcaccttctgcttccctgagagcgtggatgtgggcggggccagcccccacagcaagaccatcagcgagagcgagctgagcgccagcgccacagagctgctgcaggactacatgctgaccctgcggaccaagctgagcagccaggagatccagcagtttgctgccctgctgcacgagtacagaaatggagccagcatccacgagttctgcatcaacctgcggcagctgtatggagacagcaggaagttcctgctgctgggcctgcggcccttcatccctgagaaggacagccagcactttgagaacttcctggagaccatcggcgtgaaggatggccggggcatcatcacagacagctttggccgccaccggcgggccctgagcaccaccagcagcagcaccaccaacggcaacagagccaccggcagcagtgatgacagaagtgcccccagtgaaggagatgagtgggacaggatgatcagtgacatcagcagtgacatcgaggccctgggctgcagcatggaccaggacagcgcctag

SEQ ID NO: 29185 - DNA, 1317 bp, Artificial Sequence
  derived and/or modified sequence
atggagaatgaacctggcatcgtgagccccttcaagagggtcttcctgaagggggagaagagccgggacaagaaggcccacgagaaggtgacagaaagaagacccctgcacacagtggtgctgagcctgcctgagcgggtggagccagaccggctgctgagtgactacatcgagaaggaggtgaagtacctgggccagctgaccagcatccctggctacctgaaccccagcagcaggacagagatcctgcacttcatcgacaatgccaagagggcccaccagctgcccggccacctgacccaggagcatgatgctgtgctgagcctgagcgcctacaacgtgaagctggcctggagagatggagaggacatcatcctgcgggtgcccatccatgacattgctgctgtgtcctatgtgagagatgatgctgcccacctggtggtgctgaagacagcccaggaccccggcatcagccccagccagagcctgtgtgccgagagcagccggggcctgtctgctggcagcctgtctgagagcgctgtgggccctgtggaggcctgctgcctggtgatcctggccgctgagagcaaggtggccgctgaggagctgtgctgcctgctgggccaggtgttccaggtggtgtacacagagagcaccatcgacttcctggaccgggccatctttgatggagccagcacccccacccaccacctgagcctgcacagtgatgacagcagcaccaaggtggacatcaaggagacctatgaggtggaggccagcaccttctgcttccctgagagcgtggatgtgggcggggccagcccccacagcaagaccatcagcgagagcgagctgagcgccagcgccacagagctgctgcaggactacatgctgaccctgcggaccaagctgagcagccaggagatccagcagtttgctgccctgctgcacgagtacagaaatggagccagcatccacgagttctgcatcaacctgcggcagctgtatggagacagcaggaagttcctgctgctgggcctgcggcccttcatccctgagaaggacagccagcactttgagaacttcctggagaccatcggcgtgaaggatggccggggcatcatcacagacagctttggccgccacagaagagccctgagcaccaccagcagcagcaccaccaatggaaacagagccaccggcagcagtgatgacagaagtgcccccagtgaaggagatgagtgggacaggatgatcagtgacatcagcagtgacatcgaggccctgggctgcagcatggaccaggacagcgcctag

SEQ ID NO: 29186 - DNA, 1398 bp, Artificial Sequence
  derived and/or modified sequence
atgcacagcagctgccggcagcggcggaaccagaacctgagcaaggagattccacagaccgaattccacacagggtattcaatggaaaacgagcctggcatagtaagccctttcaagagggtttttctcaagggagaaaaatcacgggacaagaaggctcatgagaaagtgacggagaggcgacctctgcacacagtggtgctgagcctgcccgagcgggttgaacccgacagactgctgagcgactacattgagaaagaggtgaagtaccttggtcaactgacttccatccccggctatttgaatccctcctcacgcacggagattctgcactttattgacaacgctaaacgtgcccaccagcttcccggacatctgacacaggagcatgacgctgtgttgtccctctcagcctacaatgtgaagcttgcctggcgggatggcgaggatatcatactgcgcgtacctattcatgatattgccgctgtgagctatgtgcgtgacgatgctgctcatttggtcgtgcttaagactgcgcaggacccaggaatctcacccagccagtccttatgcgccgaaagctcacgggggctctctgccggctccctcagtgaatctgcagtggggccagtcgaagcatgctgcctggtcattttagccgcagagtccaaagtggctgccgaagagctatgctgtctgttaggccaagtgtttcaggtggtgtacactgagagtaccatcgatttcctcgaccgcgccatatttgacggtgcatcaacccctacgcatcatctttctctccattccgatgacagctcaacgaaagtagacattaaggagacctacgaagtcgaagcgtctaccttctgtttcccagaaagtgtggacgtcggtggggcttccccacactcaaagacgatctctgagtctgaactgagtgcatcagctaccgagctcctgcaggactatatgctcacacttagaactaagctgagtagccaggaaatccaacagtttgcggcgctgctgcacgagtatcgtaacggcgcttccatccatgaattctgcattaatctccgtcagctgtacggagacagtaggaaattcctcctgctagggctgcgcccatttattccggagaaggactcccaacatttcgagaacttcctggaaaccatcggcgtgaaggacggccgaggaattatcaccgactccttcgggcggcacagaagggctctgtcaacgacatcgtcctccaccactaatggaaaccgcgctacgggatcttccgacgatcggtcggctcctagcgagggcgacgaatgggatcgaatgatatctgacattagctcggacatcgaggctttgggctgctcgatggaccaggattctgcctag

SEQ ID NO: 29187 - DNA, 1317 bp, Artificial Sequence
  derived and/or modified sequence
atggagaacgagcccggcatcgtgagccccttcaagcgggtgttcctaaaaggagagaaatcaagagataaaaaagcgcacgaaaaggtgactgagagacggcctctgcataccgtggtgctgagcctgccggagagggtcgaacccgatagactgttgagtgactacatcgagaaggaggttaaatatctggggcagctgaccagcattcccggatacctgaacccatcaagtaggaccgagatactccacttcattgataatgccaagagagctcaccagcttccggggcacctcacacaggagcacgatgccgtcctgagcctgtctgcctataatgtgaaactggcctggagagacggagaggatatcattctcagggttcctatccatgacattgcggcagttagttatgtcagggatgatgccgcacatctggtggtgctgaagacggcccaggatcccggaatatcccctagccagtcactctgcgcagaaagttcgcggggcttgtccgccggcagcctgtccgaaagcgctgtggggccggttgaggcctgctgtctagtcatcctggcagccgaatcgaaggtcgctgcggaggagctgtgctgcctgttagggcaggtgtttcaggttgtttatactgaaagcaccatcgattttctggacagagcgatctttgatggtgcttctacaccgacgcatcacctgagccttcactcggacgatagttctactaaggtggacatcaaggagacatatgaggtggaggcttcaactttttgcttcccagagtccgtcgatgtggggggggcctccccccactctaagacaattagcgagagtgaactgtcggccagcgcaacagagctcctacaggattacatgcttacactgaggacaaagctaagctcccaggaaatacagcagtttgcagccctactccacgagtatcggaatggggccagtatccatgagttctgcatcaacctgagacagctgtacggagattcccgcaagttcctgctgctgggactgagaccctttataccagagaaggatagtcaacatttcgaaaattttctggagaccatcggggtaaaagatggtagggggattattaccgactcttttggcaggcatcgaagagctcttagcacgacatcatcctcgaccacaaacggaaaccgcgccactgggtctagtgacgatagatccgcccccagtgagggggatgaatgggatcgtatgatctctgatatttcttccgatatcgaggcactcggttgttcaatggatcaggatagtgcctag

SEQ ID NO: 29188 - DNA, 1398 bp, Artificial Sequence
  derived and/or modified sequence
atgcatagctcctgtcggcaacgtaggaaccagaacctgtcaaaagaaatacctcaaactgaattccataccggctactccatggagaatgaaccagggattgtgtctccattcaagagggttttcctgaaaggtgagaagagccgcgataaaaaagcgcatgagaaggtgaccgaacgcaggccccttcataccgttgtactcagcctgccagagcgcgtggagcccgacagactcttaagtgattacatcgaaaaggaagtgaaatatcttggtcagttgacatccattcctggataccttaacccttcaagccgtacagagattctgcatttcattgataatgctaagcgtgcccatcagctaccgggtcacctgactcaggagcacgacgctgtgctgtctctgagtgcctacaatgtcaaactcgcgtggcgcgatggcgaagacatcattctgagagttccaatacatgatattgctgcagtgagttatgtcagagacgacgctgcccacctggttgtgttaaagacggcacaggacccaggaattagtccgtctcagtctctctgtgcagagtcctcgcgcggactgtcggcaggatcgctcagtgagagtgcagtcggccctgtcgaggcttgttgccttgtgatcctcgcggctgaaagtaaagtcgccgctgaggagctgtgttgcctcctcggtcaggtgtttcaggtcgtgtataccgagtcaacgatcgactttcttgatagagccatcttcgacggggcaagcacccccacacatcatttgagcctgcactcggacgacagctctactaaagtggatattaaagagacctacgaagttgaggcgtccacattctgttttccagagtcggtggacgtggggggagcctctccccactccaaaacaatttctgaatccgagttaagcgcctcagctacggagctcctgcaagattacatgctcaccctgaggacaaagctctctagccaggagattcagcagtttgccgctctgctgcatgagtaccgaaatggggcttccattcacgagttttgtataaatttgagacaactttatggggactctcgcaagttcctgctccttggactgcgtccatttatacctgaaaaagattcccagcactttgaaaacttcttagagaccatcggggtcaaggacggcagggggatcatcacggatagtttcgggaggcaccggagagcactcagcaccaccagttctagtaccaccaatggcaatcgcgcaacgggttcctcagatgatagaagcgcacctagtgagggtgacgagtgggacagaatgatatctgatatctcttccgacattgaggccctggggtgcagcatggatcaggattctgcgtag

SEQ ID NO: 29189 - DNA, 1317 bp, Artificial Sequence
  derived and/or modified sequence
atggaaaacgaaccagggatagtctcaccttttaaacgtgttttcctcaaaggagaaaagtcccgggacaagaaggctcacgagaaggtaaccgagcgcaggccactccatacagtggtgctgtcacttccagagcgcgttgagccagatcggcttctgagtgattacatcgagaaggaggtcaaatacttaggtcaactgaccagtatcccaggctatctcaacccatcgagtcgaaccgagatactgcactttatagataacgcaaaacgcgcacatcagctacctggacatttgacgcaggaacacgatgccgttctgagtctgtccgcttacaatgtaaaactcgcctggcgcgacggagaagatatcatcttgcgggtgccaatccacgatatagcagcagttagctatgttcgcgacgatgccgcacatctagttgttttgaagacagcgcaggaccccggtatttcgcctagtcagtcactttgtgcagaaagtagcagaggactctcagcaggcagtttgagtgagtctgcagtgggacctgtggaggcttgctgtcttgtaatactcgctgccgaatctaaggtcgcagccgaagaattgtgctgcctgctcggccaggtgttccaagtggtatacacagaaagcaccatcgactttttagatagggcgatttttgatggagcgagcactccgacacaccatctgtccctacacagtgacgactccagtaccaaagtcgacattaaagagacttacgaagttgaagcttctactttctgttttcccgagagtgtggacgttgggggagcttcgccgcatagtaaaactatcagtgagagcgaactgagcgcctccgccaccgagctgctgcaggattacatgttgacgctccgcaccaagctttccagtcaagagatccaacagtttgctgcactgctgcacgagtaccgaaacggtgcgtccatccatgagttctgtattaatctgagacaactgtacggcgactcacggaaattcctcctccttgggcttaggccgtttattcccgaaaaggacagccagcattttgagaactttctagaaactattggagtgaaggacgggaggggcatcatcactgactcatttggcagacacagaagggcactcagtacaacatcgtcttcgaccacgaatggcaatagggcgacaggaagttcggacgacaggtccgctccgtccgagggagacgagtgggaccggatgatctccgacatctcatccgatatcgaggcactaggatgctccatggaccaggattcggcttag

SEQ ID NO: 29190 - DNA, 2471 bp, Artificial Sequence
  derived and/or modified sequence
gaagaagtgagcttggccagaggcacgctgtttaatttcaaagtgctgctgactcaaactcatgagtcctggaggcaggtagaggcacttgtaggctgaggacccgtagagcccggtgtgccctgcccaagccccacctgggaatggagttatctctgtaaagatcttgctgcctttgagcaagcactgcaaatggggtaactggaacagccttgtcgcgtgtttccacccttcgtatgaggcaggtaccatgggtcttcaccaacagcacggcctgttgtctccaggaaatggtagcccctcacagtgctttctgtctgcttgtttagctttggcatttgaatgtgcagaatggtggactttgaaattaatgtccttctgttgactgcagaatttctgctggaaatgcagggaggctgcttgtggggttcgcgtgctgtgggaagtagggaaaatgagctggtttactttgtgtctttttgtgcatgcagactgtttggattttgccaacagtttctgggtgctgcctgctttttaaacttttaaaaaattgtaaacagcttcagtggctttgcagaaggaagctgtggtttctggtcttcctgttcagtcatgtttttttcagagggagggctaacatctggccatatttttcaacaaattcagaagtgagtagagaatgcatagtagctgtcggcagaggaggaaccagaatctctccaaagaaattcctcaaacagaatttcacacagggtattccatggagaatgagcctggaattgtctcgccatttaaacgagtattcctaaaaggtgaaaagagtagagataagaaagcccatgagaaggtgacagagaggcgccctctgcacactgtggtgttgtcattgcctgagcgcgtcgagccagacagactgctgagcgactatattgagaaggaggtaaagtatttaggtcagttaacgtccataccaggatacctgaatccctccagtaggactgaaatcctgcatttcatagacaatgcaaagagagcccaccagcttccgggacacttgactcaggagcacgatgctgtgctcagcctgtctgcgtacaacgtcaagctggcctggagggacggggaggatatcatcctcagggtgcccatccatgacatcgccgccgtctcctatgttcgggatgacgctgcacacctggtggtcctgaagacagcccaggacccagggatctcccccagccagagtctgtgtgcggaaagttccagaggcctcagtgcaggctccctgtcggagagtgcagttgggcccgtggaggcatgctgcctggtcatcctggctgcagagagcaaggtcgctgcggaggagctttgctgtctgctaggccaggtcttccaggttgtttacacggagtccaccatcgactttctggacagagcgatatttgatggggcctctaccccgacccaccacctgtccctgcacagcgatgactcttctacaaaagtggacattaaggagacctacgaggtggaagccagcactttctgcttccctgaatctgtggatgtgggtggtgcatcaccccacagcaagaccatcagtgagagcgagctgagcgccagcgccactgagctgctgcaggactacatgctgacgctgcgcaccaagctgtcatcacaggagatccagcagtttgcagcactgctgcacgagtaccgcaatggggcctctatccacgagttctgcatcaacctgcggcagctctacggggacagccgcaagttcctgctgcttggtctgaggcccttcatccctgagaaggacagccagcacttcgagaacttcctggagaccattggcgtgaaggatggccgcggcatcatcactgacagctttggcaggcaccggcgggccctgagcaccacatccagttccaccaccaatgggaacagggccacgggcagctctgatgaccggtcggcaccctcagagggggatgagtgggaccgcatgatctcggacatcagcagcgacattgaggcgctgggctgcagcatggaccaggactcagcatgatggacagtggatgggggggcacccacaccttccgcgcagtcgtcataggccttcccagaaggagctgcccagacctgcgtgtcagcccttggtggtggccagggagaggcgcccggtgcagatggccccgggcggcccaggtcctctactgtgaaggagcagggagctgccgagggacacgagcctcagtgcggggtggaaggctctttgccttgtccaccagggctcagccaagccctgcagtgtgtccccgctcggggagggcccggccgagcgggcagggagagccagtcctgtcggctgggcccttggacggctgtcagttttgcacatgatgttcctattgtaactctcagagaccttaaaaagaagtttactgcaatgtgaataattt

SEQ ID NO: 29191 - DNA, 1398 bp, Artificial Sequence
  derived and/or modified sequence
atgcacagcagctgcagacagagaagaaaccagaacctgagcaaggagatcccccagaccgagttccacaccggctacagcatggagaacgagcccggcatcgtgagccccttcaagagagtgttcctgaagggcgagaagagcagagacaagaaggcccacgagaaggtgaccgagagaagacccctgcacaccgtggtgctgagcctgcccgagagagtggagcccgacagactgctgagcgactacatcgagaaggaggtgaagtacctgggccagctgaccagcatccccggctacctgaaccccagcagcagaaccgagatcctgcacttcatcgacaacgccaagagagcccaccagctgcccggccacctgacccaggagcacgacgccgtgctgagcctgagcgcctacaacgtgaagctggcctggagagacggcgaggacatcatcctgagagtgcccatccacgacatcgccgccgtgagctacgtgagagacgacgccgcccacctggtggtgctgaagaccgcccaggaccccggcatcagccccagccagagcctgtgcgccgagagcagcagaggcctgagcgccggcagcctgagcgagagcgccgtgggccccgtggaggcctgctgcctggtgatcctggccgccgagagcaaggtggccgccgaggagctgtgctgcctgctgggccaggtgttccaggtggtgtacaccgagagcaccatcgacttcctggacagagccatcttcgacggcgccagcacccccacccaccacctgagcctgcacagcgacgacagcagcaccaaggtggacatcaaggagacctacgaggtggaggccagcaccttctgcttccccgagagcgtggacgtgggcggcgccagcccccacagcaagaccatcagcgagagcgagctgagcgccagcgccaccgagctgctgcaggactacatgctgaccctgagaaccaagctgagcagccaggagatccagcagttcgccgccctgctgcacgagtacagaaacggcgccagcatccacgagttctgcatcaacctgagacagctgtacggcgacagcagaaagttcctgctgctgggcctgagacccttcatccccgagaaggacagccagcacttcgagaacttcctggagaccatcggcgtgaaggacggcagaggcatcatcaccgacagcttcggcagacacagaagagccctgagcaccaccagcagcagcaccaccaacggcaacagagccaccggcagcagcgacgacagaagcgcccccagcgagggcgacgagtgggacagaatgatcagcgacatcagcagcgacatcgaggccctgggctgcagcatggaccaggacagcgcctag

SEQ ID NO: 29192 - DNA, 1317 bp, Artificial Sequence
  derived and/or modified sequence
atggagaacgagcccggcatcgtgagccccttcaagagagtgttcctgaagggcgagaagagcagagacaagaaggcccacgagaaggtgaccgagagaagacccctgcacaccgtggtgctgagcctgcccgagagagtggagcccgacagactgctgagcgactacatcgagaaggaggtgaagtacctgggccagctgaccagcatccccggctacctgaaccccagcagcagaaccgagatcctgcacttcatcgacaacgccaagagagcccaccagctgcccggccacctgacccaggagcacgacgccgtgctgagcctgagcgcctacaacgtgaagctggcctggagagacggcgaggacatcatcctgagagtgcccatccacgacatcgccgccgtgagctacgtgagagacgacgccgcccacctggtggtgctgaagaccgcccaggaccccggcatcagccccagccagagcctgtgcgccgagagcagcagaggcctgagcgccggcagcctgagcgagagcgccgtgggccccgtggaggcctgctgcctggtgatcctggccgccgagagcaaggtggccgccgaggagctgtgctgcctgctgggccaggtgttccaggtggtgtacaccgagagcaccatcgacttcctggacagagccatcttcgacggcgccagcacccccacccaccacctgagcctgcacagcgacgacagcagcaccaaggtggacatcaaggagacctacgaggtggaggccagcaccttctgcttccccgagagcgtggacgtgggcggcgccagcccccacagcaagaccatcagcgagagcgagctgagcgccagcgccaccgagctgctgcaggactacatgctgaccctgagaaccaagctgagcagccaggagatccagcagttcgccgccctgctgcacgagtacagaaacggcgccagcatccacgagttctgcatcaacctgagacagctgtacggcgacagcagaaagttcctgctgctgggcctgagacccttcatccccgagaaggacagccagcacttcgagaacttcctggagaccatcggcgtgaaggacggcagaggcatcatcaccgacagcttcggcagacacagaagagccctgagcaccaccagcagcagcaccaccaacggcaacagagccaccggcagcagcgacgacagaagcgcccccagcgagggcgacgagtgggacagaatgatcagcgacatcagcagcgacatcgaggccctgggctgcagcatggaccaggacagcgcctag

SEQ ID NO: 29193 - protein, 70 aa, Artificial Sequence
  derived and/or modified sequence
MFCHLRPMRRLCLEKIFPHWFPFSRALSGAEAVNALRPFYFAVHPDFFGQHPVERDDTWKSFQCPSDFSL

SEQ ID NO: 29194 - DNA, 1996 bp, Artificial Sequence
  derived and/or modified sequence
ctcctccagcagtccctttccccttcttccccaagatccagcgcgtgctcggttgcccttctccgttccttgcaggcccttgggtcaggacccaccacctgccggaccatcattttccgagtccctccggcctagtcggagtgctcgctcgcgcctcctaaagctctcagccgagcgcgccgagacccctcagggcggccgcaattaatggatgcctcgaagttgacgtacatatatattcagaaatgttttgccacctgagacctatgaggaggttatgtctagagaagatatttccacactggtttcccttttcaagagctttatcgggagctgaagcagtcaatgccttgaggcctttctattttgcagtacatccagatttctttggacagcaccccgtagaaagggatgatacatggaagagttttcaatgccctagtgatttttccttatgatgcatgctgctggaccactcccctacaacatcagttaatgtgtgctccaggaatacaaactgatatgaaaaatgacttatggtagatgtagttaagacagtcaatatattttaacattagaaaatacagtcagtccttcatatccatgggttttacatccatggattcaaccaacctcagactgaaaatattaggggaaaaaaatacatctgtactacacatgaacaaacttctctttcttgtcattattccctgaacaacacaggataacaactacttacatagcacttacattatattagatattataagtaatctagaaatgacttaaagtatatgggaggatacacataggttatttgcaaatactacactattttatatgagagacttgagcattcgcagatttcggtatccacgggaggtcctggaaccaatcccctatggataccaagggactgctatgtattacaaagccacatgctttggaattacttcagtgttccttctattttcattaacactgatatctagtttaatatgaaaaggaacttgaaatcttgaaaattagaacatcgttatttttttctacttgcaatggaaaatctattttgcttttttgcttctaggaaaatattctgattatgatatgtgatatgttggctactcaaagtcagaacttttcaaagtaatcagtaaattgaatcaacagaaaaatattcattaactcggggatgcattaataaagtttttaaattcaaaatgtatagaaaaatcaagcttagtaatactttaatattattctaccaatgtattttttttaattaagacttctgtatgcagcagggcatggtggcacacctgtagtcccagctactagggaggctgaggcaggaggattacttgagcccaggaattcaagcctgggcaacatagtgagtcctcatctcctaaatttaaaaaacaaacaacaaaaacttctacgtgtggtaaagggttaactcagcaagcttgggttgcttaaaccttgcacattccaaagaaaggtctgaccccagtgctgacctttgactggctactgggaaatgagctctgagcccctggataggaatgtttctgtttgcctgaggcctttgaccatgccagatagtttatgctaacaatgtgatttatagtgaatacctgttttcctgtgtctaagaccctgggctgcactgtattaatttgaccttgggtatttggggagctgagactgagtagctgaagtgagtcacataagcactaaatgcttacctgactgacccccagtaaaactctggacatccagacttggatgagcttccttgggtggcaacacttttacgtattgtcacacaccattgctggggggattaagcactgtctgtaaaactccactgtgaaatgacaactggaaacttgcacgtggtctctcctgattctgctctattcaccttttccctttgctgattttaatctccattcttttgttgtaataaaccataatggtgaataaaaca

SEQ ID NO: 29195 - DNA, 2178 bp, Artificial Sequence
  derived and/or modified sequence
ggggaaggcctggcacgctccagccaaccagggcgtcacctgcagctcgtccccctgcccgggcttgcctcgagcgccctgccgccgccggagcggggagggtgttgggggcaggtggagccgggagggcccagctgagaattcagggttgggggctcagagggcactgcggctaggagcccgtcaaagcctgtcgcccaccggggcgagggcaggtgggagcgcctggccgtgcgtcgcgcgctggttggccagctgacgccccagtgcgcatgcgcgtccgaacagccctgcgggcggagcgactgtcctcccttctggtgtactgggtgggaggtggaactagtcggacaaagccctcgcgtcggacccttgccagaactcaattaatggatgcctcgaagttgacgtacatatatattcagaaatgttttgccacctgagacctatgaggaggttatgtctagagaagatatttccacactggtttcccttttcaagagctttatcgggagctgaagcagtcaatgccttgaggcctttctattttgcagtacatccagatttctttggacagcaccccgtagaaagggatgatacatggaagagttttcaatgccctagtgatttttccttatgatgcatgctgctggaccactcccctacaacatcagttaatgtgtgctccaggaatacaaactgatatgaaaaatgacttatggtagatgtagttaagacagtcaatatattttaacattagaaaatacagtcagtccttcatatccatgggttttacatccatggattcaaccaacctcagactgaaaatattaggggaaaaaaatacatctgtactacacatgaacaaacttctctttcttgtcattattccctgaacaacacaggataacaactacttacatagcacttacattatattagatattataagtaatctagaaatgacttaaagtatatgggaggatacacataggttatttgcaaatactacactattttatatgagagacttgagcattcgcagatttcggtatccacgggaggtcctggaaccaatcccctatggataccaagggactgctatgtattacaaagccacatgctttggaattacttcagtgttccttctattttcattaacactgatatctagtttaatatgaaaaggaacttgaaatcttgaaaattagaacatcgttatttttttctacttgcaatggaaaatctattttgcttttttgcttctaggaaaatattctgattatgatatgtgatatgttggctactcaaagtcagaacttttcaaagtaatcagtaaattgaatcaacagaaaaatattcattaactcggggatgcattaataaagtttttaaattcaaaatgtatagaaaaatcaagcttagtaatactttaatattattctaccaatgtattttttttaattaagacttctgtatgcagcagggcatggtggcacacctgtagtcccagctactagggaggctgaggcaggaggattacttgagcccaggaattcaagcctgggcaacatagtgagtcctcatctcctaaatttaaaaaacaaacaacaaaaacttctacgtgtggtaaagggttaactcagcaagcttgggttgcttaaaccttgcacattccaaagaaaggtctgaccccagtgctgacctttgactggctactgggaaatgagctctgagcccctggataggaatgtttctgtttgcctgaggcctttgaccatgccagatagtttatgctaacaatgtgatttatagtgaatacctgttttcctgtgtctaagaccctgggctgcactgtattaatttgaccttgggtatttggggagctgagactgagtagctgaagtgagtcacataagcactaaatgcttacctgactgacccccagtaaaactctggacatccagacttggatgagcttccttgggtggcaacacttttacgtattgtcacacaccattgctggggggattaagcactgtctgtaaaactccactgtgaaatgacaactggaaacttgcacgtggtctctcctgattctgctctattcaccttttccctttgctgattttaatctccattcttttgttgtaataaaccataatggtgaataaaaca

SEQ ID NO: 29196 - DNA, 213 bp, Artificial Sequence
  derived and/or modified sequence
atgttctgccacctgagacccatgagaagactgtgcctggagaagatcttcccccactggttccccttcagcagagccctgagcggcgccgaggccgtgaacgccctgagacccttctacttcgccgtgcaccccgacttcttcggccagcaccccgtggagagagacgacacctggaagagcttccagtgccccagcgacttcagcctgtag

SEQ ID NO: 29197 - DNA, 213 bp, Artificial Sequence
  derived and/or modified sequence
atgttctgccatctgcggccgatgcggcggctgtgcttagagaagatctttcctcactggtttccattctctagagccctgagcggcgcggaagccgtcaacgctctacgacctttctattttgctgtacacccagacttcttcggccagcacccagtcgagagggatgatacatggaagtccttccaatgtccatctgacttttctctgtag

SEQ ID NO: 29198 - DNA, 213 bp, Artificial Sequence
  derived and/or modified sequence
atgttctgtcatctgcgcccaatgcggagactctgtctggagaaaatttttcctcattggtttcctttctcccgagccctcagtggggccgaggccgtaaatgcactaagaccattctacttcgcggtgcatcccgattttttcggacaacaccctgtagagagagacgatacctggaagtccttccagtgcccctccgacttcagtctctag

SEQ ID NO: 29199 - DNA, 213 bp, Artificial Sequence
  derived and/or modified sequence
atgttctgccacctgcggcccatgaggcggctgtgcctggagaagatcttcccccactggttccccttcagccgggccctgagcggggctgaggccgtgaatgccctgcggcccttctactttgctgtgcacccagacttcttcggccagcaccctgtggagagagatgacacctggaagagcttccagtgccccagcgacttcagcctgtag

SEQ ID NO: 29200 - DNA, 213 bp, Artificial Sequence
  derived and/or modified sequence
atgttctgccacctgcggcccatgcggcggctgtgcctggagaagatcttcccacactggttcccattcagtcgtgccttgtctggcgccgaagccgtgaacgccctgcgccctttttacttcgctgttcatccagatttttttgggcagcacccagtcgaacgggatgacacctggaaatcgttccaatgtccctccgattttagcctctag

SEQ ID NO: 29201 - DNA, 213 bp, Artificial Sequence
  derived and/or modified sequence
atgttctgccacctgcggcccatgcggcggctgtgcctggagaagattttcccccactggtttccgttctcccgggccctgagtggcgcagaagcagtcaacgcactcaggcccttctactttgccgtgcatcctgatttttttggccagcaccccgtggaaagagacgacacttggaaatcttttcaatgcccttccgacttcagtttatag

SEQ ID NO: 29202 - DNA, 213 bp, Artificial Sequence
  derived and/or modified sequence
atgttttgccatctcagaccaatgcgcaggctgtgtctcgagaagatctttcctcactggttccccttttccagagcgttgtcaggtgctgaagctgtgaatgctctgcggcctttttactttgccgtccatcccgatttcttcggccagcaccccgtcgagagagatgacacctggaagtcctttcagtgtccaagcgacttcagcctctag

SEQ ID NO: 29203 - DNA, 213 bp, Artificial Sequence
  derived and/or modified sequence
atgttctgccatctgcgcccaatgagacgcttgtgtcttgaaaagatctttccccattggttcccattttccagggcgttaagcggcgctgaggctgtgaatgcactgcgaccattttactttgctgtgcatcctgatttttttgggcaacaccccgtagaaagagatgatacatggaagtcatttcaatgcccctcagacttcagtttgtag

SEQ ID NO: 29204 - protein, 788 aa, Artificial Sequence
  derived and/or modified sequence
MGCAPSIHVSQSGVIYCRDSDESSSPRQTTSVSQGPAAPLPGLFVQTDAADAIPPSRASGPPSVARVRRARTELGSGSSAGSAAPAATTSRGRRRHCCSSAEAETQTCYTSVKQVSSAEVRIGPMRLTQDPIQVLLIFAKEDSQSDGFWWACDRAGYRCNIARTPESALECFLDKHHEIIVIDHRQTQNFDAEAVCRSIRATNPSEHTVILAVVSRVSDDHEEASVLPLLHAGFNRRFMENSSIIACYNELIQIEHGEVRSQFKLRACNSVFTALDHCHEAIEITSDDHVIQIHKIHRDSGDNSQTEPHSFRYKNRRKESIDVKSISSRGSDAPSLQNRRYPSMARIHSMTIEAPITKVINIINAAQENSPVTVAEALDRVLEILRTTELYSPQLGTKDEDPHTSDLVGGLMTDGLRRLSGNEYVFTKNVHQSHSHLAMPITINDVPPCISQLLDNEESWDFNIFELEAITHKRPLVYLGLKVFSRFGVCEFLNCSETTLRAWFQVIEANYHSSNAYHNSTHAADVLHATAFFLGKERVKGSLDQLDEVAALIAATVHDVDHPGRTNSFLCNAGSELAVLYNDTAVLESHHTALAFQLTVKDTKCNIFKNIDRNHYRTLRQAIIDMVLATEMTKHFEHVNKFVNSINKPMAAEIEGSDCECNPAGKNFPENQILIKRMMIKCADVANPCRPLDLCIEWAGRISEEYFAQTDEEKRQGLPVVMPVFDRNTCSIPKSQISFIDYFITDMFDAWDAFAHLPALMQHLADNYKHWKTLDDLKCKSLRLPSDS

SEQ ID NO: 29205 - DNA, 2367 bp, Artificial Sequence
  derived and/or modified sequence
atgggctgtgcaccttccatccatgtctcacaatcaggggtgatttactgtcgggacagcgatgagagctcatcgcctagacagaccacctctgtgtcccaggggccagcagcccctctcccaggcctgttcgtgcagacagatgctgctgacgccatccccccgtccagggcaagcgggccacccagtgtggcccgagttcgtcgcgcccggacagaactgggatccggaagctcagccggctccgcagcccctgctgcgacgacgagcaggggccgtaggagacactgctgttcttccgccgaagctgaaactcagacttgctataccagtgtgaagcaggtttcctcagccgaagttagaatcggaccaatgagactgacccaagacccaatccaggtgctcttgatcttcgcaaaggaggatagccagagcgacgggttttggtgggcctgtgacagagcaggctatagatgcaatatcgctagaacccccgagagtgccctcgagtgttttctcgataagcaccacgaaattatcgtcatcgaccacagacaaactcagaatttcgatgctgaggccgtgtgtagatctatccgcgcaactaaccccagcgagcacaccgtgatccttgcggtcgtgtctcgggttagtgacgaccacgaggaagcatccgtcttgcccctgctgcacgccggttttaataggcggtttatggagaatagctctataatagcatgctacaatgagctaatccagatcgagcacggcgaagtccgatcccagtttaagctgagagcttgcaacagtgtgtttacggcactcgaccactgtcacgaagcaatcgaaattacgagcgatgaccatgtgattcaaattcataagattcaccgtgactctggtgacaatagccagacggagccccatagctttaggtataagaatcggagaaaagagtccattgatgtgaaatctatcagctctcgcggctctgacgcaccttctctgcagaatcggagataccctagcatggcccggatccattccatgacgatagaggctcccatcaccaaggtgatcaatattataaacgcagctcaagagaattcgcctgtgacggttgccgaggcactggacagggtgctggagatcctacggaccacagagctgtacagtccacagctgggcaccaaagacgaggacccccacacgagcgaccttgttggtggactcatgacggacggactgcgcaggctatcagggaacgagtacgtgttcaccaaaaatgtacaccaatcacactcacatctcgcaatgcccataactatcaacgatgtgccaccatgtataagtcagctgctcgataacgaggagtcctgggacttcaacatttttgagcttgaggccatcacacataaacgaccccttgtgtatctagggctgaaagtattctcccggtttggggtttgtgaattcctcaactgtagtgagactaccctgcgcgcatggtttcaagtgatcgaagccaattaccacagtagcaatgcctaccacaatagcacccatgcagctgatgtacttcacgccaccgctttctttctaggcaaggagagggtaaagggatctcttgaccagttagacgaagtcgcagccttgattgccgctacagttcatgacgtcgaccatcctgggcgcaccaattctttcctgtgcaatgccggcagcgagctagcagtgctgtacaacgataccgcagtgctggagagccaccatactgccttggcttttcagcttaccgttaaggacactaagtgtaacatatttaagaacatcgaccgaaaccactatcgcactctccggcaggcaatcatcgacatggtgttggctacagaaatgaccaagcatttcgagcatgtgaacaagttcgttaattccattaataaacctatggcagcggagatcgaggggtcagactgtgagtgcaaccctgctgggaaaaacttcccagagaaccagattctcataaaaagaatgatgatcaagtgcgccgacgttgccaacccatgccgacctcttgatttgtgcattgagtgggctggcaggatttcagaggagtatttcgcccaaaccgatgaagagaagcgccagggattgccggtggtgatgccagtcttcgacagaaatacttgctctattccaaagtcccagatcagttttatcgattacttcattacagatatgttcgatgcctgggacgcattcgctcatttgcctgccctcatgcaacacctcgctgacaactacaaacactggaaaacactggatgatctgaaatgcaagagtctgaggcttccctcagactcctag

SEQ ID NO: 29206 - DNA, 2367 bp, Artificial Sequence
  derived and/or modified sequence
atgggctgtgcccccagcatccacgtgtcccagagcggggtcatctactgccgggacagtgatgagagcagcagcccccggcagaccacctctgtgtcccagggccctgctgcccccctgcccggcctgtttgtgcagacagatgctgctgatgccatcccccccagccgggccagcggccccccatctgtggcccgggtgcggcgggccaggacagagctgggcagcggcagcagcgctggcagcgctgccccagctgccaccaccagccggggcagaagaagacactgctgcagcagcgctgaggccgagacccagacctgctacacctctgtgaagcaggtgtcctctgctgaggtgcgcatcggccccatgaggctgacccaggaccccatccaggtgctgctgatctttgccaaggaggacagccagagtgatggcttctggtgggcctgtgacagagctggctaccgctgcaacatcgcccggaccccagagagcgccctggagtgcttcctggacaagcaccacgagatcatcgtcatcgaccaccggcagacccagaactttgatgctgaggccgtgtgccgcagcatccgggccaccaaccccagcgagcacacagtcatcctggccgtggtgtcccgggtgtctgatgaccacgaggaggcctctgtgctgcccctgctgcacgccggcttcaacagacgcttcatggagaacagcagcatcatcgcctgctacaatgaactcatccagatcgagcacggggaggtgcgcagccagttcaagctgcgggcctgcaacagcgtcttcaccgccctggaccactgccacgaggccatcgagatcaccagtgatgaccacgtgatccagatccacaagatccaccgggacagcggggacaacagccagacagagccccacagcttccgctacaagaacagaaggaaggagagcattgatgtgaagagcatcagcagccggggcagtgatgcccccagcctgcagaacagacgctaccccagcatggcccgcatccacagcatgaccatcgaggcccccatcaccaaggtgatcaacatcatcaatgctgcccaggagaacagccctgtgacagtggccgaggccctggacagagtgctggagatcctgcggaccacagagctgtacagcccccagctgggcaccaaggatgaggacccccacaccagtgacctggtgggcggcctgatgacagatggcctgcggcggctgtctggaaatgaatatgtgttcaccaagaatgtgcaccagagccacagccacctggccatgcccatcaccatcaatgatgtgcccccctgcatcagccagctgctggacaatgaggagagctgggacttcaacatctttgagctggaggccatcacccacaagaggcccctggtgtacctgggcctgaaggtgttcagcagatttggagtgtgtgagttcctgaactgcagcgagaccaccctgcgggcctggttccaggtgattgaggccaactaccacagcagcaatgcctaccacaacagcacccatgctgctgatgtgctgcacgccacagccttcttcctgggcaaggagcgggtgaagggcagcctggaccagctggatgaggtggccgccctgattgctgccaccgtgcatgatgtggaccaccctggccgcaccaacagcttcctgtgcaatgccggcagcgagctggccgtgctgtacaatgacacagctgtgctggagagccaccacacagccctggccttccagctgactgtgaaggacaccaagtgcaacatcttcaagaacatcgacaggaaccactaccgcaccctgcggcaggccatcatcgacatggtgctggccacagagatgaccaagcactttgagcacgtgaacaagtttgtgaacagcatcaacaagcccatggctgctgagattgagggcagtgactgtgagtgcaacccagctgggaagaacttccctgagaaccagatcctgatcaagaggatgatgatcaagtgtgctgatgtggccaacccctgccggcccctggacctgtgcatcgagtgggccggccgcatcagcgaggagtactttgcccagacagatgaggagaagaggcagggcctgcctgtggtgatgcctgtgtttgacaggaacacctgcagcatccccaagagccagatctccttcatcgactacttcatcacagacatgtttgatgcctgggatgcctttgcccacctgcctgccctgatgcagcacctggccgacaactacaagcactggaagaccctggatgacctgaagtgcaagagcctgcggctgcccagcgacagctag

SEQ ID NO: 29207 - DNA, 2367 bp, Artificial Sequence
  derived and/or modified sequence
atgggctgcgcccccagcatccacgtgagccagagcggcgtgatctactgcagggatagtgacgagtccagctcacctaggcaaaccaccagtgtttcacaaggacctgcagcccctctgcccggattgttcgtccagactgatgcagctgacgctatccccccttctcgtgcatccggccctcctagtgtggcccgcgtgaggcgggccaggaccgaactgggcagtggcagctccgccggatcggctgcacccgcggccacaacaagcagaggacggcggagacactgttgtagctccgccgaagccgaaacacagacatgctacacctccgtgaaacaagtgtcaagcgctgaggtgcgcatcggcccaatgaggctcacacaggatcccattcaggtcttgctgatttttgcaaaggaagattcccagtccgatggcttctggtgggcctgcgacagggccggctatagatgcaatatcgctagaactcccgagtccgctctggaatgctttctggacaagcatcacgaaattattgtaatcgatcacaggcaaacacaaaactttgacgctgaagccgtgtgccgttctatacgagcaactaaccctagtgagcacactgtaattctggcagtagtgagccgcgtgagtgatgaccacgaggaagcaagcgtgctgcctctgctgcacgctggttttaatcggcggtttatggagaactcatctatcatcgcctgctataatgaacttatacagattgaacacggcgaagtgcggagtcagtttaagctgagggcttgcaatagtgttttcaccgccctggaccactgtcatgaggcaatcgaaattacaagcgatgaccacgtcatacagatccataaaatacatcgagactcaggagataacagccagaccgagccacactcctttcgatacaagaatagaagaaaggaatcaatcgatgtgaagtcaataagcagtcgcgggagcgatgctccttccctccagaaccgtcgctacccgagtatggcaaggattcattctatgaccatcgaggctccgatcaccaaggtgatcaacatcattaacgccgcacaggaaaatagcccagtcaccgtggcagaagcgttggaccgcgtgctcgagattttgagaactactgagctctactctccccagctggggactaaggatgaagatccccatacaagcgatctggtgggagggcttatgacagacgggcttcggcgcctgtccgggaatgaatacgtgtttaccaaaaacgtccaccagtctcactcccatctggccatgccaatcacaatcaacgatgtgcctccctgtattagccagttacttgacaatgaagaaagctgggatttcaatatattcgagctcgaagctatcactcataagaggcctctcgtatacctaggtctcaaagtcttcagccgctttggtgtgtgtgagtttttgaactgctcggaaacgacactaagggcctggttccaggttatagaggccaattaccacagtagcaatgcctaccacaacagtacacacgcagcggacgttctgcacgccactgcatttttcttggggaaagagcgcgtgaaaggtagcttagaccagttggacgaagttgcggcactgattgctgccacagtgcatgatgtggaccacccagggagaactaacagcttcctgtgtaatgccggatcggaactcgctgttttatataatgatacagctgtgctcgagtcacaccacacggcccttgctttccagctgacagtcaaggacacgaagtgtaacatcttcaagaatattgaccgcaaccactaccgcactctccggcaggcgatcatcgacatggttttagccacagagatgacaaagcatttcgagcacgtcaataagttcgtgaattcaatcaacaagccaatggccgctgaaattgaagggtccgattgcgaatgtaatcccgctggaaaaaatttccccgagaaccaaatcttgattaagcgcatgatgatcaagtgcgccgacgtggcaaacccttgtaggcctctggacctctgtattgagtgggccgggcgcatcagtgaagagtactttgcccaaaccgatgaagaaaaacgccagggactgcctgtagtaatgcctgtgtttgatcgcaacacatgcagcatcccaaagagccagataagttttatcgattactttatcaccgatatgtttgacgcttgggacgcattcgcccacttgcctgctctgatgcagcacttggctgacaactacaaacattggaagacactggacgatttgaaatgcaaatctctgcgcctgccatccgactcttag

SEQ ID NO: 29208 - DNA, 3276 bp, Artificial Sequence
  derived and/or modified sequence
gcggccgcgggcgcgggcgggcgcgcgggggagcccggccgagggatgggctgcgcccccagcatccatgtctcgcagagcggcgtgatctactgccgggactcggacgagtccagctcgccccgccagaccaccagcgtgtcgcagggcccggcggcacccctgcccggcctcttcgtccagaccgacgccgccgacgccatccccccgagccgcgcgtcgggaccccccagcgtagcccgcgtccgcagggcccgcaccgagctgggcagcggtagcagcgcgggttccgcagcccccgccgcgaccaccagcaggggccggaggcgccactgctgcagcagcgccgaggccgagactcagacctgctacaccagcgtgaagcaggtgtcttctgcggaggtgcgcatcgggcccatgagactgacgcaggaccctattcaggttttgctgatctttgcaaaggaagatagtcagagcgatggcttctggtgggcctgcgacagagctggttatagatgcaatattgctcggactccagagtcagcccttgaatgctttcttgataagcatcatgaaattattgtaattgatcatagacaaactcagaacttcgatgcagaagcagtgtgcaggtcgatccgggccacaaatccctccgagcacacggtgatcctcgcagtggtttcgcgagtatcggatgaccatgaagaggcgtcagtccttcctcttctccacgcaggcttcaacaggagatttatggagaatagcagcataattgcttgctataatgaactgattcaaatagaacatggggaagttcgctcccagttcaaattacgggcctgtaattcagtgtttacagcattagatcactgtcatgaagccatagaaataacaagcgatgaccacgtgattcagattcacaagattcatcgtgattcaggagacaattctcagacagagcctcattcattcagatataagaacaggaggaaagagtccattgacgtgaaatcgatatcatctcgaggcagtgatgcaccaagcctgcagaatcgtcgctatccgtccatggcgaggatccactccatgaccatcgaggctcccatcacaaaggttataaatataatcaatgcagcccaagaaaacagcccagtcacagtagcggaagccttggacagagttctagagattttacggaccacagaactgtactcccctcagctgggtaccaaagatgaagatcctcacaccagtgatcttgttggaggcctgatgactgacggcttgagaagactgtcaggaaacgagtatgtgtttactaagaatgtgcaccagagtcacagtcaccttgcaatgccaataaccatcaatgatgttcccccttgtatctctcaattacttgataatgaggagagttgggacttcaacatctttgaattggaagccattacgcataaaaggccattggtttatctgggcttaaaggtcttctctcggtttggagtatgtgaatttttaaactgttctgaaaccactcttcgggcctggttccaagtgatcgaagccaactaccactcttccaatgcctaccacaactccacccatgctgccgacgtcctgcacgccaccgctttctttcttggaaaggaaagagtaaagggaagcctcgatcagttggatgaggtggcagccctcattgctgccacagtccatgacgtggatcacccgggaaggaccaactctttcctctgcaatgcaggcagtgagcttgctgtgctctacaatgacactgctgttctggagagtcaccacaccgccctggccttccagctcacggtcaaggacaccaaatgcaacattttcaagaatattgacaggaaccattatcgaacgctgcgccaggctattattgacatggttttggcaacagagatgacaaaacactttgaacatgtgaataagtttgtgaacagcatcaacaagccaatggcagctgagattgaaggcagcgactgtgaatgcaaccctgctgggaagaacttccctgaaaaccaaatcctgatcaaacgcatgatgattaagtgtgctgacgtggccaacccatgccgccccttggacctgtgcattgaatgggctgggaggatctctgaggagtattttgcacagactgatgaagagaagagacagggactacctgtggtgatgccagtgtttgaccggaatacctgtagcatccccaagtctcagatctctttcattgactacttcataacagacatgtttgatgcttgggatgcctttgcacatctgccagccctgatgcaacatttggctgacaactacaaacactggaagacactagatgacctaaagtgcaaaagtttgaggcttccatctgacagctaaagccaagccacagagggggcctcttgaccgacaaaggacactgtgaatcacagtagcgtaaacgagaggccttcctttctaatgacaatgacaggtattggtgaaggagctaatgtttaatatttgaccttgaatcattcaagtccccaaatttcattcttagaaagttatgttccatgaagaaaaatatatgttcttttgaatacttaatgacagaacaaatacttggcaaactcctttgctctgctgtcatcctgtgtacccttgtcaatccatggagctggttcactgtaactagcaggccacaggaagcaaagccttggtgcctgtgagctcatctcccaggatggtgactaagtagcttagctagtgatcagctcatcctttaccataaaagtcatcattgctgtttagcttgactgttttcctcaagaacatcgatctgaaggattcataaggagcttatctgaacagatttatctaagaaaaaaaaaaaacgacataaaataagtgaaacaactaggaccaaattacagataaactagttagcttcacagcctctatggctacatggttcttctggccgatggtatgacacctaagttagaacacagccttggctggtgggtgccctctctagactggtatcagcagcctgtgtaacccctttcctgtaaaaggggttcatcttaacaaagtcatccatgatgagggaaaaagtggcatttcatttttggggaatccatgagcttcctttatttctggctcacagaggcagccacgaggcactacaccaagtattatataaaagccattaaatttgaatgcccttggacaagcttttcttaaaaaaaaaaaaaaaaa

SEQ ID NO: 29209 - DNA, 2367 bp, Artificial Sequence
  derived and/or modified sequence
atgggctgcgccccttcaatccatgtgagtcagagtggagtgatttattgcagggattcggacgagagttccagccctagacagacaactagtgtaagccagggacccgcagctcctttgccagggctatttgttcagacagatgctgcagatgccattccgccatcgcgcgcatccgggccacctagcgtggcccgagtgcgcagggcacgaaccgagttaggctcgggctcttccgcaggcagcgcggcacctgccgctactacgagccgtgggagaaggagacactgttgtagtagcgctgaagctgagacacagacctgttatacatctgtaaagcaggtgagcagtgccgaagtcagaataggacctatgcggctcacacaggatccaatccaagtgctcctgatctttgctaaggaggatagtcagagcgacggattttggtgggcatgtgacagagccggatataggtgtaacattgcccgtactcccgaaagcgcactggagtgtttccttgacaagcaccacgaaattatcgtcatagaccatcggcagacccagaactttgacgccgaggccgtgtgtaggtcaatacgggcaacaaacccatcagaacatactgtaatcctggccgttgtgagccgggtatctgatgaccacgaagaagcatccgtgctccctctccttcatgctggttttaatcgcagattcatggagaattcatcaatcatagcctgctataatgagctgatccagatcgagcatggcgaggtgagatcccagttcaaacttcgcgcatgcaactccgtcttcacggcactggaccactgccatgaagcaatcgagatcacgtccgatgaccacgtgatacagatacataagatccaccgcgactccggtgacaactcccagactgagccccattctttccgctacaaaaataggagaaaagagtcgatcgacgtcaagtcaatcagctcccgcggttcagacgccccaagcctgcaaaacagacgatacccttccatggccaggattcactcaatgacaattgaggccccaattacgaaagtaattaacattatcaacgctgcccaggagaactctcctgtgactgttgctgaagccctggatcgtgttctggagatcttgaggaccacagagctgtactcaccccagctggggaccaaggatgaagatccacacacttctgatctggttggcggacttatgaccgatggactcagacggctgagcggaaacgagtatgttttcactaagaatgttcaccaatctcatagtcacctggcgatgccaatcacaattaatgatgtgcccccttgcatttcccagttgctcgacaatgaagaatcatgggattttaacattttcgagctggaagcaattacacacaaaaggcccttagtttatctcggtctgaaagtgtttagtaggtttggtgtgtgcgaattcctcaattgcagcgagactactctccgcgcttggttccaggtgatcgaagccaattaccactccagcaacgcttatcacaacagcacccatgcggctgatgtactgcacgccaccgcctttttccttggcaaggaacgagtaaagggttcactggatcagcttgacgaggttgccgcactgattgctgctactgtgcacgatgtggaccacccagggagaacaaacagctttctatgtaacgctggctctgagctcgccgttctgtataacgatacagcagtactagaaagccaccatactgctctggccttccagctgactgtgaaagacactaaatgtaatatctttaagaatatagatcggaaccactaccgaacgctgcggcaggctatcattgatatggttctggcaaccgagatgacaaagcacttcgagcacgtgaacaaatttgttaactcaatcaataagccgatggccgcagagatcgaaggcagtgactgcgaatgcaatccagcagggaaaaactttcccgagaatcagatccttatcaagcgcatgatgatcaaatgtgcggatgtcgcaaatccatgtaggccattagacctttgcatcgagtgggctggccgaatctccgaagagtacttcgcacagacagacgaagagaaaagacagggactgcccgtggtcatgccagtctttgaccgaaatacatgttccataccgaagtcccaaatttccttcatagactatttcataaccgacatgtttgacgcttgggacgctttcgcccacttacctgcgctgatgcagcacctcgcagacaactacaagcactggaagacactagacgatctgaagtgtaaaagcttaaggttaccctcagatagctag

SEQ ID NO: 29210 - DNA, 2367 bp, Artificial Sequence
  derived and/or modified sequence
atgggctgcgcccccagcatccacgtgagccagagcggcgtgatctactgcagagacagcgacgagagcagcagccccagacagaccaccagcgtgagccagggccccgccgcccccctgcccggcctgttcgtgcagaccgacgccgccgacgccatcccccccagcagagccagcggcccccccagcgtggccagagtgagaagagccagaaccgagctgggcagcggcagcagcgccggcagcgccgcccccgccgccaccaccagcagaggcagaagaagacactgctgcagcagcgccgaggccgagacccagacctgctacaccagcgtgaagcaggtgagcagcgccgaggtgagaatcggccccatgagactgacccaggaccccatccaggtgctgctgatcttcgccaaggaggacagccagagcgacggcttctggtgggcctgcgacagagccggctacagatgcaacatcgccagaacccccgagagcgccctggagtgcttcctggacaagcaccacgagatcatcgtgatcgaccacagacagacccagaacttcgacgccgaggccgtgtgcagaagcatcagagccaccaaccccagcgagcacaccgtgatcctggccgtggtgagcagagtgagcgacgaccacgaggaggccagcgtgctgcccctgctgcacgccggcttcaacagaagattcatggagaacagcagcatcatcgcctgctacaacgagctgatccagatcgagcacggcgaggtgagaagccagttcaagctgagagcctgcaacagcgtgttcaccgccctggaccactgccacgaggccatcgagatcaccagcgacgaccacgtgatccagatccacaagatccacagagacagcggcgacaacagccagaccgagccccacagcttcagatacaagaacagaagaaaggagagcatcgacgtgaagagcatcagcagcagaggcagcgacgcccccagcctgcagaacagaagataccccagcatggccagaatccacagcatgaccatcgaggcccccatcaccaaggtgatcaacatcatcaacgccgcccaggagaacagccccgtgaccgtggccgaggccctggacagagtgctggagatcctgagaaccaccgagctgtacagcccccagctgggcaccaaggacgaggacccccacaccagcgacctggtgggcggcctgatgaccgacggcctgagaagactgagcggcaacgagtacgtgttcaccaagaacgtgcaccagagccacagccacctggccatgcccatcaccatcaacgacgtgcccccctgcatcagccagctgctggacaacgaggagagctgggacttcaacatcttcgagctggaggccatcacccacaagagacccctggtgtacctgggcctgaaggtgttcagcagattcggcgtgtgcgagttcctgaactgcagcgagaccaccctgagagcctggttccaggtgatcgaggccaactaccacagcagcaacgcctaccacaacagcacccacgccgccgacgtgctgcacgccaccgccttcttcctgggcaaggagagagtgaagggcagcctggaccagctggacgaggtggccgccctgatcgccgccaccgtgcacgacgtggaccaccccggcagaaccaacagcttcctgtgcaacgccggcagcgagctggccgtgctgtacaacgacaccgccgtgctggagagccaccacaccgccctggccttccagctgaccgtgaaggacaccaagtgcaacatcttcaagaacatcgacagaaaccactacagaaccctgagacaggccatcatcgacatggtgctggccaccgagatgaccaagcacttcgagcacgtgaacaagttcgtgaacagcatcaacaagcccatggccgccgagatcgagggcagcgactgcgagtgcaaccccgccggcaagaacttccccgagaaccagatcctgatcaagagaatgatgatcaagtgcgccgacgtggccaacccctgcagacccctggacctgtgcatcgagtgggccggcagaatcagcgaggagtacttcgcccagaccgacgaggagaagagacagggcctgcccgtggtgatgcccgtgttcgacagaaacacctgcagcatccccaagagccagatcagcttcatcgactacttcatcaccgacatgttcgacgcctgggacgccttcgcccacctgcccgccctgatgcagcacctggccgacaactacaagcactggaagaccctggacgacctgaagtgcaagagcctgagactgcccagcgacagctag

SEQ ID NO: 29211 - protein, 830 aa, Artificial Sequence
  derived and/or modified sequence
MGCAPSIHVSQSGVIYCRDSDESSSPRQTTSVSQGPAAPLPGLFVQTDAADAIPPSRASGPPSVARVRRARTELGSGSSAGSAAPAATTSRGRRRHCCSSAEAETQTCYTSVKQVSSAEVRIGPMRLTQDPIQVLLIFAKEDSQSDGFWWACDRAGYRCNIARTPESALECFLDKHHEIIVIDHRQTQNFDAEAVCRSIRATNPSEHTVILAVVSRVSDDHEEASVLPLLHAGFNRRFMENSSIIACYNELIQIEHGEVRSQFKLRACNSVFTALDHCHEAIEITSDDHVIQYVNPAFERMMGYHKGELLGKELADLPKSDKNRADLLDTINTCIKKGKEWQGVYYARRKSGDSIQQHVKITPVIGQGGKIRHFVSLKKLCCTTDNNKQIHKIHRDSGDNSQTEPHSFRYKNRRKESIDVKSISSRGSDAPSLQNRRYPSMARIHSMTIEAPITKDGLRRLSGNEYVFTKNVHQSHSHLAMPITINDVPPCISQLLDNEESWDFNIFELEAITHKRPLVYLGLKVFSRFGVCEFLNCSETTLRAWFQVIEANYHSSNAYHNSTHAADVLHATAFFLGKERVKGSLDQLDEVAALIAATVHDVDHPGRTNSFLCNAGSELAVLYNDTAVLESHHTALAFQLTVKDTKCNIFKNIDRNHYRTLRQAIIDMVLATEMTKHFEHVNKFVNSINKPMAAEIEGSDCECNPAGKNFPENQILIKRMMIKCADVANPCRPLDLCIEWAGRISEEYFAQTDEEKRQGLPVVMPVFDRNTCSIPKSQISFIDYFITDMFDAWDAFAHLPALMQHLADNYKHWKTLDDLKCKSLRLPSDS

SEQ ID NO: 29212 - DNA, 2493 bp, Artificial Sequence
  derived and/or modified sequence
atgggatgcgccccctcaattcacgtgtcacagagcggggtgatttattgcagggactcagatgagtctagtagtcccaggcagactacgtcagtgtcgcaggggccagcagcacccctgcctggtcttttcgtccaaacagacgctgccgacgcaattcccccatcccgggcaagcggtcctccatctgtcgcacgcgtgcggagagcccgcaccgagttagggagtggcagcagcgccggcagcgcggctcccgctgcaaccaccagtagaggccgccgaaggcattgctgcagttctgctgaggctgaaacccagacctgctacaccagtgtgaaacaggtgtctagcgcggaggtgagaattgggcctatgcgcttaactcaggacccaatccaggtacttctaatttttgccaaggaggactcacagtccgatgggttttggtgggcctgcgatagggcgggctatcggtgtaacatagctaggacgcccgagagtgctctggagtgctttctggataagcaccacgaaatcattgtcatcgaccaccgacagactcagaactttgatgctgaagccgtctgccgaagtattagggccaccaatcccagcgaacacactgtcattctggcagtggtgtcgcgagtcagcgatgaccacgaggaggcatctgtcttgcccctgctccacgctggctttaaccgtaggttcatggagaacagcagtataatagcctgctacaatgagctgatccagatcgagcacggagaggtcaggtcccaattcaagctcagagcatgtaattctgtctttactgccctggatcactgtcatgaagcaatcgaaattacctctgatgatcatgtgattcaatacgtgaatccagcattcgagaggatgatgggttaccataaaggcgaactgctcggtaaggaacttgcagacctcccaaagtcggacaagaatcgagccgacctgcttgatacgattaacacctgtatcaaaaagggcaaagaatggcagggagtgtattacgcccggaggaaatctggggacagcatccaacagcacgtgaaaataacccctgtgataggacaaggtggaaaaatccgccattttgtgagcctaaagaagttgtgttgtactactgacaacaataaacagatccacaagatacacagagactccggcgataactcacaaacggaaccgcattcctttcggtacaagaataggagaaaggagagcattgacgttaagagtatctcgtctaggggtagtgatgctccttctctgcagaatcgcaggtacccaagtatggctcgaatacactccatgacgatagaggccccaatcaccaaggacgggttacggaggttgtccgggaacgaatacgtgttcacaaagaatgtgcatcaatcccattcccaccttgcaatgcctatcactatcaacgacgtccctccgtgtattagccagctgttggataatgaggagagttgggactttaatatttttgaattagaggccataacacacaagcgtcccctggtgtatctgggactgaaagtgtttagcaggtttggcgtttgcgagttccttaactgttcagagaccaccctgcgtgcttggtttcaagtgattgaggccaactatcactcgagcaatgcctatcacaactccacccacgccgcagatgttctgcacgcaaccgctttctttctgggcaaggagcgcgtcaaaggctcactagaccaactggacgaggtagcagccttaattgccgccacggttcatgacgttgaccaccccggacgcactaattcctttctgtgcaatgccggctcagagcttgccgtgctgtataacgataccgctgtgttggagagtcatcataccgcgcttgcgttccagctgaccgtgaaggatacaaagtgtaacatcttcaaaaatatagatcgaaaccattaccgaacattgcgacaggctattatcgacatggtgttagcaacagaaatgactaaacattttgagcacgttaacaaattcgttaacagcatcaataagcctatggccgctgaaatagaggggtcagattgcgagtgtaaccccgccgggaaaaacttccccgagaatcagatcctgatcaagaggatgatgatcaagtgcgccgacgtggcgaacccttgtcgaccactcgatttgtgtatcgagtgggccggtcgcatatctgaagaatactttgcccagacggacgaggaaaagaggcaaggcctgcctgtagtgatgcccgtttttgacagaaacacgtgtagtattccgaagtcacagatcagttttattgactatttcattactgatatgtttgatgcctgggatgcttttgctcacctgcctgctttaatgcagcacctggcagacaattataagcactggaaaactctagacgatcttaaatgcaagagcctgcgactgcctagcgattcttag

SEQ ID NO: 29213 - DNA, 2493 bp, Artificial Sequence
  derived and/or modified sequence
atgggctgtgcccccagcatccacgtgtcccagagcggggtcatctactgccgggacagtgatgagagcagcagcccccggcagaccacctctgtgtcccagggccctgctgcccccctgcccggcctgtttgtgcagacagatgctgctgatgccatcccccccagccgggccagcggccccccatctgtggcccgggtgcggcgggccaggacagagctgggcagcggcagcagcgctggcagcgctgccccagctgccaccaccagccggggcagaagaagacactgctgcagcagcgctgaggccgagacccagacctgctacacctctgtgaagcaggtgtcctctgctgaggtgcgcatcggccccatgaggctgacccaggaccccatccaggtgctgctgatctttgccaaggaggacagccagagtgatggcttctggtgggcctgtgacagagctggctaccgctgcaacatcgcccggaccccagagagcgccctggagtgcttcctggacaagcaccacgagatcatcgtcatcgaccaccggcagacccagaactttgatgctgaggccgtgtgccgcagcatccgggccaccaaccccagcgagcacacagtcatcctggccgtggtgtcccgggtgtctgatgaccacgaggaggcctctgtgctgcccctgctgcacgccggcttcaacagacgcttcatggagaacagcagcatcatcgcctgctacaatgaactcatccagatcgagcacggggaggtgcgcagccagttcaagctgcgggcctgcaacagcgtcttcaccgccctggaccactgccacgaggccatcgagatcaccagtgatgaccacgtgatccagtatgtgaacccagcctttgagaggatgatgggctaccacaagggggagctgctgggcaaggagctggccgacctgcccaagagtgacaagaacagagctgacctgctggacaccatcaacacctgcatcaagaagggcaaggagtggcagggcgtgtactatgcccggaggaagagcggggacagcatccagcagcacgtgaagatcacccctgtgattggccagggcggcaagatccgccactttgtgtccctgaagaagctgtgctgcaccacagacaacaacaagcagatccacaagatccaccgggacagcggggacaacagccagacagagccccacagcttccgctacaagaacagaaggaaggagagcattgatgtgaagagcatcagcagccggggcagtgatgcccccagcctgcagaacagacgctaccccagcatggcccgcatccacagcatgaccatcgaggcccccatcaccaaggatggcctgcggcggctgtctggaaatgaatatgtgttcaccaagaatgtgcaccagagccacagccacctggccatgcccatcaccatcaatgatgtgcccccctgcatcagccagctgctggacaatgaggagagctgggacttcaacatctttgagctggaggccatcacccacaagaggcccctggtgtacctgggcctgaaggtgttcagcagatttggagtgtgtgagttcctgaactgcagcgagaccaccctgcgggcctggttccaggtgattgaggccaactaccacagcagcaatgcctaccacaacagcacccatgctgctgatgtgctgcacgccacagccttcttcctgggcaaggagcgggtgaagggcagcctggaccagctggatgaggtggccgccctgattgctgccaccgtgcatgatgtggaccaccctggccgcaccaacagcttcctgtgcaatgccggcagcgagctggccgtgctgtacaatgacacagctgtgctggagagccaccacacagccctggccttccagctgactgtgaaggacaccaagtgcaacatcttcaagaacatcgacaggaaccactaccgcaccctgcggcaggccatcatcgacatggtgctggccacagagatgaccaagcactttgagcacgtgaacaagtttgtgaacagcatcaacaagcccatggctgctgagattgagggcagtgactgtgagtgcaacccagctgggaagaacttccctgagaaccagatcctgatcaagaggatgatgatcaagtgtgctgatgtggccaacccctgccggcccctggacctgtgcatcgagtgggccggccgcatcagcgaggagtactttgcccagacagatgaggagaagaggcagggcctgcctgtggtgatgcctgtgtttgacaggaacacctgcagcatccccaagagccagatctccttcatcgactacttcatcacagacatgtttgatgcctgggatgcctttgcccacctgcctgccctgatgcagcacctggccgacaactacaagcactggaagaccctggatgacctgaagtgcaagagcctgcggctgcccagcgacagctag

SEQ ID NO: 29214 - DNA, 2493 bp, Artificial Sequence
  derived and/or modified sequence
atgggctgcgcccccagcatccacgtgagccagagcggcgtgatctactgccgcgactcagacgagtcctcgagcccaagacaaactacctctgtcagccagggtcctgccgccccattaccgggcttgtttgtgcagaccgacgctgccgatgcgataccaccctctcgcgcctccgggcccccttccgtcgccagagtcaggcgtgctcggacagagctcggaagcgggagcagtgccggaagtgccgctcccgccgcaaccacatctcggggccggcggcgccattgctgcagctctgccgaagcagaaacacagacatgttacacctctgtaaagcaagtatcctctgccgaggtgcgaatcggacccatgagactgacacaagaccccatacaggttctcctgatcttcgcaaaggaagactctcaaagcgatggattctggtgggcttgcgaccgagccggctaccgttgcaatatcgcacgcactcccgaatccgccttagagtgtttcttggataagcaccatgagattatcgtgatcgatcaccggcaaactcaaaacttcgacgccgaggctgtctgtcggtccatcagggctacaaatccttccgaacatacagtcatcctggccgtcgtaagccgggtgagtgacgaccacgaagaagcatcagtgttacccctgctgcatgcggggtttaatcgtcgcttcatggagaattcctctataatcgcatgctataacgagctaatccagattgaacacggcgaggttcgttcccagttcaagctacgcgcctgcaattcagtgttcactgcattagatcactgccacgaagctatcgagatcacatccgatgaccatgtgattcagtatgtgaatcctgcatttgaacggatgatgggttatcacaagggagaactgctaggcaaagagttggcggaccttccgaagtcggacaagaaccgcgccgacttactggacaccattaatacctgcattaaaaaaggaaaggaatggcagggggtgtattacgccagaagaaagtccggggatagcatccaacagcatgttaaaattacgccagttatcgggcaaggtggcaagatacgacattttgtctctttaaaaaaactgtgttgcacaactgataataataaacaaatccataagattcacagagattccggagataattcacagacagaaccccacagctttcggtacaaaaaccggaggaaggaatccatcgacgttaaaagtatctcaagcagagggagcgatgccccatctctgcagaacaggaggtacccatccatggcacgcatacacagcatgaccatagaggccccaataacgaaagacggattgaggagacttagcgggaacgagtacgtcttcactaagaacgttcatcagtctcactctcatctcgcaatgcctataaccattaatgacgttccgccctgcatctctcagctcttggataacgaagagagttgggattttaatattttcgaattggaagctatcacccacaagaggccattggtttatctcggtctcaaggtgttcagtcggttcggggtatgcgagtttctgaactgcagcgaaaccacgctccgtgcctggtttcaggttattgaggctaattaccactcaagcaacgcataccacaattccactcatgccgcagacgtgcttcatgcaaccgcttttttcttgggcaaggaaagagtaaagggaagtctggaccagcttgatgaagtcgccgcgctgatcgccgccactgtgcacgacgtggaccatcctggccgaacaaattcattcctgtgcaatgcagggagtgagttggccgtcctgtataacgataccgctgtactcgagtcccaccacactgcacttgcattccagctaaccgtaaaagacacaaaatgtaatattttcaagaatatagatcgcaaccactaccgtaccttgcgtcaggccatcattgacatggtattggcgaccgagatgactaagcactttgaacacgtcaacaagtttgtgaacagcattaataagccaatggccgctgagatcgaaggcagcgactgtgaatgcaatccagcgggaaaaaactttcctgaaaaccagattttgatcaaacgaatgatgatcaaatgcgccgatgtcgccaatccctgcagacctctggatctgtgcatagagtgggccgggcgcatctcagaagagtacttcgcacaaaccgacgaggaaaagcgtcagggtctacccgtcgtgatgccagtgttcgaccgtaacacctgcagcatcccaaagtctcagatttcatttatcgactatttcataaccgatatgttcgatgcttgggacgccttcgctcatcttccagccctgatgcagcatttagcagacaattacaagcattggaaaaccctggacgacttgaagtgcaagtcactcagactgcctagcgacagttag

SEQ ID NO: 29215 - DNA, 2572 bp, Artificial Sequence
  derived and/or modified sequence
atgggctgcgcccccagcatccatgtctcgcagagcggcgtgatctactgccgggactcggacgagtccagctcgccccgccagaccaccagcgtgtcgcagggcccggcggcacccctgcccggcctcttcgtccagaccgacgccgccgacgccatccccccgagccgcgcgtcgggaccccccagcgtagcccgcgtccgcagggcccgcaccgagctgggcagcggtagcagcgcgggttccgcagcccccgccgcgaccaccagcaggggccggaggcgccactgctgcagcagcgccgaggccgagactcagacctgctacaccagcgtgaagcaggtgtcttctgcggaggtgcgcatcgggcccatgagactgacgcaggaccctattcaggttttgctgatctttgcaaaggaagatagtcagagcgatggcttctggtgggcctgcgacagagctggttatagatgcaatattgctcggactccagagtcagcccttgaatgctttcttgataagcatcatgaaattattgtaattgatcatagacaaactcagaacttcgatgcagaagcagtgtgcaggtcgatccgggccacaaatccctccgagcacacggtgatcctcgcagtggtttcgcgagtatcggatgaccatgaagaggcgtcagtccttcctcttctccacgcaggcttcaacaggagatttatggagaatagcagcataattgcttgctataatgaactgattcaaatagaacatggggaagttcgctcccagttcaaattacgggcctgtaattcagtgtttacagcattagatcactgtcatgaagccatagaaataacaagcgatgaccacgtgattcagtatgtcaacccagccttcgaaaggatgatgggctaccacaaaggtgagctcctgggaaaagaactcgctgatctgcccaaaagcgataagaaccgggcagaccttctcgacaccatcaatacatgcatcaagaagggaaaggagtggcagggggtttactatgccagacggaaatccggggacagcatccaacagcacgtgaagatcaccccagtgattggccaaggagggaaaattaggcattttgtctcgctcaagaaactgtgttgtaccactgacaataataagcagattcacaagattcatcgtgattcaggagacaattctcagacagagcctcattcattcagatataagaacaggaggaaagagtccattgacgtgaaatcgatatcatctcgaggcagtgatgcaccaagcctgcagaatcgtcgctatccgtccatggcgaggatccactccatgaccatcgaggctcccatcacaaaggacggcttgagaagactgtcaggaaacgagtatgtgtttactaagaatgtgcaccagagtcacagtcaccttgcaatgccaataaccatcaatgatgttcccccttgtatctctcaattacttgataatgaggagagttgggacttcaacatctttgaattggaagccattacgcataaaaggccattggtttatctgggcttaaaggtcttctctcggtttggagtatgtgaatttttaaactgttctgaaaccactcttcgggcctggttccaagtgatcgaagccaactaccactcttccaatgcctaccacaactccacccatgctgccgacgtcctgcacgccaccgctttctttcttggaaaggaaagagtaaagggaagcctcgatcagttggatgaggtggcagccctcattgctgccacagtccatgacgtggatcacccgggaaggaccaactctttcctctgcaatgcaggcagtgagcttgctgtgctctacaatgacactgctgttctggagagtcaccacaccgccctggccttccagctcacggtcaaggacaccaaatgcaacattttcaagaatattgacaggaaccattatcgaacgctgcgccaggctattattgacatggttttggcaacagagatgacaaaacactttgaacatgtgaataagtttgtgaacagcatcaacaagccaatggcagctgagattgaaggcagcgactgtgaatgcaaccctgctgggaagaacttccctgaaaaccaaatcctgatcaaacgcatgatgattaagtgtgctgacgtggccaacccatgccgccccttggacctgtgcattgaatgggctgggaggatctctgaggagtattttgcacagactgatgaagagaagagacagggactacctgtggtgatgccagtgtttgaccggaatacctgtagcatccccaagtctcagatctctttcattgactacttcataacagacatgtttgatgcttgggatgcctttgcacatctgccagccctgatgcaacatttggctgacaactacaaacactggaagacactagatgacctaaagtgcaaaagtttgaggcttccatctgacagctaaagccaagccacagagggggcctcttgaccgacaaaggacactgtgaatcacagtagcgtaaacgagaggccttcctttc

SEQ ID NO: 29216 - DNA, 2493 bp, Artificial Sequence
  derived and/or modified sequence
atgggttgcgccccttcgatccacgtcagtcagagcggagtgatatactgccgggactccgacgagagctctagccccaggcaaacgacctctgtgagccagggacctgccgcaccactgccgggactgtttgtgcaaactgatgcggctgacgccattccacccagtcgagcctctggccctccgtctgttgcccgagtgcgacgcgctagaactgagctgggctcggggtcctcagctggtagcgcggcacctgctgctaccactagcaggggcaggcggagacattgttgtagctccgcagaagccgagactcagacttgctatacgagcgtcaagcaagtttcgagcgccgaggtgagaattggaccaatgagactgacgcaggatcctatccaggtgctccttatcttcgcaaaggaagacagccaatccgatggtttctggtgggcctgcgacagggctggctaccgctgcaacatcgccaggacccccgaatctgctttggaatgttttctggataagcaccatgaaattatcgtgattgaccataggcaaacccaaaatttcgacgctgaggcagtgtgccggagcatccgcgctacaaacccctctgagcatactgtcattctggccgtggtttcccgtgtgagtgatgaccatgaagaggcttcagtgctcccgctcctgcacgccggatttaataggagatttatggagaacagctctatcattgcatgctacaacgaactcatccaaatagagcacggtgaagtacgttcccagttcaagcttagggcctgcaatagtgtatttaccgccctggatcattgccacgaagctatcgaaataacatccgatgaccacgtcatccagtatgtaaatcctgcttttgagcgcatgatgggataccacaagggagagctcctagggaaagagctggccgatctccccaagagcgacaaaaacagagccgatctgttggacactatcaacacttgcatcaagaagggcaaggagtggcagggagtctattacgcacgcagaaagtctggggatagcatacaacagcatgtgaagatcactccggttatcggtcagggcggaaagatcagacatttcgtatctcttaaaaagctttgttgtaccacggacaacaataagcagatccataaaattcatcgagatagcggggacaatagccagactgagcctcactcattccggtataaaaatcgtcgtaaagagtccattgatgtaaagagtatatcctcgagaggaagcgatgcaccgagcctgcagaataggagatacccttctatggcgaggattcactctatgacaatcgaggcccctatcactaaggacggcttgcgccgattgagtgggaacgagtacgtatttactaaaaatgtgcaccagagccacagccacctggcaatgccgatcacaattaacgatgttccaccctgtatcagccagttgctggataacgaggagtcctgggatttcaatatcttcgagcttgaggccataacacataagcgacctcttgtctatcttggactgaaagtcttctctaggttcggagtatgcgaattcctgaattgctcggaaaccactttgagggcctggttccaggtgatcgaagcgaactaccatagctcaaacgcctaccataacagcacacatgctgccgatgtcctacacgctacagcctttttcctgggcaaagaacgggtgaagggatctctcgaccagttggatgaggtcgccgcactaatcgccgctaccgtgcatgatgttgaccacccaggcagaacaaacagctttctctgtaacgccggttccgaactggcagtgttgtacaatgacaccgccgtgctggaatcccaccacaccgccctcgcctttcagctgaccgttaaggatacaaaatgtaacatattcaagaatatcgataggaaccactacaggacgcttaggcaggcaatcatcgacatggtgctagccacagagatgaccaagcatttcgaacacgtgaacaaattcgtgaattctataaacaaacccatggcggctgagatcgagggctccgactgcgagtgcaatcctgctggcaagaatttcccagaaaatcagattctcattaagcgaatgatgatcaaatgcgcggatgtcgcaaacccatgccgtcctctggatctttgcattgagtgggcaggtcgaatctccgaagaatattttgcccagacggacgaggagaagaggcaggggctgcccgttgttatgccagtgtttgatcgtaatacctgttctataccaaaatctcagattagcttcatagattattttatcacagatatgtttgatgcttgggacgcctttgcacacctgccagccctcatgcagcatctggctgacaattacaagcattggaagactctggacgacttgaagtgcaagagtctgagactgccctccgattcttag

SEQ ID NO: 29217 - DNA, 2493 bp, Artificial Sequence
  derived and/or modified sequence
atgggctgcgcccccagcatccacgtgagccagagcggcgtgatctactgcagagacagcgacgagagcagcagccccagacagaccaccagcgtgagccagggccccgccgcccccctgcccggcctgttcgtgcagaccgacgccgccgacgccatcccccccagcagagccagcggcccccccagcgtggccagagtgagaagagccagaaccgagctgggcagcggcagcagcgccggcagcgccgcccccgccgccaccaccagcagaggcagaagaagacactgctgcagcagcgccgaggccgagacccagacctgctacaccagcgtgaagcaggtgagcagcgccgaggtgagaatcggccccatgagactgacccaggaccccatccaggtgctgctgatcttcgccaaggaggacagccagagcgacggcttctggtgggcctgcgacagagccggctacagatgcaacatcgccagaacccccgagagcgccctggagtgcttcctggacaagcaccacgagatcatcgtgatcgaccacagacagacccagaacttcgacgccgaggccgtgtgcagaagcatcagagccaccaaccccagcgagcacaccgtgatcctggccgtggtgagcagagtgagcgacgaccacgaggaggccagcgtgctgcccctgctgcacgccggcttcaacagaagattcatggagaacagcagcatcatcgcctgctacaacgagctgatccagatcgagcacggcgaggtgagaagccagttcaagctgagagcctgcaacagcgtgttcaccgccctggaccactgccacgaggccatcgagatcaccagcgacgaccacgtgatccagtacgtgaaccccgccttcgagagaatgatgggctaccacaagggcgagctgctgggcaaggagctggccgacctgcccaagagcgacaagaacagagccgacctgctggacaccatcaacacctgcatcaagaagggcaaggagtggcagggcgtgtactacgccagaagaaagagcggcgacagcatccagcagcacgtgaagatcacccccgtgatcggccagggcggcaagatcagacacttcgtgagcctgaagaagctgtgctgcaccaccgacaacaacaagcagatccacaagatccacagagacagcggcgacaacagccagaccgagccccacagcttcagatacaagaacagaagaaaggagagcatcgacgtgaagagcatcagcagcagaggcagcgacgcccccagcctgcagaacagaagataccccagcatggccagaatccacagcatgaccatcgaggcccccatcaccaaggacggcctgagaagactgagcggcaacgagtacgtgttcaccaagaacgtgcaccagagccacagccacctggccatgcccatcaccatcaacgacgtgcccccctgcatcagccagctgctggacaacgaggagagctgggacttcaacatcttcgagctggaggccatcacccacaagagacccctggtgtacctgggcctgaaggtgttcagcagattcggcgtgtgcgagttcctgaactgcagcgagaccaccctgagagcctggttccaggtgatcgaggccaactaccacagcagcaacgcctaccacaacagcacccacgccgccgacgtgctgcacgccaccgccttcttcctgggcaaggagagagtgaagggcagcctggaccagctggacgaggtggccgccctgatcgccgccaccgtgcacgacgtggaccaccccggcagaaccaacagcttcctgtgcaacgccggcagcgagctggccgtgctgtacaacgacaccgccgtgctggagagccaccacaccgccctggccttccagctgaccgtgaaggacaccaagtgcaacatcttcaagaacatcgacagaaaccactacagaaccctgagacaggccatcatcgacatggtgctggccaccgagatgaccaagcacttcgagcacgtgaacaagttcgtgaacagcatcaacaagcccatggccgccgagatcgagggcagcgactgcgagtgcaaccccgccggcaagaacttccccgagaaccagatcctgatcaagagaatgatgatcaagtgcgccgacgtggccaacccctgcagacccctggacctgtgcatcgagtgggccggcagaatcagcgaggagtacttcgcccagaccgacgaggagaagagacagggcctgcccgtggtgatgcccgtgttcgacagaaacacctgcagcatccccaagagccagatcagcttcatcgactacttcatcaccgacatgttcgacgcctgggacgccttcgcccacctgcccgccctgatgcagcacctggccgacaactacaagcactggaagaccctggacgacctgaagtgcaagagcctgagactgcccagcgacagctag

SEQ ID NO: 29218 - protein, 865 aa, Artificial Sequence
  derived and/or modified sequence
MGCAPSIHVSQSGVIYCRDSDESSSPRQTTSVSQGPAAPLPGLFVQTDAADAIPPSRASGPPSVARVRRARTELGSGSSAGSAAPAATTSRGRRRHCCSSAEAETQTCYTSVKVLLIFAKEDSQSDGFWWACDRAGYRCNIARTPESALECFLDKHHEIIVIDHRQTQNFDAEAVCRSIRATNPSEHTVILAVVSRVSDDHEEASVLPLLHAGFNRRFMENSSIIACYNELIQIEHGEVRSQFKLRACNSVFTALDHCHEAIEITSDDHVIQYVNPAFERMMGYHKGELLGKELADLPKSDKNRADLLDTINTCIKKGKEWQGVYYARRKSGDSIQQHVKITPVIGQGGKIRHFVSLKKLCCTTDNNKQIHKIHRDSGDNSQTEPHSFRYKNRRKESIDVKSISSRGSDAPSLQNRRYPSMARIHSMTIEAPITKVINIINAAQENSPVTVAEALDRVLEILRTTELYSPQLGTKDEDPHTSDLVGGLMTDGLRRLSGNEYVFTKNVHQSHSHLAMPITINDVPPCISQLLDNEESWDFNIFELEAITHKRPLVYLGLKVFSRFGVCEFLNCSETTLRAWFQVIEANYHSSNAYHNSTHAADVLHATAFFLGKERVKGSLDQLDEVAALIAATVHDVDHPGRTNSFLCNAGSELAVLYNDTAVLESHHTALAFQLTVKDTKCNIFKNIDRNHYRTLRQAIIDMVLATEMTKHFEHVNKFVNSINKPMAAEIEGSDCECNPAGKNFPENQILIKRMMIKCADVANPCRPLDLCIEWAGRISEEYFAQTDEEKRQGLPVVMPVFDRNTCSIPKSQISFIDYFITDMFDAWDAFAHLPALMQHLADNYKHWKTLDDLKCKSLRLPSDS

SEQ ID NO: 29219 - DNA, 2598 bp, Artificial Sequence
  derived and/or modified sequence
atgggctgtgctccatcaatccatgtctctcagtcgggcgtcatttattgcagggacagtgacgaatcaagttctccacgacagaccacaagtgtatcacagggacccgctgcaccattacccgggctctttgtgcagacggacgcggccgacgctattcctccaagccgcgcgagcggccccccctctgtggcccgcgtgcgcagagcacgaacggagcttggatccggatcctctgccggtagcgccgctccggccgccaccaccagcagagggaggcgacggcactgctgcagctccgcagaggcagagacccagacctgctacactagcgtcaaggtcctgctgatctttgctaaagaggactctcaatctgatggattctggtgggcctgtgacagagccggataccggtgcaatattgctcgcacccccgaaagcgccctggaatgttttctcgacaagcaccacgagatcatcgtcattgatcatcgccaaactcaaaacttcgacgcggaggcggtatgtcgttctatcagagccactaatccttcggagcatactgtaatcctggccgttgtgtcccgggtgtctgatgaccacgaggaagctagtgtgttgccgttgctgcacgcaggattcaatcgccgatttatggagaattcctcaatcattgcctgttataatgagctaatccagattgagcatggagaagtgcgctctcaatttaagctcagagcctgcaatagtgttttcacggccctggatcactgccacgaggccattgaaatcacttcggacgaccacgtcattcaatacgtgaatccagccttcgagcggatgatgggctaccacaaaggcgagctgctcgggaaggaactggcagacctgcccaagagtgataaaaatcgcgctgatctgctggatactattaatacctgcattaagaagggtaaggagtggcagggcgtctactatgcccgaaggaagtcgggcgatagtatccaacagcacgtgaagattacgcccgtaattggacaggggggaaagatcaggcacttcgtgtctctgaagaagctgtgctgcaccacagacaataataaacaaatacataagattcacagggatagcggagacaattcccaaactgaaccccacagctttcgctacaaaaacagacgcaaggaatccattgatgtgaagagcatatcctctagagggagtgatgccccctcactgcaaaacaggcgctatccctccatggcgcggattcattcaatgaccatagaggctccaattactaaagtgatcaatattattaatgcagcacaggagaattccccagttaccgtggcagaagcacttgatcgtgtcctggaaatcctcagaaccactgaactgtatagtcctcagctgggcaccaaagatgaggaccctcacaccagtgacctcgtaggcggtctgatgaccgatggattgcgcaggctgtctggcaatgaatacgttttcaccaaaaacgtccatcagtcacatagccacctcgccatgcctataacaattaatgacgtgccaccctgtatttctcaactactagataatgaggagagttgggactttaacatatttgaactggaggcgataactcataaacggcccctagtgtacctcggactgaaagtgttttctcgcttcggcgtgtgcgagttcctgaattgttctgaaaccacactgcgggcctggttccaggtaatcgaggcaaattatcactcatcaaacgcgtaccacaattctacacacgccgctgacgtgctgcacgcaactgcgttcttcctcggtaaagaacgcgtgaagggcagcctggaccaactggacgaggtggcagcgctgattgcggccacggtgcacgacgtcgatcatccgggaagaaccaacagttttctctgtaacgcgggctctgagctggctgtactgtacaacgacacggcagtactcgagtctcaccatacagcactggcatttcaactaacagtgaaggatactaagtgcaacatatttaagaatatagaccgcaatcattaccgcaccctacgacaggctattatcgatatggttctagctacagagatgactaagcactttgaacacgtaaacaaattcgttaactccattaacaagcccatggcagcggaaatagagggatctgactgcgagtgcaacccagctgggaagaatttcccagaaaatcagattctaataaagcgcatgatgataaaatgtgcagatgtcgctaatccatgcaggcccctggatctgtgcatcgagtgggccggcagaatctccgaggagtacttcgcccagacggatgaagagaagcggcaggggctgcccgtcgtgatgcccgtgttcgatagaaatacatgttccattcctaagtctcagattagcttcattgactatttcattacagacatgtttgatgcctgggacgcattcgcccacctcccggccttaatgcaacacctggcggacaactacaaacattggaaaactctggatgacctcaaatgcaagtctctacgactgccatcggattcgtag

SEQ ID NO: 29220 - DNA, 2598 bp, Artificial Sequence
  derived and/or modified sequence
atgggctgtgcccccagcatccacgtgtcccagagcggggtcatctactgccgggacagtgatgagagcagcagcccccggcagaccacctctgtgtcccagggccctgctgcccccctgcccggcctgtttgtgcagacagatgctgctgatgccatcccccccagccgggccagcggccccccatctgtggcccgggtgcggcgggccaggacagagctgggcagcggcagcagcgctggcagcgctgccccagctgccaccaccagccggggcagaagaagacactgctgcagcagcgctgaggccgagacccagacctgctacacctctgtgaaggtgctgctgatctttgccaaggaggacagccagagtgatggcttctggtgggcctgtgacagagctggctaccgctgcaacatcgcccggaccccagagagcgccctggagtgcttcctggacaagcaccacgagatcatcgtcatcgaccaccggcagacccagaactttgatgctgaggccgtgtgccgcagcatccgggccaccaaccccagcgagcacacagtcatcctggccgtggtgtcccgggtgtctgatgaccacgaggaggcctctgtgctgcccctgctgcacgccggcttcaacagacgcttcatggagaacagcagcatcatcgcctgctacaatgaactcatccagatcgagcacggggaggtgcgcagccagttcaagctgcgggcctgcaacagcgtcttcaccgccctggaccactgccacgaggccatcgagatcaccagtgatgaccacgtgatccagtatgtgaacccagcctttgagaggatgatgggctaccacaagggggagctgctgggcaaggagctggccgacctgcccaagagtgacaagaacagagctgacctgctggacaccatcaacacctgcatcaagaagggcaaggagtggcagggcgtgtactatgcccggaggaagagcggggacagcatccagcagcacgtgaagatcacccctgtgattggccagggcggcaagatccgccactttgtgtccctgaagaagctgtgctgcaccacagacaacaacaagcagatccacaagatccaccgggacagcggggacaacagccagacagagccccacagcttccgctacaagaacagaaggaaggagagcattgatgtgaagagcatcagcagccggggcagtgatgcccccagcctgcagaacagacgctaccccagcatggcccgcatccacagcatgaccatcgaggcccccatcaccaaggtgatcaacatcatcaatgctgcccaggagaacagccctgtgacagtggccgaggccctggacagagtgctggagatcctgcggaccacagagctgtacagcccccagctgggcaccaaggatgaggacccccacaccagtgacctggtgggcggcctgatgacagatggcctgcggcggctgtctggaaatgaatatgtgttcaccaagaatgtgcaccagagccacagccacctggccatgcccatcaccatcaatgatgtgcccccctgcatcagccagctgctggacaatgaggagagctgggacttcaacatctttgagctggaggccatcacccacaagaggcccctggtgtacctgggcctgaaggtgttcagccgcttcggcgtgtgtgagttcctgaactgcagcgagaccaccctgcgggcctggttccaggtgattgaggccaactaccacagcagcaatgcctaccacaacagcacccacgccgcagatgtgctgcacgccacagccttcttcctgggcaaggagcgggtgaagggcagcctggaccagctggatgaggtggccgccctgattgctgccaccgtgcatgatgtggaccaccctggccgcaccaacagcttcctgtgcaatgccggcagcgagctggccgtgctgtacaatgacacagctgtgctggagagccaccacacagccctggccttccagctgactgtgaaggacaccaagtgcaacatcttcaagaacatcgacaggaaccactaccgcaccctgcggcaggccatcatcgacatggtgctggccacagagatgaccaagcactttgaacatgtgaacaagtttgtgaacagcatcaacaagcccatggctgctgagattgagggcagtgactgtgagtgcaacccagctgggaagaacttccctgagaaccagatcctgatcaagaggatgatgatcaagtgtgctgatgtggccaacccctgccggcccctggacctgtgcatcgagtgggccggccgcatcagcgaggagtactttgcccagacagatgaggagaagaggcagggcctgcctgtggtgatgcctgtgtttgacaggaacacctgcagcatccccaagagccagatctccttcatcgactacttcatcacagacatgtttgatgcctgggatgcctttgcccacctgcctgccctgatgcagcacctggccgacaactacaagcactggaagaccctggatgacctgaagtgcaagagcctgcggctgcccagcgacagctag

SEQ ID NO: 29221 - DNA, 2598 bp, Artificial Sequence
  derived and/or modified sequence
atgggctgcgcccccagcatccacgtgagccagagcggcgtgatctattgtcgcgattccgacgagtcttcatctcctcgacaaacaactagcgtgtctcaaggacctgccgcacctttgcccgggcttttcgttcaaaccgacgccgctgacgctataccaccatctagagcctctgggccccctagcgtagccagagtgcggcgagcccgtaccgagcttggatctggctcaagcgcagggagcgcggctcccgccgctacaacctccagaggaaggagacgccattgctgctccagcgcggaagcagaaactcagacctgctacacctcggtgaaggttctgctgatattcgcaaaggaggattctcaatccgacggtttctggtgggcttgcgatcgagccgggtatcgttgtaacatcgcacggaccccagaaagcgccttggaatgcttcttggacaagcatcatgagattatcgtgattgaccacagacaaacccaaaatttcgatgcggaggccgtctgccggtctattagggcaaccaatccctccgaacacactgtcatattagcggtggtcagccgtgtttctgatgatcacgaagaagcctctgtgctccccctactccacgctggctttaacaggcggttcatggaaaatagtagtattatcgcctgttataatgagctcattcagattgaacacggagaggtacgcagccagttcaagctcagggcatgtaacagtgttttcacagccctcgaccattgccacgaggctatcgagatcacttccgatgaccacgtgatccagtacgtgaaccctgcatttgaacgtatgatgggatatcataaaggtgaactgctgggtaaagaactggccgacctacccaagagcgataagaaccgtgcagatcttctcgataccataaacacatgtatcaagaaaggaaaagagtggcaaggggtttattatgctcggaggaaatctggtgactcaattcagcagcacgtgaaaataactcctgtgattggccagggcgggaagattcggcactttgtgtctttgaaaaagttatgttgtactactgataataacaagcagatccataagatacaccgcgactcaggagacaattctcagacagaaccacactcatttcgctataagaataggcgcaaagagagcatagacgttaaaagtatttcttcccggggtagtgatgctccaagcctgcagaacagacggtacccctccatggcccgaatccacagcatgacaatcgaggccccgatcaccaaggtgattaatatcatcaacgcagcccaggagaactcccctgtgaccgtcgctgaagccttggatagggttctcgaaatcctccgcacaactgagctttactccccgcagctggggactaaagacgaagatccacataccagcgacctggtgggagggttgatgactgacggcttacgcagactgtcgggaaatgaatatgtcttcacgaagaacgtgcaccagtcccattcacatctcgccatgccaatcaccattaatgacgttccaccgtgcatatcccaactgctggacaatgaggaaagctgggatttcaacatcttcgagctagaagccattacgcacaagaggcccctggtgtatctcgggcttaaggtgttttcacgtttcggcgtctgtgaatttctgaactgtagtgaaacaaccctccgcgcctggtttcaagtcatagaagctaactatcatagcagcaacgcctaccacaactcaacccacgccgccgacgtgctccatgctactgccttcttcctggggaaggaaagggtaaaaggaagcctggatcagctggatgaggtggccgccctaattgccgccacggtgcacgatgtggatcaccccggacgaactaattccttcctgtgcaatgctggctcagaactggctgtgctgtacaatgataccgccgtgctggaatcccaccacacggccctcgcatttcagttgactgtgaaagacacaaagtgtaacattttcaagaatatagatcgaaaccattacaggacactcagacaggccattattgacatggtgctcgccactgaaatgacaaaacactttgaacatgtgaataaatttgtcaactccatcaacaagcccatggcggctgagattgagggcagcgactgcgaatgtaaccccgctggcaagaactttcctgagaaccagatcctcattaaacgtatgatgataaagtgtgctgacgttgccaatccctgtcgcccattagacttgtgcatcgaatgggctggccggattagtgaggaatacttcgctcagaccgacgaggagaagaggcagggtttgcctgtggtgatgcctgttttcgacaggaatacctgtagcatcccaaaatcacagataagtttcatcgactacttcatcaccgacatgttcgatgcatgggatgccttcgcccacctaccagcactcatgcagcacctcgccgacaattacaagcattggaaaacactggacgacctaaagtgcaagtctttacgcctgccttcagacagctag

SEQ ID NO: 29222 - DNA, 2677 bp, Artificial Sequence
  derived and/or modified sequence
atgggctgcgcccccagcatccatgtctcgcagagcggcgtgatctactgccgggactcggacgagtccagctcgccccgccagaccaccagcgtgtcgcagggcccggcggcacccctgcccggcctcttcgtccagaccgacgccgccgacgccatccccccgagccgcgcgtcgggaccccccagcgtagcccgcgtccgcagggcccgcaccgagctgggcagcggtagcagcgcgggttccgcagcccccgccgcgaccaccagcaggggccggaggcgccactgctgcagcagcgccgaggccgagactcagacctgctacaccagcgtgaaggttttgctgatctttgcaaaggaagatagtcagagcgatggcttctggtgggcctgcgacagagctggttatagatgcaatattgctcggactccagagtcagcccttgaatgctttcttgataagcatcatgaaattattgtaattgatcatagacaaactcagaacttcgatgcagaagcagtgtgcaggtcgatccgggccacaaatccctccgagcacacggtgatcctcgcagtggtttcgcgagtatcggatgaccatgaagaggcgtcagtccttcctcttctccacgcaggcttcaacaggagatttatggagaatagcagcataattgcttgctataatgaactgattcaaatagaacatggggaagttcgctcccagttcaaattacgggcctgtaattcagtgtttacagcattagatcactgtcatgaagccatagaaataacaagcgatgaccacgtgattcagtatgtcaacccagccttcgaaaggatgatgggctaccacaaaggtgagctcctgggaaaagaactcgctgatctgcccaaaagcgataagaaccgggcagaccttctcgacaccatcaatacatgcatcaagaagggaaaggagtggcagggggtttactatgccagacggaaatccggggacagcatccaacagcacgtgaagatcaccccagtgattggccaaggagggaaaattaggcattttgtctcgctcaagaaactgtgttgtaccactgacaataataagcagattcacaagattcatcgtgattcaggagacaattctcagacagagcctcattcattcagatataagaacaggaggaaagagtccattgacgtgaaatcgatatcatctcgaggcagtgatgcaccaagcctgcagaatcgtcgctatccgtccatggcgaggatccactccatgaccatcgaggctcccatcacaaaggttataaatataatcaatgcagcccaagaaaacagcccagtcacagtagcggaagccttggacagagttctagagattttacggaccacagaactgtactcccctcagctgggtaccaaagatgaagatcctcacaccagtgatcttgttggaggcctgatgactgacggcttgagaagactgtcaggaaacgagtatgtgtttactaagaatgtgcaccagagtcacagtcaccttgcaatgccaataaccatcaatgatgttcccccttgtatctctcaattacttgataatgaggagagttgggacttcaacatctttgaattggaagccattacgcataaaaggccattggtttatctgggcttaaaggtcttctctcggtttggagtatgtgaatttttaaactgttctgaaaccactcttcgggcctggttccaagtgatcgaagccaactaccactcttccaatgcctaccacaactccacccatgctgccgacgtcctgcacgccaccgctttctttcttggaaaggaaagagtaaagggaagcctcgatcagttggatgaggtggcagccctcattgctgccacagtccatgacgtggatcacccgggaaggaccaactctttcctctgcaatgcaggcagtgagcttgctgtgctctacaatgacactgctgttctggagagtcaccacaccgccctggccttccagctcacggtcaaggacaccaaatgcaacattttcaagaatattgacaggaaccattatcgaacgctgcgccaggctattattgacatggttttggcaacagagatgacaaaacactttgaacatgtgaataagtttgtgaacagcatcaacaagccaatggcagctgagattgaaggcagcgactgtgaatgcaaccctgctgggaagaacttccctgaaaaccaaatcctgatcaaacgcatgatgattaagtgtgctgacgtggccaacccatgccgccccttggacctgtgcattgaatgggctgggaggatctctgaggagtattttgcacagactgatgaagagaagagacagggactacctgtggtgatgccagtgtttgaccggaatacctgtagcatccccaagtctcagatctctttcattgactacttcataacagacatgtttgatgcttgggatgcctttgcacatctgccagccctgatgcaacatttggctgacaactacaaacactggaagacactagatgacctaaagtgcaaaagtttgaggcttccatctgacagctaaagccaagccacagagggggcctcttgaccgacaaaggacactgtgaatcacagtagcgtaaacgagaggccttcctttc

SEQ ID NO: 29223 - DNA, 2598 bp, Artificial Sequence
  derived and/or modified sequence
atgggatgtgctccttctatccatgtttcgcaatctggtgtgatctattgccgggactctgatgaatcaagctctccacggcagacaactagcgtctcacaagggccagccgcacctctgcccggtctgttcgtgcagacagacgcagcggacgcaatccccccatcacgggcttcaggaccgccaagcgtcgcccgagtgcgccgagcacgtactgagcttggctctgggtcgtcagccggatccgctgcccctgctgctacaacctctcgcggacgtagaagacattgttgcagcagtgccgaggctgaaacacagacatgctatacatcagtcaaggtgctactcatcttcgcaaaagaggactcccaatccgacggcttttggtgggcatgcgatcgcgcagggtatcggtgcaacattgccaggaccccagagagcgccctcgagtgcttcctggataaacaccacgaaattatcgtcatcgatcacagacagacccaaaactttgatgctgaggctgtgtgtcggtctatccgagccaccaatccaagcgagcataccgtgatcctggccgtggtctcgcgggtgtccgatgatcacgaggaagcttctgtgctccccctgctgcatgcaggcttcaacaggagattcatggagaactctagcatcatcgcctgctacaatgagctgattcagatagaacacggggaagtgcgttctcagttcaagttgagagcctgcaatagtgtgttcacagctctggaccactgtcacgaggccatagaaattacgtccgatgaccacgtaatacagtatgttaacccagccttcgaaaggatgatgggttaccataagggcgaactgctgggcaaagagctggccgacctgcccaaatctgacaaaaatcgagcagacttgttggatactattaatacctgtattaaaaaggggaaggaatggcagggggtgtattacgctagacgaaagtctggggactctattcagcagcacgtgaagataactcccgtcatcgggcagggcggaaagattcggcacttcgtgagcctgaaaaagctttgttgtacgacagacaacaataagcagattcacaagattcatagggacagcggagataacagccagacagaaccacactccttccggtacaaaaacaggcgcaaggagtctatcgatgtcaaatctatctcttctcgaggttcagatgcaccttctctgcagaatcgccgttatcccagcatggcgaggattcactcgatgacaatcgaagctccaattactaaagttattaatatcatcaacgctgcccaggagaacagccccgttaccgtagcagaggccctggatcgagtgttggagattctgcggacaactgagctctactcgccacagcttggaaccaaggacgaagacccacacacaagcgatctcgtcggtggcctgatgactgatggattacggcgactgagcggcaacgagtatgtgttcacaaagaacgtacaccagtcccattcacatctggcgatgccaatcacaattaatgatgtgcccccttgtatttcccagctcctcgataacgaggagagctgggacttcaacatattcgaactggaggcgatcactcataaacgccctctcgtgtatttgggcttgaaggtcttcagccgattcggcgtgtgtgaattcctgaattgttcagagacaaccctgagagcctggtttcaggtgatagaggccaactatcattcgtcaaatgcctaccacaattctacgcacgccgctgacgttctgcacgcaacggcgttttttctgggcaaggagcgcgtaaagggcagcctcgatcaactggatgaagtcgccgctctaatagctgctacagtccacgacgtggaccaccctgggagaacaaactcattcctttgtaatgctggctccgagttggctgtgctgtataacgatacggcggttctggaatcacaccatactgcactcgctttccagttaacggtgaaggacacgaaatgcaacatttttaagaacatagatcgcaaccattaccgaacactgcggcaggcaattattgacatggtgttagccactgaaatgacaaagcattttgagcatgtgaacaaattcgtgaatagcataaataaaccgatggccgcagagatcgaaggatccgattgcgaatgtaatcccgcaggaaaaaactttccagaaaatcagattctgatcaagcggatgatgatcaaatgtgctgatgttgctaacccttgccgcccactggatctgtgtattgagtgggccggtcgaatcagcgaggaatactttgctcagactgacgaggagaagcggcagggcttgcccgttgtgatgcccgtattcgaccggaacacttgttcgatccctaagtctcagatttcatttatagattattttattaccgatatgtttgatgcttgggacgccttcgctcatttgcccgcactcatgcaacatttagccgataattataaacactggaagacgcttgacgatctgaagtgcaagtccctccgtctcccttcagattcatag

SEQ ID NO: 29224 - DNA, 2598 bp, Artificial Sequence
  derived and/or modified sequence
atgggctgcgcccccagcatccacgtgagccagagcggcgtgatctactgcagagacagcgacgagagcagcagccccagacagaccaccagcgtgagccagggccccgccgcccccctgcccggcctgttcgtgcagaccgacgccgccgacgccatcccccccagcagagccagcggcccccccagcgtggccagagtgagaagagccagaaccgagctgggcagcggcagcagcgccggcagcgccgcccccgccgccaccaccagcagaggcagaagaagacactgctgcagcagcgccgaggccgagacccagacctgctacaccagcgtgaaggtgctgctgatcttcgccaaggaggacagccagagcgacggcttctggtgggcctgcgacagagccggctacagatgcaacatcgccagaacccccgagagcgccctggagtgcttcctggacaagcaccacgagatcatcgtgatcgaccacagacagacccagaacttcgacgccgaggccgtgtgcagaagcatcagagccaccaaccccagcgagcacaccgtgatcctggccgtggtgagcagagtgagcgacgaccacgaggaggccagcgtgctgcccctgctgcacgccggcttcaacagaagattcatggagaacagcagcatcatcgcctgctacaacgagctgatccagatcgagcacggcgaggtgagaagccagttcaagctgagagcctgcaacagcgtgttcaccgccctggaccactgccacgaggccatcgagatcaccagcgacgaccacgtgatccagtacgtgaaccccgccttcgagagaatgatgggctaccacaagggcgagctgctgggcaaggagctggccgacctgcccaagagcgacaagaacagagccgacctgctggacaccatcaacacctgcatcaagaagggcaaggagtggcagggcgtgtactacgccagaagaaagagcggcgacagcatccagcagcacgtgaagatcacccccgtgatcggccagggcggcaagatcagacacttcgtgagcctgaagaagctgtgctgcaccaccgacaacaacaagcagatccacaagatccacagagacagcggcgacaacagccagaccgagccccacagcttcagatacaagaacagaagaaaggagagcatcgacgtgaagagcatcagcagcagaggcagcgacgcccccagcctgcagaacagaagataccccagcatggccagaatccacagcatgaccatcgaggcccccatcaccaaggtgatcaacatcatcaacgccgcccaggagaacagccccgtgaccgtggccgaggccctggacagagtgctggagatcctgagaaccaccgagctgtacagcccccagctgggcaccaaggacgaggacccccacaccagcgacctggtgggcggcctgatgaccgacggcctgagaagactgagcggcaacgagtacgtgttcaccaagaacgtgcaccagagccacagccacctggccatgcccatcaccatcaacgacgtgcccccctgcatcagccagctgctggacaacgaggagagctgggacttcaacatcttcgagctggaggccatcacccacaagagacccctggtgtacctgggcctgaaggtgttcagcagattcggcgtgtgcgagttcctgaactgcagcgagaccaccctgagagcctggttccaggtgatcgaggccaactaccacagcagcaacgcctaccacaacagcacccacgccgccgacgtgctgcacgccaccgccttcttcctgggcaaggagagagtgaagggcagcctggaccagctggacgaggtggccgccctgatcgccgccaccgtgcacgacgtggaccaccccggcagaaccaacagcttcctgtgcaacgccggcagcgagctggccgtgctgtacaacgacaccgccgtgctggagagccaccacaccgccctggccttccagctgaccgtgaaggacaccaagtgcaacatcttcaagaacatcgacagaaaccactacagaaccctgagacaggccatcatcgacatggtgctggccaccgagatgaccaagcacttcgagcacgtgaacaagttcgtgaacagcatcaacaagcccatggccgccgagatcgagggcagcgactgcgagtgcaaccccgccggcaagaacttccccgagaaccagatcctgatcaagagaatgatgatcaagtgcgccgacgtggccaacccctgcagacccctggacctgtgcatcgagtgggccggcagaatcagcgaggagtacttcgcccagaccgacgaggagaagagacagggcctgcccgtggtgatgcccgtgttcgacagaaacacctgcagcatccccaagagccagatcagcttcatcgactacttcatcaccgacatgttcgacgcctgggacgccttcgcccacctgcccgccctgatgcagcacctggccgacaactacaagcactggaagaccctggacgacctgaagtgcaagagcctgagactgcccagcgacagctag

SEQ ID NO: 29225 - protein, 838 aa, Artificial Sequence
  derived and/or modified sequence
MGCAPSIHVSQSGVIYCRDSDESSSPRQTTSVSQGPAAPLPGLFVQTDAADAIPPSRASGPPSVARVRRARTELGSGSSAGSAAPAATTSRGRRRHCCSSAEAETQTCYTSVKQVSSAEVRIGPMRLTQDPIQVLLIFAKEDSQSDGFWWACDRAGYRCNIARTPESALECFLDKHHEIIVIDHRQTQNFDAEAVCRSIRATNPSEHTVILAVVSRVSDDHEEASVLPLLHAGFNRRFMENSSIIACYNELIQIEHGEVRSQFKLRACNSVFTALDHCHEAIEITSDDHVIQEWQGVYYARRKSGDSIQQHVKITPVIGQGGKIRHFVSLKKLCCTTDNNKQIHKIHRDSGDNSQTEPHSFRYKNRRKESIDVKSISSRGSDAPSLQNRRYPSMARIHSMTIEAPITKVINIINAAQENSPVTVAEALDRVLEILRTTELYSPQLGTKDEDPHTSDLVGGLMTDGLRRLSGNEYVFTKNVHQSHSHLAMPITINDVPPCISQLLDNEESWDFNIFELEAITHKRPLVYLGLKVFSRFGVCEFLNCSETTLRAWFQVIEANYHSSNAYHNSTHAADVLHATAFFLGKERVKGSLDQLDEVAALIAATVHDVDHPGRTNSFLCNAGSELAVLYNDTAVLESHHTALAFQLTVKDTKCNIFKNIDRNHYRTLRQAIIDMVLATEMTKHFEHVNKFVNSINKPMAAEIEGSDCECNPAGKNFPENQILIKRMMIKCADVANPCRPLDLCIEWAGRISEEYFAQTDEEKRQGLPVVMPVFDRNTCSIPKSQISFIDYFITDMFDAWDAFAHLPALMQHLADNYKHWKTLDDLKCKSLRLPSDS

SEQ ID NO: 29226 - DNA, 2517 bp, Artificial Sequence
  derived and/or modified sequence
atgggctgtgccccctccattcacgttagtcagagcggcgtcatctattgtagagactcagatgagagctctagccctcgccagactacttcagtctcacaggggcccgcagcccccttacccggcctgttcgtgcagactgacgctgccgacgccatcccgccatccagagcgtcaggacccccaagcgtggcccgagttcgaagagcccgcacagaactggggagtggctcgagcgcaggatctgccgcacctgccgctactacttctcgcggccgccggaggcattgttgctcttctgctgaggcagagactcagacctgctatacctctgtcaagcaggtctcaagtgcagaagtgaggattgggcctatgcggttaacacaagacccaattcaggtcttgctgatcttcgccaaagaggacagtcagagcgacggcttctggtgggcctgcgatcgagcagggtaccgctgcaacatcgcccggactcccgaaagcgcactggagtgcttcctggataaacatcacgaaatcatcgtcattgaccataggcagacccagaattttgatgctgaagctgtctgtaggtcaatccgggcgaccaacccttctgagcatacagtgatactggccgtggtttctagagtctctgacgaccacgaggaagccagtgtactgcctctgctgcacgctggcttcaatcgcagatttatggagaattcctctatcattgcttgttacaatgaattgatccagatagagcacggtgaggttcgctcacagtttaagctccgggcttgtaatagcgtcttcaccgccctcgaccattgtcacgaagcaatcgagattacttccgacgatcacgtgatccaggaatggcagggggtgtattacgcccgccgtaaaagcggggatagcatacagcagcacgttaagattacccccgtgatcggtcaaggagggaaaatccgccactttgtaagcctgaaaaaactctgctgtactaccgataataataaacaaatccacaaaattcaccgcgattccggagataattcacagacagaaccgcactcgttcagatataaaaatcgccgcaaggaatccatcgacgtgaagagcatcagcagcagagggtctgacgccccaagtttacagaataggagatatccctcaatggcccgtatacattctatgactatcgaggcccccatcacaaaagtgatcaatattatcaatgcggctcaagagaacagccccgttaccgtggcggaagctcttgacagagtcctagagatcctgcgcacgaccgaattgtattctccccagctggggaccaaggacgaagacccgcataccagcgacctcgtgggaggtttgatgacagacgggcttaggcggcttagtggcaatgaatacgtgtttacaaaaaatgtgcatcagtctcatagccatcttgccatgccgataactatcaatgatgtccccccatgtatttcgcagctccttgacaatgaggagtcttgggatttcaacatctttgagctagaggcaattacccataaacgtcccctcgtctatctgggccttaaggtcttttccaggtttggagtatgtgaattcctgaattgctcagagaccactttgagagcttggtttcaggtgattgaggctaactaccactcgtcaaatgcataccataacagtacccatgcagccgacgtgctacatgcaacagccttcttcttgggaaaagagcgcgtcaagggaagccttgatcagctggacgaggtcgccgccttaatcgcagccacagtgcacgatgtggatcaccccggccggactaattcgtttctgtgcaacgccgggtctgagctagccgtcctgtacaatgatactgccgttctggagagtcatcacaccgccctggcgtttcagctgaccgtaaaagatactaagtgcaatatctttaagaacattgaccggaaccattataggacccttagacaggccattattgacatggtactggccacagagatgactaagcacttcgagcacgtaaataaatttgttaacagcattaacaagcccatggccgccgaaatcgagggcagtgactgcgaatgtaaccctgccggcaagaatttccctgaaaaccagattttaatcaaacgtatgatgatcaagtgtgcagatgtagcaaacccatgccgacccctggacttatgtatcgaatgggctggccgaatttccgaggagtattttgcccagacggatgaagagaaacgccagggtctgcccgtggtcatgcctgtttttgatagaaacacctgtagcattcctaaatcacagatatcatttatcgattactttataactgacatgttcgatgcgtgggatgcctttgctcatctccccgcccttatgcaacatttagctgacaactataaacactggaagacccttgatgatctcaaatgtaaatccctgaggctgccatctgacagttag

SEQ ID NO: 29227 - DNA, 2517 bp, Artificial Sequence
  derived and/or modified sequence
atgggctgtgcccccagcatccacgtgtcccagagcggggtcatctactgccgggacagtgatgagagcagcagcccccggcagaccacctctgtgtcccagggccctgctgcccccctgcccggcctgtttgtgcagacagatgctgctgatgccatcccccccagccgggccagcggccccccatctgtggcccgggtgcggcgggccaggacagagctgggcagcggcagcagcgctggcagcgctgccccagctgccaccaccagccggggcagaagaagacactgctgcagcagcgctgaggccgagacccagacctgctacacctctgtgaagcaggtgtcctctgctgaggtgcgcatcggccccatgaggctgacccaggaccccatccaggtgctgctgatctttgccaaggaggacagccagagtgatggcttctggtgggcctgtgacagagctggctaccgctgcaacatcgcccggaccccagagagcgccctggagtgcttcctggacaagcaccacgagatcatcgtcatcgaccaccggcagacccagaactttgatgctgaggccgtgtgccgcagcatccgggccaccaaccccagcgagcacacagtcatcctggccgtggtgtcccgggtgtctgatgaccacgaggaggcctctgtgctgcccctgctgcacgccggcttcaacagacgcttcatggagaacagcagcatcatcgcctgctacaatgaactcatccagatcgagcacggggaggtgcgcagccagttcaagctgcgggcctgcaacagcgtcttcaccgccctggaccactgccacgaggccatcgagatcaccagtgatgaccacgtgatccaggagtggcagggcgtgtactatgcccggaggaagagcggggacagcatccagcagcacgtgaagatcacccctgtgattggccagggcggcaagatccgccactttgtgtccctgaagaagctgtgctgcaccacagacaacaacaagcagatccacaagatccaccgggacagcggggacaacagccagacagagccccacagcttccgctacaagaacagaaggaaggagagcattgatgtgaagagcatcagcagccggggcagtgatgcccccagcctgcagaacagacgctaccccagcatggcccgcatccacagcatgaccatcgaggcccccatcaccaaggtgatcaacatcatcaatgctgcccaggagaacagccctgtgacagtggccgaggccctggacagagtgctggagatcctgcggaccacagagctgtacagcccccagctgggcaccaaggatgaggacccccacaccagtgacctggtgggcggcctgatgacagatggcctgcggcggctgtctggaaatgaatatgtgttcaccaagaatgtgcaccagagccacagccacctggccatgcccatcaccatcaatgatgtgcccccctgcatcagccagctgctggacaatgaggagagctgggacttcaacatctttgagctggaggccatcacccacaagaggcccctggtgtacctgggcctgaaggtgttcagcagatttggagtgtgtgagttcctgaactgcagcgagaccaccctgcgggcctggttccaggtgattgaggccaactaccacagcagcaatgcctaccacaacagcacccatgctgctgatgtgctgcacgccacagccttcttcctgggcaaggagcgggtgaagggcagcctggaccagctggatgaggtggccgccctgattgctgccaccgtgcatgatgtggaccaccctggccgcaccaacagcttcctgtgcaatgccggcagcgagctggccgtgctgtacaatgacacagctgtgctggagagccaccacacagccctggccttccagctgactgtgaaggacaccaagtgcaacatcttcaagaacatcgacaggaaccactaccgcaccctgcggcaggccatcatcgacatggtgctggccacagagatgaccaagcactttgagcacgtgaacaagtttgtgaacagcatcaacaagcccatggctgctgagattgagggcagtgactgtgagtgcaacccagctgggaagaacttccctgagaaccagatcctgatcaagaggatgatgatcaagtgtgctgatgtggccaacccctgccggcccctggacctgtgcatcgagtgggccggccgcatcagcgaggagtactttgcccagacagatgaggagaagaggcagggcctgcctgtggtgatgcctgtgtttgacaggaacacctgcagcatccccaagagccagatctccttcatcgactacttcatcacagacatgtttgatgcctgggatgcctttgcccacctgcctgccctgatgcagcacctggccgacaactacaagcactggaagaccctggatgacctgaagtgcaagagcctgcggctgcccagcgacagctag

SEQ ID NO: 29228 - DNA, 2517 bp, Artificial Sequence
  derived and/or modified sequence
atgggctgcgcccccagcatccacgtgagccagagcggcgtgatctattgtagagattccgatgagagcagttcaccaagacagaccaccagcgtttctcaagggccagctgcacccctaccaggactcttcgtgcagaccgatgccgccgacgctattcctccctcaagggcctcaggcccgccaagtgtggcaagggtacgaagagctcggactgagctgggcagcggtagctccgcaggctcagccgccccggccgcaacaaccagccgtggccgtcgccgacattgctgctcatcagccgaagccgaaactcagacctgctatacttctgtcaaacaggtttcttccgcagaagttcggattggacctatgaggttgactcaggacccaattcaggtacttttgattttcgccaaggaggatagtcagagcgatggattctggtgggcgtgtgatcgggcaggctatagatgtaacatcgcacgtacgccagagtctgccttagaatgtttcctggacaaacaccacgagatcattgtgattgatcaccgtcaaacccaaaatttcgacgcagaagccgtgtgcaggtctattcgagctaccaatccatccgaacacaccgtgatactcgccgtagtaagtagggtcagcgacgatcatgaagaagccagtgttctacctcttctgcatgccggcttcaataggcggttcatggaaaacagtagcattatcgcttgctacaatgagctgatacaaatagagcatggggaagtcaggtcacagtttaagctccgagcgtgtaacagtgtattcactgctctggaccactgccacgaagccatcgaaatcacctccgatgaccacgtgatacaagaatggcagggtgtgtactacgcgcgccgcaagtccggtgactcgatccagcagcacgtcaagattacacccgtgattgggcaaggaggtaagatcaggcacttcgtcagcctgaaaaagctgtgctgcactacagataacaacaagcagatccacaaaatacaccgcgacagtggagacaattcccagactgagccgcactccttccggtataaaaaccgacggaaggagtcgatcgacgtaaaaagtatttcgagtcgtggcagcgacgcacccagtctccaaaatcggcggtatccatcgatggccaggatacattctatgaccatcgaggctccaattaccaaagtgattaacattattaatgccgctcaggagaactcgcctgtaactgtggcggaggctcttgatagagtgctggagattcttcgtacaacagagctttattccccccagctcggaaccaaagacgaagacccccatacaagcgacctcgtcggaggtctgatgacagacggcctgagacggctgagcgggaatgagtatgtgtttactaagaacgtgcatcaatcgcattctcatttagccatgccaatcactatcaatgacgtgcccccctgcatctcacagctgctggataacgaagagagctgggacttcaacattttcgaactggaggccatcacacataagcgcccccttgtgtatttggggctgaaggtctttagccgcttcggcgtttgcgaatttctgaattgctctgagactaccctgagagcttggttccaggtaattgaagcaaactatcactcctccaacgcttaccacaactctacgcacgcagctgatgtgttgcacgcaaccgcctttttcctcggcaaggagcgagtcaagggctctctggatcagctcgatgaagtggctgccttgatcgccgcaacagtgcatgatgtcgaccatcctggaagaacaaactcctttttatgcaatgcagggtctgagttggctgtcttgtataatgatacagccgtgctcgaatctcaccacaccgccttggcctttcagctgacagttaaggataccaaatgcaacattttcaagaacatcgataggaaccattaccgcacactaaggcaggccataattgacatggttctggcaactgaaatgacaaagcattttgagcacgtgaataagttcgtgaactctatcaataagcctatggctgctgaaatcgaagggagcgattgcgaatgtaatcctgcaggaaaaaatttccctgaaaaccagatattgatcaaacgcatgatgattaagtgcgctgacgtggctaatccttgccggcctttagacctgtgcatcgaatgggcgggtcgcattagcgaggaatatttcgcacagacagatgaggagaagcggcagggtctccctgtagtgatgccagtgttcgacaggaacacatgctctatacctaagtcgcagatatcttttatcgattactttatcaccgacatgttcgacgcatgggacgccttcgcccacttacccgcccttatgcagcacttggcagacaattataagcactggaagactttggacgacctgaaatgcaaaagtctgagactgccgtcagattcttag

SEQ ID NO: 29229 - DNA, 3426 bp, Artificial Sequence
  derived and/or modified sequence
gcggccgcgggcgcgggcgggcgcgcgggggagcccggccgagggatgggctgcgcccccagcatccatgtctcgcagagcggcgtgatctactgccgggactcggacgagtccagctcgccccgccagaccaccagcgtgtcgcagggcccggcggcacccctgcccggcctcttcgtccagaccgacgccgccgacgccatccccccgagccgcgcgtcgggaccccccagcgtagcccgcgtccgcagggcccgcaccgagctgggcagcggtagcagcgcgggttccgcagcccccgccgcgaccaccagcaggggccggaggcgccactgctgcagcagcgccgaggccgagactcagacctgctacaccagcgtgaagcaggtgtcttctgcggaggtgcgcatcgggcccatgagactgacgcaggaccctattcaggttttgctgatctttgcaaaggaagatagtcagagcgatggcttctggtgggcctgcgacagagctggttatagatgcaatattgctcggactccagagtcagcccttgaatgctttcttgataagcatcatgaaattattgtaattgatcatagacaaactcagaacttcgatgcagaagcagtgtgcaggtcgatccgggccacaaatccctccgagcacacggtgatcctcgcagtggtttcgcgagtatcggatgaccatgaagaggcgtcagtccttcctcttctccacgcaggcttcaacaggagatttatggagaatagcagcataattgcttgctataatgaactgattcaaatagaacatggggaagttcgctcccagttcaaattacgggcctgtaattcagtgtttacagcattagatcactgtcatgaagccatagaaataacaagcgatgaccacgtgattcaggagtggcagggggtttactatgccagacggaaatccggggacagcatccaacagcacgtgaagatcaccccagtgattggccaaggagggaaaattaggcattttgtctcgctcaagaaactgtgttgtaccactgacaataataagcagattcacaagattcatcgtgattcaggagacaattctcagacagagcctcattcattcagatataagaacaggaggaaagagtccattgacgtgaaatcgatatcatctcgaggcagtgatgcaccaagcctgcagaatcgtcgctatccgtccatggcgaggatccactccatgaccatcgaggctcccatcacaaaggttataaatataatcaatgcagcccaagaaaacagcccagtcacagtagcggaagccttggacagagttctagagattttacggaccacagaactgtactcccctcagctgggtaccaaagatgaagatcctcacaccagtgatcttgttggaggcctgatgactgacggcttgagaagactgtcaggaaacgagtatgtgtttactaagaatgtgcaccagagtcacagtcaccttgcaatgccaataaccatcaatgatgttcccccttgtatctctcaattacttgataatgaggagagttgggacttcaacatctttgaattggaagccattacgcataaaaggccattggtttatctgggcttaaaggtcttctctcggtttggagtatgtgaatttttaaactgttctgaaaccactcttcgggcctggttccaagtgatcgaagccaactaccactcttccaatgcctaccacaactccacccatgctgccgacgtcctgcacgccaccgctttctttcttggaaaggaaagagtaaagggaagcctcgatcagttggatgaggtggcagccctcattgctgccacagtccatgacgtggatcacccgggaaggaccaactctttcctctgcaatgcaggcagtgagcttgctgtgctctacaatgacactgctgttctggagagtcaccacaccgccctggccttccagctcacggtcaaggacaccaaatgcaacattttcaagaatattgacaggaaccattatcgaacgctgcgccaggctattattgacatggttttggcaacagagatgacaaaacactttgaacatgtgaataagtttgtgaacagcatcaacaagccaatggcagctgagattgaaggcagcgactgtgaatgcaaccctgctgggaagaacttccctgaaaaccaaatcctgatcaaacgcatgatgattaagtgtgctgacgtggccaacccatgccgccccttggacctgtgcattgaatgggctgggaggatctctgaggagtattttgcacagactgatgaagagaagagacagggactacctgtggtgatgccagtgtttgaccggaatacctgtagcatccccaagtctcagatctctttcattgactacttcataacagacatgtttgatgcttgggatgcctttgcacatctgccagccctgatgcaacatttggctgacaactacaaacactggaagacactagatgacctaaagtgcaaaagtttgaggcttccatctgacagctaaagccaagccacagagggggcctcttgaccgacaaaggacactgtgaatcacagtagcgtaaacgagaggccttcctttctaatgacaatgacaggtattggtgaaggagctaatgtttaatatttgaccttgaatcattcaagtccccaaatttcattcttagaaagttatgttccatgaagaaaaatatatgttcttttgaatacttaatgacagaacaaatacttggcaaactcctttgctctgctgtcatcctgtgtacccttgtcaatccatggagctggttcactgtaactagcaggccacaggaagcaaagccttggtgcctgtgagctcatctcccaggatggtgactaagtagcttagctagtgatcagctcatcctttaccataaaagtcatcattgctgtttagcttgactgttttcctcaagaacatcgatctgaaggattcataaggagcttatctgaacagatttatctaagaaaaaaaaaaaacgacataaaataagtgaaacaactaggaccaaattacagataaactagttagcttcacagcctctatggctacatggttcttctggccgatggtatgacacctaagttagaacacagccttggctggtgggtgccctctctagactggtatcagcagcctgtgtaacccctttcctgtaaaaggggttcatcttaacaaagtcatccatgatgagggaaaaagtggcatttcatttttggggaatccatgagcttcctttatttctggctcacagaggcagccacgaggcactacaccaagtattatataaaagccattaaatttgaatgcccttggacaagcttttcttaaaaaaaaaaaaaaaaa

SEQ ID NO: 29230 - DNA, 2517 bp, Artificial Sequence
  derived and/or modified sequence
atgggttgtgctccctccattcacgtgagccaaagtggtgtgatctactgccgggattccgatgaatcttcttcaccaagacagaccactagcgtttctcagggcccagcagcacccttacccggtttgttcgtgcaaactgatgccgcagacgccattcctccgtccagagcatcagggccacctagcgtcgctcgggtgcgaagggctcgtacggaactcggatcagggtcaagtgctgggtctgctgcacccgctgctaccacctccagggggaggcgcaggcattgctgctcttccgccgaggcagagactcagacgtgttacacatctgtgaagcaagtttcttctgccgaggtcaggatcggcccaatgcgactgactcaagatccaatccaggtacttctcatcttcgccaaagaggactcacagtcggacggattctggtgggcttgtgacagggccggatacaggtgcaatatagcgaggactcctgagagtgccctggagtgtttcctggataaacaccacgagataatcgtcatcgatcacaggcagactcagaattttgatgctgaggctgtatgcagaagtatcagggcaaccaatcccagcgagcatactgtcattctggctgtggtgtccagagttagcgacgaccacgaggaggccagtgtgctccccctgctgcatgctggcttcaaccgccgttttatggagaattcctctataattgcttgctacaacgaactgatacaaatcgagcacggcgaggtccggagtcagtttaagctccgggcatgcaactcagtttttactgccctggaccactgtcacgaagcaatcgaaatcactagcgacgaccatgtcatacaggagtggcaaggtgtctattacgcaagacgaaaatctggcgactccattcagcagcacgttaagatcacaccagttatcggccagggagggaagatccgtcactttgtttccctgaagaagctctgttgtaccactgacaacaataaacagatccacaagattcatagggatagcggagataacagtcaaaccgaaccacacagttttcgctacaaaaacagacgcaaagaaagcatcgatgttaaatctatctccagtcgcggaagcgacgccccatcactgcagaaccgaaggtaccctagcatggcccgtattcactcgatgacaatcgaggccccaatcaccaaggtcatcaacataataaacgccgctcaggaaaacagccccgttaccgtggcggaggctctagaccgcgttctcgaaatcttgagaacgactgaactttattccccccagctagggaccaaggatgaggatcctcacacatcagacctcgtcggcggactgatgactgacggattaagacgcctgagtggcaatgagtacgtctttaccaaaaacgttcaccagagccattcccacctggctatgcctataaccatcaacgatgtgcctccatgcatcagtcagctgctggataacgaggaaagttgggactttaatattttcgaactggaggctatcacgcacaaaagacctctcgtgtacctggggctcaaagttttctcacggtttggcgtgtgtgagtttctgaactgtagcgagactacacttcgggcttggttccaagtcatcgaagcaaattaccactctagcaacgcctatcacaatagtacgcacgcagcagacgtgctgcacgcaaccgccttcttccttggaaaagagcgggtgaaggggagccttgaccagctagatgaagtggcagcgctcatcgcagccacagtccacgatgtggaccaccccggacgtaccaactcctttttgtgcaatgccggttccgagctggccgtgctgtataacgatacagcggtgctcgaaagccatcatactgccctcgcatttcagcttacagtgaaggacaccaagtgcaatatcttcaagaatatagatcgcaaccactacagaaccctcagacaggctataattgatatggtgctcgccaccgagatgaccaaacactttgagcatgtaaataagtttgtgaactcaatcaataagcctatggccgctgagattgagggatccgactgcgagtgcaatcccgcaggcaaaaatttccccgagaaccagattttgattaagagaatgatgattaaatgcgctgatgttgctaatccatgccggcctctcgatttgtgcatcgagtgggccggtaggattagtgaagagtactttgctcagactgatgaggagaaacgccagggccttcccgttgttatgccggtttttgaccgcaacacatgttccatcccgaagtcgcagattagtttcatagattacttcattaccgacatgttcgacgcatgggatgcttttgcgcacctgcccgcacttatgcagcatttagcagataactataaacattggaaaaccctcgacgaccttaagtgtaagtctctccgcctgccttccgactcgtag

SEQ ID NO: 29231 - DNA, 2517 bp, Artificial Sequence
  derived and/or modified sequence
atgggctgcgcccccagcatccacgtgagccagagcggcgtgatctactgcagagacagcgacgagagcagcagccccagacagaccaccagcgtgagccagggccccgccgcccccctgcccggcctgttcgtgcagaccgacgccgccgacgccatcccccccagcagagccagcggcccccccagcgtggccagagtgagaagagccagaaccgagctgggcagcggcagcagcgccggcagcgccgcccccgccgccaccaccagcagaggcagaagaagacactgctgcagcagcgccgaggccgagacccagacctgctacaccagcgtgaagcaggtgagcagcgccgaggtgagaatcggccccatgagactgacccaggaccccatccaggtgctgctgatcttcgccaaggaggacagccagagcgacggcttctggtgggcctgcgacagagccggctacagatgcaacatcgccagaacccccgagagcgccctggagtgcttcctggacaagcaccacgagatcatcgtgatcgaccacagacagacccagaacttcgacgccgaggccgtgtgcagaagcatcagagccaccaaccccagcgagcacaccgtgatcctggccgtggtgagcagagtgagcgacgaccacgaggaggccagcgtgctgcccctgctgcacgccggcttcaacagaagattcatggagaacagcagcatcatcgcctgctacaacgagctgatccagatcgagcacggcgaggtgagaagccagttcaagctgagagcctgcaacagcgtgttcaccgccctggaccactgccacgaggccatcgagatcaccagcgacgaccacgtgatccaggagtggcagggcgtgtactacgccagaagaaagagcggcgacagcatccagcagcacgtgaagatcacccccgtgatcggccagggcggcaagatcagacacttcgtgagcctgaagaagctgtgctgcaccaccgacaacaacaagcagatccacaagatccacagagacagcggcgacaacagccagaccgagccccacagcttcagatacaagaacagaagaaaggagagcatcgacgtgaagagcatcagcagcagaggcagcgacgcccccagcctgcagaacagaagataccccagcatggccagaatccacagcatgaccatcgaggcccccatcaccaaggtgatcaacatcatcaacgccgcccaggagaacagccccgtgaccgtggccgaggccctggacagagtgctggagatcctgagaaccaccgagctgtacagcccccagctgggcaccaaggacgaggacccccacaccagcgacctggtgggcggcctgatgaccgacggcctgagaagactgagcggcaacgagtacgtgttcaccaagaacgtgcaccagagccacagccacctggccatgcccatcaccatcaacgacgtgcccccctgcatcagccagctgctggacaacgaggagagctgggacttcaacatcttcgagctggaggccatcacccacaagagacccctggtgtacctgggcctgaaggtgttcagcagattcggcgtgtgcgagttcctgaactgcagcgagaccaccctgagagcctggttccaggtgatcgaggccaactaccacagcagcaacgcctaccacaacagcacccacgccgccgacgtgctgcacgccaccgccttcttcctgggcaaggagagagtgaagggcagcctggaccagctggacgaggtggccgccctgatcgccgccaccgtgcacgacgtggaccaccccggcagaaccaacagcttcctgtgcaacgccggcagcgagctggccgtgctgtacaacgacaccgccgtgctggagagccaccacaccgccctggccttccagctgaccgtgaaggacaccaagtgcaacatcttcaagaacatcgacagaaaccactacagaaccctgagacaggccatcatcgacatggtgctggccaccgagatgaccaagcacttcgagcacgtgaacaagttcgtgaacagcatcaacaagcccatggccgccgagatcgagggcagcgactgcgagtgcaaccccgccggcaagaacttccccgagaaccagatcctgatcaagagaatgatgatcaagtgcgccgacgtggccaacccctgcagacccctggacctgtgcatcgagtgggccggcagaatcagcgaggagtacttcgcccagaccgacgaggagaagagacagggcctgcccgtggtgatgcccgtgttcgacagaaacacctgcagcatccccaagagccagatcagcttcatcgactacttcatcaccgacatgttcgacgcctgggacgccttcgcccacctgcccgccctgatgcagcacctggccgacaactacaagcactggaagaccctggacgacctgaagtgcaagagcctgagactgcccagcgacagctag

SEQ ID NO: 29232 - protein, 408 aa, Artificial Sequence
  derived and/or modified sequence
MIPPEQPQQQLQPPSPAPPNHVVTTIENLPAEGSGGGGSLSASSRAGVRQRIRKVLNREMLISVALGQVLSLLICGIGLTSKYLSEDFHANTPVFQSFLNYILLFLVYTTTLAVRQGEENLLAILRRRWWKYMILGLIDLEANYLVVKAYQYTTLTSIQLLDCFVIPVVILLSWFFLLIRYKAVHFIGIVVCILGMGCMVGADVLVGRHQGAGENKLVGDLLVLGGATLYGISNVWEEYIIRTLSRVEFLGMIGLFGAFFSGIQLAIMEHKELLKVPWDWQIGLLYVGFSACMFGLYSFMPVVIKKTSATSVNLSLLTADLYSLFCGLFLFHYKFSGLYLLSFFTILIGLVLYSSTSTYIAQDPRVYKQFRNPSGPVVDLPTTAQVEPSVTYTSLGQETEEEPHVRVA

SEQ ID NO: 29233 - DNA, 1227 bp, Artificial Sequence
  derived and/or modified sequence
atgatcccccccgagcagccccagcagcagctgcagccccccagccccgccccccccaaccacgtggtgaccaccatcgagaacctgcccgccgagggcagcggcggcggcggcagcctgagcgccagcagcagagccggcgtgagacagagaatcagaaaggtgctgaacagagagatgctgatcagcgtggccctgggccaggtgctgagcctgctgatctgcggcatcggcctgaccagcaagtacctgagcgaggacttccacgccaacacccccgtgttccagagcttcctgaactacatcctgctgttcctggtgtacaccaccaccctggccgtgagacagggcgaggagaacctgctggccatcctgagaagaagatggtggaagtacatgatcctgggcctgatcgacctggaggccaactacctggtggtgaaggcctaccagtacaccaccctgaccagcatccagctgctggactgcttcgtgatccccgtggtgatcctgctgagctggttcttcctgctgatcagatacaaggccgtgcacttcatcggcatcgtggtgtgcatcctgggcatgggctgcatggtgggcgccgacgtgctggtgggcagacaccagggcgccggcgagaacaagctggtgggcgacctgctggtgctgggcggcgccaccctgtacggcatcagcaacgtgtgggaggagtacatcatcagaaccctgagcagagtggagttcctgggcatgatcggcctgttcggcgccttcttcagcggcatccagctggccatcatggagcacaaggagctgctgaaggtgccctgggactggcagatcggcctgctgtacgtgggcttcagcgcctgcatgttcggcctgtacagcttcatgcccgtggtgatcaagaagaccagcgccaccagcgtgaacctgagcctgctgaccgccgacctgtacagcctgttctgcggcctgttcctgttccactacaagttcagcggcctgtacctgctgagcttcttcaccatcctgatcggcctggtgctgtacagcagcaccagcacctacatcgcccaggaccccagagtgtacaagcagttcagaaaccccagcggccccgtggtggacctgcccaccaccgcccaggtggagcccagcgtgacctacaccagcctgggccaggagaccgaggaggagccccacgtgagagtggcctag

SEQ ID NO: 29234 - DNA, 1227 bp, Artificial Sequence
  derived and/or modified sequence
atgatcccccctgaacagccccaacagcagctgcagcccccttcacctgcaccccccaaccacgtggtcaccactatcgagaacttaccagccgagggctcaggcggaggggggtctttgtcagccagtagccgagcaggagtccggcagcggattaggaaggtcttgaaccgcgagatgctcatctccgtcgccttgggtcaggtgttgtccctcttgatctgcggcatcgggctgaccagtaagtatctgagtgaagacttccatgcaaatacccctgtcttccagtcatttctcaattatattctgttgtttcttgtctatacaacaacacttgcagtccgacagggggaagagaacctgctggccatcttacggcgccgctggtggaagtacatgattttaggcctgatcgacctggaggctaactaccttgtggtgaaggcatatcagtatacaacccttacttctatccaactgctggactgcttcgtgattccagttgtcattttactgtcctggtttttcctgctgatcagatataaggcagtacacttcatcgggattgtggtctgcatattggggatgggctgcatggtcggggcagatgtgttagtgggaaggcaccagggcgccggagagaacaagctggtgggcgatctcctagtgctcgggggggctaccctgtatggcatttccaacgtttgggaggagtacatcatccgcactttgtcaagagtggagttcttgggaatgattggtcttttcggagcattcttcagcgggattcagctggcaattatggaacataaagagctgttgaaggtaccgtgggattggcaaatcggcctactttacgtgggttttagtgcctgtatgtttggactgtattcatttatgcctgtggtcataaagaagacctccgcgacaagtgtgaacttatccctactcaccgccgatttgtactccctgttttgcggcctttttctgtttcactacaagttctcaggattgtatctgctgtccttctttaccatactgatcggcctcgtgctgtattcttctacgagcacctatattgctcaggatccccgggtgtacaaacagttccgaaacccctccggcccagtggtggatttgcccacgacagctcaggtggaaccatccgtcacttacacgtccctgggacaagaaaccgaagaggaaccacacgttagggtggcttag

SEQ ID NO: 29235 - DNA, 1227 bp, Artificial Sequence
  derived and/or modified sequence
atgatccccccagagcagccccagcagcagctgcagccccccagccctgccccacccaaccacgtggtgaccaccatcgagaacctgcctgctgagggcagcggcggcggcggcagcctgagcgccagcagccgggccggcgtgcggcagaggatcaggaaggtgctgaaccgggagatgctgatctctgtggccctgggccaggtgctgagcctgctgatctgtggcatcggcctgaccagcaagtacctgtctgaggacttccacgccaacacccctgtgttccagagcttcctgaactacatcctgctcttcctggtgtacaccaccaccctggccgtgcggcagggcgaggagaacctgctggccatcctgcggcggcgctggtggaagtacatgatcctgggcctgattgacctggaggccaactacctggtggtgaaggcctaccagtacaccaccctgaccagcatccagctgctggactgcttcgtcatccctgtggtgatcctgctgtcctggttcttcctgctgatccgctacaaggctgtgcacttcatcggcatcgtggtgtgcatcctgggcatgggctgcatggtgggcgcagatgtgctggtgggccgccaccagggcgctggggagaacaagctggtgggggacctgctggtgctgggcggggccaccctgtatggcatcagcaatgtgtgggaggagtacatcatccgcaccctgagccgggtggagttcctgggcatgattggcctgtttggagccttcttcagcggcatccagctggccatcatggagcacaaggagctgctgaaggtgccctgggactggcagatcggcctgctgtatgtgggcttcagcgcctgcatgtttggcctgtacagcttcatgcctgtggtgatcaagaagaccagcgccacctctgtgaacctgagcctgctgacagctgacctgtacagcctcttctgtggcctcttcctgttccactacaagttcagcggcctgtacctgctgtccttcttcaccatcctgattggcctggtgctgtacagcagcaccagcacctacatcgcccaggacccccgggtgtacaagcagttcaggaaccccagcggccctgtggtggacctgcccaccacagcccaggtggagcccagcgtgacctacaccagcctgggccaggagacagaggaggagccccacgtgcgggtggcctag

SEQ ID NO: 29236 - DNA, 1227 bp, Artificial Sequence
  derived and/or modified sequence
atgatcccccccgagcagccccagcagcagctgcagccccccagccccgctccaccaaaccatgtggttacaacaatcgaaaacctcccagccgagggtagcgggggcggcggctcactgagcgccagcagtagagccggggtcaggcagcggatcaggaaggtactcaatagggaaatgctcatatctgtcgctctggggcaagtcttatccctgctcatctgcgggatcggtctgacatcgaagtatctcagcgaagacttccatgcaaacactccggtgttccaatcttttctcaactacatcctcctgtttttggtatataccactaccctcgccgtgagacaaggcgaagagaacctgcttgcaatcctgagacgccgctggtggaaatacatgatccttggcctaatcgacctcgaagctaactatctggtggtgaaagcctatcagtatacaactctcacatcaattcagctgctcgactgtttcgtaatcccagtagtgatcctcctcagctggtttttcctgcttattagatacaaagctgtacattttataggaattgttgtttgtattttgggaatgggatgcatggttggtgccgacgttctcgtgggccgccaccaaggcgccggagagaacaagctggtaggcgatctgttagttcttgggggcgccactctctatggaatatcaaacgtttgggaagaatacatcatcagaaccttgtcccgtgtcgaattcctaggtatgatcggtctgtttggggccttctttagcgggatacagctggctattatggaacacaaggaactgctgaaggtgccgtgggactggcaaatcggcctcctatatgtcggcttctcggcctgtatgtttggcctttattcattcatgcctgttgtcatcaagaaaacttctgccacatccgtgaacctgtccttgctgaccgctgatctgtattccctcttttgcggactattcctttttcactacaagttctccggtttgtacctgttaagctttttcaccattctgatcggtctggtgctatattcctctacttctacttacattgctcaggaccctagggtttacaagcaattccggaatccctccggtcccgttgttgaccttcccacgactgcacaggtcgagccatccgtcacgtacactagcttgggccaggagaccgaagaagagcctcacgttcgagtggcctag

SEQ ID NO: 29237 - DNA, 1227 bp, Artificial Sequence
  derived and/or modified sequence
atgattcctcctgaacagccccagcagcaattacagccaccttcaccagctcccccaaaccatgtagtgaccactatcgagaacctccccgcagagggcagtggagggggtgggagcctttccgcctctagccgtgcgggtgtcaggcagcgcattaggaaggtgttgaatagggagatgctgatcagcgtggccttaggtcaagtgctgtcacttttaatatgcggcatcgggctgacctccaagtatttgtcagaagatttccatgccaatactcccgtctttcaatcattcttgaattatatacttctgttcctggtgtataccacgacacttgctgttcggcagggagaggagaatctcctcgctattctccgcaggcgatggtggaagtatatgatcctcggtttgattgacttggaggccaactatctggtggtgaaagcttatcagtatactaccttgaccagtatccagcttctggattgttttgttattcctgtggttattttgctgtcatggttttttttactgattaggtataaagctgttcactttattggcatcgtcgtatgtattctggggatgggctgcatggtgggagctgatgtcctggtgggccgtcaccaaggagccggtgagaacaagctcgttggtgatcttttggtgttaggcggagcaacactttacgggataagcaacgtctgggaggagtacatcataagaacattgtctagagttgagtttcttggcatgatcggactctttggcgctttctttagtggaatccagctcgcaatcatggaacacaaggagcttctgaaagtgccatgggactggcagatcggcttgttatatgtgggtttttccgcttgcatgtttggtttatactcctttatgcctgtagttattaaaaagaccagcgccacctctgtcaatcttagtcttctgacagccgatctgtactccctgttttgcgggctatttttgttccattacaaatttagcggactctatttactgtcgttcttcacaattctcatcgggttggtgctttatagcagtacttccacttatattgctcaggatcctagggtttacaaacaattccggaatccctccggccctgtagtagacctgcccacgaccgctcaggtagagccatctgtgacctacacctctctgggccaagaaactgaggaggagccacatgtgagggttgcatag

SEQ ID NO: 29238 - DNA, 4852 bp, Artificial Sequence
  derived and/or modified sequence
gggactggagaggagtgagtggcgggctgggcggcggcggccgtagccgcgggtgcctccccgcctcaccgcttcgcaggcagcaccgcctcccgggccgcggccgcccggccgggtcctctgcgcgttcccgggcccggaaccggcacacgatgcacccggctgcgttctgatcgccgccgcgcctcagcctctgccgcgatgatcccccctgagcagccgcagcagcagctgcagccgccgtcgccagccccgccgaaccatgtggtgaccaccatcgagaacctgccggccgagggcagcggcggcggcgggagcctgtccgcctcctcccgggctggcgtgcgccagaggatccgcaaagtgctgaacagggagatgttaatctctgtggccctaggccaggtgttatccctccttatttgtggaattggcttgactagcaagtatctgtcagaagatttccacgccaacacaccagtcttccagagtttcctcaattacattcttctcttcttggtctataccaccacactagccgtcagacaaggagaagaaaacctcctggcaattttacgacgaagatggtggaagtacatgattttgggactcatagacctggaagcaaattatctggtggtcaaggcttaccaatacacaactctgaccagtatccagctcctggactgttttgtgatcccagtcgtgattttgctctcctggttcttcctgctgatccggtacaaggctgtgcatttcatcggcatcgttgtctgcatcctgggaatgggctgcatggtgggagcagatgtgcttgtgggaagacatcagggagcaggggaaaataagctggtaggggaccttctggtcttaggaggagccacactctatggtatttctaacgtctgggaagaatacatcatccgaactctgagccgagtggaattcctgggaatgattggtctctttggagcatttttcagtggaattcaattagctataatggagcataaggaactgttgaaggtgccctgggactggcaaataggactgctctacgttggctttagtgcctgcatgtttggtctctacagctttatgccagtcgtcataaagaaaaccagtgccacttcagtcaacctctccttgctcacagcagacttgtacagcctgttctgtggattgtttctcttccactacaagttttcaggactttatctcctgtctttcttcaccatcctcattgggctggtgctctactcctccacctccacctacatagcccaggacccccgagtgtataagcagttccgcaatccttcaggacctgttgtggacttaccgaccacagctcaggtggaaccctcagtcacctacaccagcctgggccaggagaccgaagaggagcctcatgttcgtgtggcctagggtgaggcccgccctgccaactgaggccaactcattggccatgtttttgcccatcatctctgtattgtacatagagaaaggtatttactaggtgcagtttacacaggtggactgcaaggtagcaaatcctccaaaagcttgtgaaaggaacaagctcaacatcactggagacacaggctctaatccacctgacttggaaggatgcctagctaacgtgtatcctgatcacaactcccctgcattcattactgtgaaaatttttgaatcaaaagcaagtattattgttattatgatttgtattattattattgctgttactgttattacaccaactttcaggaggatgttttgtactcctgatggaaactattgccagacccacatgtagtcaacataaaccccacttttctatggcaattcactttttaagagtcatactttatttttttgcacagactatatgagtgatgcatgccacaggagctccacccctgagaagtttccttttcctagggacctggtggttaatggtttcctctgttacctgttggattgcctgctcaataagtattttgtgctgtgacctttgtggggaggggcaactgaccatatacttctctattctaggaatagatataaaagaaacattttagcctttttatatttcgatctctgattactccaggccattgcctttctgttgtgccacgtgattctgctaatcaagtccctgtaataacaggataaggactgttccattactgtggcttttgggagcccccagaaataatatcatttgtgtttaggacaatatataattataaaatctttctgctcctccctgtagcctctcttcaaaaactatcttttattttttttccagatttccttagtgataatatggaaattaatcaaggcactggaaaaagccatggtcctctgcccttttaattctgtgacacctttttaaaaatacaccagcatggaaattacctttattgtggaaaatcattggttgtgccacctcctaacaaagtcaaggtgctgatgtggagcagtctttgaaaatggcttaattgatttggccactttgcagtggtaacaatgtcatcattgaaaaagtctggcattttggtcatatttggcatccattcaataacagatatattgacacgacattcttttttttttttttttttttttttgagacggagtctcactctgtcgcccaggctggagtgcggtggcacgatctcagctcactgcaacctccgcctccgggattcacaccattctcctgcctcagcctcccgagtagctgggactacaggcacctgccacgacgcccagctaattttttgtatttttagtagagatggggtttcaccgtgttagccaggatggtctcgatctcctgacctcgtgatccgcccaccttggcctcccgaagtgctgggattacaggcgtgagccactgcgcccggccgacacgacattcttatggacccagagaatactgcaggatcctgataagaccttgagtgatatgtcactagtctaatctgttgcccttaaaatagcccttttttcaaacacaggaaattaagaaacaccacagacctctattatttagaatagattctatgtgtcagtatgtgatgtactcttttagtttgactgacttcaataccattcaaaaagatcctcaatggagttacagggtttataggggaaaaatacatgtttatgagacattgggcaattcaaatcaacatgtgttacataagcaagcaaagcaaaacaccagtggggtctctggaaagtaaaaggacagactacagtagaaggactgatcccagagtgcctgtacaaggcctaaatctggcaggcaaaagcatcccacactgtctgtcagcacccacatggcctttttgcctgccttctataacgggtaagtggacctacccttggagatagagaagaaaaattatcttctctgatattcggatgtaatggtcatctcagttcagccccctaggaaacatgttttattttccatggggaaaatatcagcgttaaagctctatcaaatcaaaacaactttgccaacatcttctctctgctaccttttaaaccaattaaatacctttctctgaatattttgtccattcagatccgaagacctttaaagactgtggttttatttttgtgtttacattcctttggtttgaataatttgcttgatttattgcatttttagtatttattttaagccagatgttttcatctttgattcatttttatgacattaatttgtagacacttagtaaagtcttatgagaagcaagtggatgaaattatctccaagtccactcagtagactggagttttttaaaaatataaatttccaaaaagtttgcaatcaacagatggctaaaggttgccatctgaattattttataggatattttaattgactccattgtatggaaaccaagtgtgaatgttaagatgaatttgccgtataccctttatcattcggtgtccttgtactcagactttcatgtccctgggtgacctcaatgtgttggtttgtctccatttagaaaggttgataatatattgaattgttcaagatcaggagttccagactgaccctccaggaaaaaaaaaatcgcaaagaacaaattctttttctgtgtaaaaaacactgatcctttgggaatggggcgggaaatgggagtaggacaacattaactttagctgttttagtttctgagatttcataacctcagtagacaccagcaaaattttcagtttctaactccaccaccaatctctcctcaatgaataagactttagcaatttatatagaatttgatcaggtaagagcgaaccacaattctcctgaaccctgctagagattaagtggtggttctcacttcctcaatgaaaacttgcactggggacagcgcttgccttggtcagaccttcccacatctacatactctcaaatacatgaccaggtgatcaagcaatggaaaaatttgcaccaccgtgtcccatgaaattgtttcaatgtttagtttagatattgctaacttgtgctattaaccttttgacaagcgtgtagtattgtttgttttgggtttctttttgatttataactatttagtagtccccagctagctaccagtacagattttaccccatgggtaggattctattgttaagccacataacaaagcacactaattctgacaacactgcaaatggaaaatacgaaccaaaaaaaagttacaccgataagttcaacaaactgtccatttttgatatttgcatgctcccctatggactggctgtggcaatgtaatgcctgtataatgttttcaaataaaaataaatgctttatgaaagcaccgaa

SEQ ID NO: 29239 - protein, 138 aa, Artificial Sequence
  derived and/or modified sequence
MQLPPFDMWKDYFNLSQVVWALIASRGQRLETQEIEEPSPGPPLGQDQGLGAPGANGGLGTLCNFCKHNGESRHVYSSHQLKTPDGVVVCPILRHYVCPVCGATGDQAHTLKYCPLNGGQQSLYRRSGRNSAGRRVKR

SEQ ID NO: 29240 - DNA, 417 bp, Artificial Sequence
  derived and/or modified sequence
atgcagctgccccccttcgacatgtggaaggactacttcaacctgagccaggtggtgtgggccctgatcgccagcagaggccagagactggagacccaggagatcgaggagcccagccccggcccccccctgggccaggaccagggcctgggcgcccccggcgccaacggcggcctgggcaccctgtgcaacttctgcaagcacaacggcgagagcagacacgtgtacagcagccaccagctgaagacccccgacggcgtggtggtgtgccccatcctgagacactacgtgtgccccgtgtgcggcgccaccggcgaccaggcccacaccctgaagtactgccccctgaacggcggccagcagagcctgtacagaagaagcggcagaaacagcgccggcagaagagtgaagagatag

SEQ ID NO: 29241 - DNA, 1562 bp, Artificial Sequence
  derived and/or modified sequence
gggaaacgcctgctgctcttgcccttgcccacgggcccccagccccagcccctctcctgtggcccaccacccctgctttggtgccatgcagctgccacccttcgacatgtggaaggactacttcaacctgagccaggtggtgtgggcgctgatcgcaagtcggggtcaaaggctggagacccaagagattgaggagccaagtcccgggcctccgctggggcaggatcaggggctgggggcgccaggggccaacgggggcctggggaccctgtgcaacttctgcaagcacaacggggagtcccgccacgtctactcctcacaccagctgaagacaccggatggcgtggtggtgtgtcccatcctgaggcactacgtgtgtcccgtgtgcggggccaccggtgaccaggcccatacgctcaagtactgcccgcttaacggtggccagcagtccctctaccgccgcagcgggcgcaactcggccggacgcagggtcaagcgctgagcatcgtgagatgctcaccacccgcacccctgaccctcctggtccatcccacccaagtccctaaactctctcttccagtcacccagccctttggaatttctggcccccagaactccaccctggctggatcctgaaacagtggaggctgctgggagccaggccagccccgcccccttggacctgtcagccctcggagctctggcctgtgggcgttggcctgagggtccttggtgccgcgggaacccttcctgcacggccctgtagcgccctctgggccccggttcatggatcttttgtcctcgtggggcctgctggtgactggagccctgccccttcgacttctctgttccttgtggagttcttggatttttgaacctccaggattccacggtgctgtcccaagccagcccttaggagatactgaacaaggctggctgagaagtgcctactcaagaacttcaagatgggatgtcgacttaagaccagccttctccatcttcagcctcctgcagaaccacggtgtcatcgtggaccacgcctgttcattccttccctgacctcagtacccatccgtcaggagcggagtaggactctggagagcaccgtatcactggagggcaccgtgtcttcgcaggctcacctgtggatggagagccgtggggtgagctgacacctttcaatgccccctggttgttcttccccttgttcagcccattgcacccggtacctgcccccatccccaaatcaccgatgggtcctttcccccagcgagaagcatatctctcgaccacctcccgtccgaccccccaaatcgtgatagttgactaaaggacatttttttttcctcctgtgtttttcaacctccaacgttcaagtcaaggaaccgccgataagaagggggtttgagtacccggatgggaatggcaatggcctagcttttattttaggggcaaagagaagaagggcccccgtcagattttaagttgttcagtttttggcacagggtcgggaccctgagtattgagctctggtgaataaaaaggttttctagtcgtctttg

SEQ ID NO: 29242 - DNA, 417 bp, Artificial Sequence
  derived and/or modified sequence
atgcagcttcccccatttgacatgtggaaagactattttaatcttagccaggtggtgtgggcccttattgcatcccgcgggcagcggctagaaacacaagaaatcgaggagcccagcccaggaccacctcttggacaagaccaaggtctgggggcacctggagccaatggcgggctgggtaccctttgcaatttttgtaaacataatggtgagtcacgacacgtatattcttctcaccaactgaaaacaccagatggcgtcgtggtgtgccccattctgaggcattacgtttgccccgtgtgtggggcaaccggcgaccaggctcacactcttaagtactgccccctgaacggtgggcagcagtccctctatagacgtagcggacggaactccgcgggccgccgcgttaaaagatag

SEQ ID NO: 29243 - DNA, 417 bp, Artificial Sequence
  derived and/or modified sequence
atgcagctgcccccatttgacatgtggaaggactacttcaacctgagccaggtggtgtgggccctgattgccagccggggccagaggctggagacccaggagattgaggagcccagccctggcccccccctgggccaggaccagggcctgggcgcccctggggccaacggcggcctgggcaccctgtgcaacttctgcaagcacaatggagagagccgccacgtgtacagcagccaccagctgaagaccccagatggagtggtggtgtgccccatcctgcggcactacgtgtgccctgtgtgtggggccaccggggaccaggcccacaccctgaagtactgccccctgaatggaggccagcagagcctgtacagaagaagtggaagaaattctgctggccggcgggtgaagaggtag

SEQ ID NO: 29244 - DNA, 417 bp, Artificial Sequence
  derived and/or modified sequence
atgcagctgccccccttcgacatgtggaaggactacttcaacctgtcacaggtcgtgtgggctctgattgcgtcccgggggcagcgattggaaacgcaggaaatcgaagaacccagcccagggcctcctctgggtcaggatcaaggcttgggagctcccggtgcaaatggtggactggggacattatgcaacttttgtaagcataacggcgaatcgcgtcacgtttactctagtcaccagctgaagactcccgacggggtggtcgtctgtcctattttgaggcactacgtttgtccagtctgtggagccaccggcgatcaagcccacacgctcaagtattgccctctcaatgggggccagcaatcattatacagacgtagtggaagaaatagcgctggcaggagagtgaaacggtag

SEQ ID NO: 29245 - DNA, 417 bp, Artificial Sequence
  derived and/or modified sequence
atgcagctgcccccattcgatatgtggaaggactatttcaacctaagtcaggtagtatgggcacttatcgcttctcgcggacagaggctagaaacacaggagatcgaggaaccctcaccagggcctcctcttggccaggaccaggggctgggggcacccggtgctaacggcggtctggggacactgtgtaacttctgtaaacataacggggagtccagacacgtatattcatcgcatcagctcaagacccccgatggagtggtagtatgtcccatcctgcgccattacgtgtgccctgtctgcggcgctacaggcgaccaggctcacacactgaaatattgtccccttaacggcggtcaacagtccctctatcgtcggtcaggaagaaacagtgctggcaggagggtcaagagatag

SEQ ID NO: 29246 - protein, 382 aa, Artificial Sequence
  derived and/or modified sequence
MMFPGLLAPPAGYPSLLRPTPTLTLPQSLQSAFSGHSSFLVEDLIRISRPPAYLPRSVPTASMSPPRQGAPTALTDTGASDLGSPGPGSRRGGSPPTAFSPASETTFLKFGVNAILSSGPRTETSPALLQSVPPKTFAFPYFEGSFQPFIRSSYFPASSSVVPIPGTFSWPLAARGKPRRGMLRRAVFSDVQRKALEKMFQKQKYISKPDRKKLAAKLGLKDSQDTARRTEPAPDSTPRPRASPGAPDLTSASPFFSPAGTFQVKIWFQNRRMKWRNSKERELLSSGGCREQTLPTKLNPHPDLSDVGQKGPGNEEEEEGPGSPSHRLAYHASSDPQHLRDPRLPGPLPPSPAHSSSPGKPSDFSDSEEEEEGEEQEEITVS

SEQ ID NO: 29247 - protein, 343 aa, Artificial Sequence
  derived and/or modified sequence
MMFPGLLAPPAGYPSLLRPTPTLTLPQSLQSAFSGHSSFLVEDLIRISRPPAYLPRSVPTASMSPPRQGAPTALTDTGASDLGSPGPGSRRGGSPPTAFSPASETTFLKFGVNAILSSGPRTETSPALLQSVPPKTFAFPYFEGSFQPFIRSSYFPASSSVVPIPGTFSWPLAARGKPRRGMLRRAVFSDVQRKALEKMFQKQKYISKPDRKKLAAKLGLKDSQVKIWFQNRRMKWRNSKERELLSSGGCREQTLPTKLNPHPDLSDVGQKGPGNEEEEEGPGSPSHRLAYHASSDPQHLRDPRLPGPLPPSPAHSSSPGKPSDFSDSEEEEEGEEQEEITVS

SEQ ID NO: 29248 - DNA, 1032 bp, Artificial Sequence
  derived and/or modified sequence
atgatgttccccggcctgctggccccccccgccggctaccccagcctgctgagacccacccccaccctgaccctgccccagagcctgcagagcgccttcagcggccacagcagcttcctggtggaggacctgatcagaatcagcagaccccccgcctacctgcccagaagcgtgcccaccgccagcatgagcccccccagacagggcgcccccaccgccctgaccgacaccggcgccagcgacctgggcagccccggccccggcagcagaagaggcggcagcccccccaccgccttcagccccgccagcgagaccaccttcctgaagttcggcgtgaacgccatcctgagcagcggccccagaaccgagaccagccccgccctgctgcagagcgtgccccccaagaccttcgccttcccctacttcgagggcagcttccagcccttcatcagaagcagctacttccccgccagcagcagcgtggtgcccatccccggcaccttcagctggcccctggccgccagaggcaagcccagaagaggcatgctgagaagagccgtgttcagcgacgtgcagagaaaggccctggagaagatgttccagaagcagaagtacatcagcaagcccgacagaaagaagctggccgccaagctgggcctgaaggacagccaggtgaagatctggttccagaacagaagaatgaagtggagaaacagcaaggagagagagctgctgagcagcggcggctgcagagagcagaccctgcccaccaagctgaacccccaccccgacctgagcgacgtgggccagaagggccccggcaacgaggaggaggaggagggccccggcagccccagccacagactggcctaccacgccagcagcgacccccagcacctgagagaccccagactgcccggccccctgccccccagccccgcccacagcagcagccccggcaagcccagcgacttcagcgacagcgaggaggaggaggagggcgaggagcaggaggagatcaccgtgagctag

SEQ ID NO: 29249 - DNA, 1032 bp, Artificial Sequence
  derived and/or modified sequence
atgatgttcccaggcctgctggcaccccccgctggctacccctctcttctgcggcctacgcctactctaacacttccacaatcccttcagtcagcctttagcgggcattcttcctttctggtggaagacttgattcggatctcccggcccccagcctatctgccacggagcgtgccaactgcttcaatgagccctcccagacaaggggcccccactgcgctgacggacacaggagccagtgatcttggcagccctggtcccggaagcagaaggggggggtctccgccgacagcatttagtcctgcctccgagaccacttttctcaagtttggcgtgaatgctattctgtcatctgggccacggacagagactagccccgctttgttgcagtcagtgcctcccaagacgttcgcttttccctacttcgagggatcctttcaacctttcataaggagctcttacttcccagcctcttcctctgtggtacctatcccggggaccttctcctggcctttagccgctcgtggtaagccaaggagaggtatgctgcgccgagcagtgtttagcgacgtccagcggaaggctctggagaaaatgtttcagaaacagaaatacatttcaaagcctgacagaaaaaagctagcggctaaactgggtctgaaagactcccaagtgaaaatttggttccagaatcgacgtatgaagtggcgtaactctaaggagcgggagctcctgagctccgggggttgccgggagcagaccctgcctacaaaactgaatcctcatcccgacctttctgatgtagggcagaaaggtcctggaaacgaagaagaggaggagggaccagggagccccagtcaccgcctggcttaccacgcctcgtccgaccctcaacacctgcgggatccacgcctgccaggccctcttccccccagccccgctcacagcagctcgcccgggaagccctcggacttctcagactcagaggaggaagaagagggggaagaacaggaggagatcactgtgtcctag

SEQ ID NO: 29250 - DNA, 1149 bp, Artificial Sequence
  derived and/or modified sequence
atgatgttccccggcctcctcgcgccccccgccgggtaccctagcctcctgcggcccacgcccaccttgacgctgccccagtccttgcagtcggcattttccggccactccagcttcctggtggaggatctgatccgcatcagccgaccccccgcctacctgccccgcagcgtgcccaccgccagcatgtcgccgcccaggcagggggcccccacggccctcaccgacacgggggcctcggacctgggctccccgggtcccggcagccgacggggcggctctccgccgactgccttctcccctgccagcgagacgacgtttctgaagtttggagtgaacgccatcctctcctcggggcccagaacagaaacatccccagccttgctccagagcgtccctcccaagaccttcgcctttccctacttcgaagggtcttttcagcctttcatcagatcttcttatttcccagcttcctccagcgtggtgcccatccccgggaccttctcctggccgctggccgcgcgcgggaagcctcggcggggcatgctgcgtcgagcagtcttctccgacgtgcagcggaaggcgctggagaagatgttccagaagcagaagtacatcagcaagcccgaccgcaagaagctggcggccaagctgggcctgaaagactcgcaggacacagcccgaaggacagagcctgcacccgactccactccccgcccccgtgcgtcccccggagcccctgatctgacctctgcttctcccttcttctcgccggccgggacattccaggtgaaaatctggttccagaaccgacgcatgaaatggcggaactccaaggagcgcgaactcctgtctagcgggggctgtcgcgagcagaccctgcccaccaagctcaatccgcacccggacctcagcgacgtgggccagaagggccctgggaacgaagaggaggaggagggcccgggcagccccagccaccgcctggcctaccacgcgtcctccgacccccagcacctgcgggacccgcggctgccagggccgctgcccccctcgcccgcgcactcgagcagtcccgggaaaccttcggacttctcagattccgaggaggaagaggagggcgaggaacaggaggaaatcaccgtgtcctag

SEQ ID NO: 29251 - DNA, 1380 bp, Artificial Sequence
  derived and/or modified sequence
caatcagagagtccagagcctccggcgaatgaagctcgagtggagaactttgttgaacttcattgtcagagctgtcacttttcaaagtgctttagcgggcgggccactataaaaccatcacctcgacgagaggaccacggaggactcgcagacgcccaagtgggattgttacttggagacgtttgctaagcccaagagagaggacactgtgggggcgggaggggcgggaagcgaggcgtttaccctccggccactgaaagaagggttatttcgcccgcccgcgcctaccatgatgttccccggcctcctcgcgccccccgccgggtaccctagcctcctgcggcccacgcccaccttgacgctgccccagtccttgcagtcggcattttccggccactccagcttcctggtggaggatctgatccgcatcagccgaccccccgcctacctgccccgcagcgtgcccaccgccagcatgtcgccgcccaggcagggggcccccacggccctcaccgacacgggggcctcggacctgggctccccgggtcccggcagccgacggggcggctctccgccgactgccttctcccctgccagcgagacgacgtttctgaagtttggagtgaacgccatcctctcctcggggcccagaacagaaacatccccagccttgctccagagcgtccctcccaagaccttcgcctttccctacttcgaagggtcttttcagcctttcatcagatcttcttatttcccagcttcctccagcgtggtgcccatccccgggaccttctcctggccgctggccgcgcgcgggaagcctcggcggggcatgctgcgtcgagcagtcttctccgacgtgcagcggaaggcgctggagaagatgttccagaagcagaagtacatcagcaagcccgaccgcaagaagctggcggccaagctgggcctgaaagactcgcaggtgaaaatctggttccagaaccgacgcatgaaatggcggaactccaaggagcgcgaactcctgtctagcgggggctgtcgcgagcagaccctgcccaccaagctcaatccgcacccggacctcagcgacgtgggccagaagggccctgggaacgaagaggaggaggagggcccgggcagccccagccaccgcctggcctaccacgcgtcctccgacccccagcacctgcgggacccgcggctgccagggccgctgcccccctcgcccgcgcactcgagcagtcccgggaaaccttcggacttctcagattccgaggaggaagaggagggcgaggaacaggaggaaatcaccgtgtcctagaagccgctcgcacgccagagtactatttttaagtgctttgaaatcgaagaggtggggtc

SEQ ID NO: 29252 - DNA, 1032 bp, Artificial Sequence
  derived and/or modified sequence
atgatgtttcctggcctgctggcccctcctgctggctaccccagcctgctgcggcccacccccaccctgaccctgccccagagcctgcagagcgccttcagcggccacagcagcttcctggtggaggacctgatccgcatcagccggcccccagcctacctgcccaggtctgtgcccacagcctccatgagccccccccggcagggcgcccccacagccctgacagacacaggagccagtgacctgggcagccctggccctggcagccggcggggcggcagccccccaacagccttctccccagccagcgagaccaccttcctgaagtttggagtgaatgccatcctgagcagcggccccaggacagagaccagccctgccctgctgcagagcgtgccccccaagacctttgccttcccctactttgagggcagcttccagcccttcatccgcagcagctacttccctgccagcagctctgtggtgcccatccctggcaccttctcctggcccctggccgcccggggcaagccccggcggggcatgctgcggcgggctgtgttcagtgatgtgcagaggaaggccctggagaagatgttccagaagcagaagtacatcagcaagccagacaggaagaagctggccgccaagctgggcctgaaggacagccaggtgaagatctggttccagaacagaaggatgaagtggaggaacagcaaggagcgggagctgctgagcagcggcggctgccgggagcagaccctgcccaccaagctgaacccccacccagacctgagtgatgtgggccagaagggccctggaaatgaggaggaggaggagggccctggcagccccagccaccggctggcctaccacgccagcagtgacccccagcacctgcgggacccccggctgcccggccccctgccccccagccctgcccacagcagcagccctgggaagcccagcgacttcagtgacagcgaggaggaggaggagggggaggagcaggaggagatcaccgtgtcctag

SEQ ID NO: 29253 - DNA, 1032 bp, Artificial Sequence
  derived and/or modified sequence
atgatgttccccggcctgctggccccccccgccggctaccccagcctcctcagacctacccccactctgacactacctcagtccctccaatctgcgttctcgggccactcctccttccttgtggaagacctaatccgaattagccggcccccagcatatctgccccgaagcgtcccgacagcatctatgtctcctcccagacagggagctcctacggctctcactgatacaggagcctccgaccttggaagcccaggacctgggtcccgccggggaggatctcctcctacagccttcagcccagccagtgaaactaccttcttgaaattcggcgtcaatgcgatactgtcttctggtccccgtaccgaaacctcccccgctcttctccagagcgttcctcctaaaacctttgctttcccctactttgagggaagcttccaaccttttatcaggtcctcttattttccggcgtccagtagcgtggttccaatccccggcaccttctcctggcccctggcagccagagggaagccgcggcgcggcatgctccgacgggccgtctttagcgatgtacagcgaaaagccctagaaaagatgtttcagaaacagaagtatatctccaagcccgacagaaagaaattagccgctaagctggggttgaaagactcacaggtgaagatctggtttcagaacaggaggatgaaatggcggaatagtaaagagcgtgaacttctgtctagcggaggctgccgcgagcagactttgccaactaagctgaatccacaccccgatctgtctgatgtggggcagaagggccctggcaatgaagaagaagaagaaggcccaggtagtccttcccatagactagcataccatgcttccagtgacccccagcacctgagagatccaaggctgcctggccctctccccccctcccccgctcactcgagcagccctgggaaaccaagtgacttctccgactctgaggaagaggaagaaggagaggagcaagaggagatcacggtgagctag

SEQ ID NO: 29254 - DNA, 1032 bp, Artificial Sequence
  derived and/or modified sequence
atgatgttccctgggctgctggcccctcctgctggttatcctagtcttctccgtccaacacctacactcactcttccgcagtctctccagtctgctttcagcggacatagctcattcctggtggaggacctgatccgaatttcgcgaccccctgcatacctcccaaggagcgtcccaaccgctagcatgtcccctccccgtcaaggtgccccaacagcattaacggatactggagcttctgatctgggatctcccggtcctggttccagacggggtggcagccctcctactgctttcagtcctgcctctgagaccactttcctcaaattcggtgttaatgctattctcagttctggacccaggactgaaacttcacccgcactgcttcaatccgtcccacccaagaccttcgctttcccctatttcgaagggtcttttcagcccttcataagatcaagctacttccccgcttcctccagtgttgtgccaatacctggaacatttagctggcccctggctgctagagggaaaccccgacgcggaatgctgagacgggcagtatttagcgacgttcagcgcaaagctcttgaaaaaatgttccagaaacagaagtacattagtaaacctgatcgaaaaaagctggccgctaaacttgggcttaaagattcacaggtcaaaatctggttccagaaccgcaggatgaaatggaggaatagcaaggagagggagctcctcagcagcggtgggtgcagggagcagacgctccccaccaaactgaacccacatccagatcttagcgatgtgggacaaaaggggccaggaaatgaggaagaggaagaagggcctggaagcccaagccatcgcctggcctaccacgcctcaagtgacccacagcatttgagggacccgagactccctggacctctgcccccttcccccgcacacagtagcagccctgggaagccgagcgacttctcagattcggaagaggaggaggaaggcgaggaacaggaggagattactgtctcgtag

SEQ ID NO: 29255 - DNA, 1149 bp, Artificial Sequence
  derived and/or modified sequence
atgatgtttccaggcttgctggctccaccagcaggatatccatccctcctgcgtcccacgcctacattgacattacctcagagcttgcaaagcgccttctctgggcactccagcttcctggtcgaagatttgattagaatttcaagaccgccggcctatcttcccagatcggtgcctacagcctcgatgagtcctcccaggcagggagcacctaccgctctcaccgacacaggcgctagtgatctgggctcgcctggcccgggcagtaggcggggtggctctcctccgaccgccttttctcccgcctccgaaactacttttctgaagtttggagtgaatgccattctgagctcaggccctaggacggaaacatcccctgctcttttgcagtctgtccctccgaagacttttgcgttcccgtacttcgaggggtcattccagcccttcattcggagttcttattttcctgcttctagttctgtggtgcctatccctggaactttcagttggcctctcgccgcccgcggcaaacctaggagaggcatgctgcgacgtgcagtgttctctgacgtacaacggaaagctctggagaaaatgtttcaaaaacagaaatacattagcaagccagataggaaaaaattggcagcgaagctgggcctcaaagactcgcaagatactgcaagaaggacggaaccagcccccgattcaactccccgcccacgggcctctccaggggcacctgatctgaccagcgcttcaccctttttctctcccgccgggacatttcaggttaagatctggtttcaaaatcgcaggatgaagtggaggaattcaaaggagagggagctattatccagcggtgggtgtagggaacagactcttcctaccaagctaaacccccaccctgacctgagtgatgtgggtcagaagggccccggaaatgaagaagaagaagaaggtccaggctcaccctctcatcggctggcctatcacgccagctcggatccgcagcacctgcgggacccacgtttgcccggcccgctgcccccaagccccgcccatagctcaagtccaggcaagcctagcgacttcagcgatagcgaggaggaggaagaaggggaggaacaggaggagattactgtgagctag

SEQ ID NO: 29256 - DNA, 1149 bp, Artificial Sequence
  derived and/or modified sequence
atgatgtttcctggcctgctggcccctcctgctggctaccccagcctgctgcggcccacccccaccctgaccctgccccagagcctgcagagcgccttcagcggccacagcagcttcctggtggaggacctgatccgcatcagccggcccccagcctacctgcccaggtctgtgcccacagcctccatgagccccccccggcagggcgcccccacagccctgacagacacaggagccagtgacctgggcagccctggccctggcagccggcggggcggcagccccccaacagccttctccccagccagcgagaccaccttcctgaagtttggagtgaatgccatcctgagcagcggccccaggacagagaccagccctgccctgctgcagagcgtgccccccaagacctttgccttcccctactttgagggcagcttccagcccttcatccgcagcagctacttccctgccagcagctctgtggtgcccatccctggcaccttctcctggcccctggccgcccggggcaagccccggcggggcatgctgcggcgggctgtgttcagtgatgtgcagaggaaggccctggagaagatgttccagaagcagaagtacatcagcaagccagacaggaagaagctggccgccaagctgggcctgaaggacagccaggacacagcccggaggacagagcccgccccagacagcaccccccggccccgggccagccctggggccccagacctgaccagcgccagccccttcttcagccctgctggcaccttccaggtgaagatctggttccagaacagaaggatgaagtggaggaacagcaaggagcgggagctgctgagcagcggcggctgccgggagcagaccctgcccaccaagctgaacccccacccagacctgagtgatgtgggccagaagggccctggaaatgaggaggaggaggagggccctggcagccccagccaccggctggcctaccacgccagcagtgacccccagcacctgcgggacccccggctgcccggccccctgccccccagccctgcccacagcagcagccctgggaagcccagcgacttcagtgacagcgaggaggaggaggagggggaggagcaggaggagatcaccgtgtcctag

SEQ ID NO: 29257 - DNA, 1149 bp, Artificial Sequence
  derived and/or modified sequence
atgatgttccccggcctgctggccccccccgccggctaccccagccttctgcgaccgactccaaccctgacattaccccaatcgctccagtctgccttctcgggccacagctcatttttggtggaggacctgatcagaatcagccgaccccccgcttaccttcctaggtcagtcccaacggcaagcatgtcgccccctcgtcaaggcgcgcccacagccttaaccgatacaggtgcttctgacctgggcagccccggacccggctctcgacgaggcggatcccctcctacagccttttctccagcatctgagaccaccttcctgaaattcggggtgaacgccatcctgagcagtggccctaggacagagacgagccctgccctcctacagtccgtgcctccgaaaacgtttgcttttccctactttgaaggttcctttcagccattcatccgcagctcttactttcctgctagttcttccgttgtgccaattcccggcacgttttcttggcccctggccgcccgcgggaagcctcgcaggggtatgctgcgacgggcggtgttttcagacgtgcaacgcaaggcccttgagaagatgttccagaaacaaaaatatatcagcaagccagacaggaagaaattggctgccaagctaggattaaaggactctcaggatactgcaaggaggaccgagcccgcccccgatagtacccctagaccaagggcctctccaggtgcccccgatctgacctctgccagcccctttttttcgcccgcaggaacattccaggtaaagatctggtttcagaataggagaatgaagtggaggaactcaaaggagagggaattgcttagttctggtggatgcagggaacagacgttacccactaagcttaatccacatcctgacctcagtgacgtggggcagaagggcccagggaatgaagaggaggaagagggacctggatctccttcacacagactggcgtatcacgcttcctccgatccacagcacctcagagatccccgtctgccaggtcccctaccaccatcccccgcccacagctcatcgcctggaaagccgtccgatttctcagactctgaggaagaggaggagggggaagagcaggaagagatcaccgtatcttag

SEQ ID NO: 29258 - DNA, 1149 bp, Artificial Sequence
  derived and/or modified sequence
atgatgtttcctggactgctcgcacccccagctgggtacccctctctgctgcgcccaactcccactctaacgctgccccagtcactccagagcgccttctccggtcactccagcttcctggttgaagatctcatccggatctccaggccccctgcttatttgcctcgctcggtgccgactgcctctatgtcaccccctcgtcagggggctccgaccgctctcacggacaccggagcctctgacctcggttctcccggtcccggatccaggaggggtgggagtcccccaacagccttttcgcccgcttccgagactacatttctgaaattcggagttaatgcgatactaagctctgggccacgcacagaaacgtccccggctctgctccagagtgttccacccaaaaccttcgcatttccatatttcgaggggtctttccagccctttattcgctctagttactttcctgcctcatcttctgtcgtgcctatccccggtacgttcagctggccgcttgctgctcgaggaaagcctcggagaggaatgctgagacgagcagtcttctccgacgttcagcgcaaggctctggagaagatgtttcaaaagcaaaagtatatctccaaacccgaccggaagaaactcgctgccaaactgggcctgaaggattcccaggacaccgctaggaggactgaaccagctcccgactctaccccacggccacgggcttcccccggagccccagacctcacctcagcatccccttttttctctcccgctggcactttccaggtgaagatttggttccagaacagacgcatgaaatggaggaactcaaaggaacgtgagctcctgtctagtggaggctgcagggagcagactctcccgaccaaactgaatccccacccagatctgtccgatgtgggacagaagggccctggtaacgaagaagaagaggaaggacctggcagccctagccaccgtctggcctaccacgcctccagcgacccccagcatctgcgggatcccagattgccgggacctcttccaccatcacccgctcatagttccagccctggaaaaccctccgacttttctgacagtgaggaagaagaggaaggcgaggaacaggaggagataaccgtgtcctag

SEQ ID NO: 29259 - DNA, 1149 bp, Artificial Sequence
  derived and/or modified sequence
atgatgttccccggcctgctggccccccccgccggctaccccagcctgctgagacccacccccaccctgaccctgccccagagcctgcagagcgccttcagcggccacagcagcttcctggtggaggacctgatcagaatcagcagaccccccgcctacctgcccagaagcgtgcccaccgccagcatgagcccccccagacagggcgcccccaccgccctgaccgacaccggcgccagcgacctgggcagccccggccccggcagcagaagaggcggcagcccccccaccgccttcagccccgccagcgagaccaccttcctgaagttcggcgtgaacgccatcctgagcagcggccccagaaccgagaccagccccgccctgctgcagagcgtgccccccaagaccttcgccttcccctacttcgagggcagcttccagcccttcatcagaagcagctacttccccgccagcagcagcgtggtgcccatccccggcaccttcagctggcccctggccgccagaggcaagcccagaagaggcatgctgagaagagccgtgttcagcgacgtgcagagaaaggccctggagaagatgttccagaagcagaagtacatcagcaagcccgacagaaagaagctggccgccaagctgggcctgaaggacagccaggacaccgccagaagaaccgagcccgcccccgacagcacccccagacccagagccagccccggcgcccccgacctgaccagcgccagccccttcttcagccccgccggcaccttccaggtgaagatctggttccagaacagaagaatgaagtggagaaacagcaaggagagagagctgctgagcagcggcggctgcagagagcagaccctgcccaccaagctgaacccccaccccgacctgagcgacgtgggccagaagggccccggcaacgaggaggaggaggagggccccggcagccccagccacagactggcctaccacgccagcagcgacccccagcacctgagagaccccagactgcccggccccctgccccccagccccgcccacagcagcagccccggcaagcccagcgacttcagcgacagcgaggaggaggaggagggcgaggagcaggaggagatcaccgtgagctag

SEQ ID NO: 29260 - protein, 234 aa, Artificial Sequence
  derived and/or modified sequence
MRAPLCLLLLVAHAVDMLALNRRKKQVGTGLGGNCTGCIICSEENGCSTCQQRLFLFIRREGIRQYGKCLHDCPPGYFGIRGQEVNRCKKCGATCESCFSQDFCIRCKRQFYLYKGKCLPTCPPGTLAHQNTRECQGECELGPWGGWSPCTHNGKTCGSAWGLESRVREAGRAGHEEAATCQVLSESRKCPIQRPCPGERSPGQKKGRKDRRPRKDRKLDRRLDVRPRQPGLQP

SEQ ID NO: 29261 - DNA, 705 bp, Artificial Sequence
  derived and/or modified sequence
atgcgtgcgcccctttgcctgctgctgcttgtcgctcatgctgtggatatgctcgctttgaaccgaaggaagaaacaggtgggaacaggtctgggtgggaactgcactgggtgcatcatttgttctgaggaaaatggatgtagcacatgtcagcagagactctttctgtttatacggcgcgagggaatcagacaatacggcaagtgcctgcatgactgcccccccgggtacttcgggattcgcggccaggaggtcaaccggtgcaagaagtgtggggccacgtgcgagtcctgcttcagtcaggatttttgcattcggtgcaaaagacagttttacctctataagggcaagtgccttccgacttgtcctccgggtaccctcgcccaccagaacacaagggaatgccagggagagtgcgagctgggaccttggggcggatggtctccgtgtacacataacggtaagacatgtggaagcgcttggggacttgagagccgggttagagaggccgggagggctgggcacgaggaggccgccacatgtcaggtgctgtctgaatcccgaaaatgtccaatccaacggccctgtccgggggaacgaagccctggccaaaagaagggcagaaaggaccgtaggccgagaaaggatcgtaagctcgatcggagactggacgtcagacctagacagccagggctgcaaccatag

SEQ ID NO: 29262 - DNA, 705 bp, Artificial Sequence
  derived and/or modified sequence
atgagggcccccctgtgcctgctgctgctggtggcccatgctgtggacatgctggccctgaacagaaggaagaagcaggtgggcaccggcctgggcggcaactgcaccggctgcatcatctgcagcgaggagaatggctgcagcacctgccagcagaggctcttcctgttcatcagaagagagggcatccggcagtatggcaagtgcctgcatgactgccccccaggctacttcggcatccggggccaggaggtgaaccgctgcaagaagtgtggggccacctgtgagagctgcttcagccaggacttctgcatccgctgcaagaggcagttctacctgtacaagggcaagtgcctgcccacctgccccccaggcaccctggcccaccagaacacccgggagtgccagggagaatgtgagctgggcccctggggcggctggagcccctgcacccacaacgggaagacctgtggcagcgcctggggcctggagagccgggtgcgggaggccggccgggccggccacgaggaggccgccacctgccaggtgctgtctgagagcaggaaatgtcccatccagaggccctgccctggagagaggagccctggccagaagaagggcaggaaggacagaagacccaggaaggacaggaagctggaccggcggctggatgtgcggccccggcagcccggcctgcagccctag

SEQ ID NO: 29263 - DNA, 705 bp, Artificial Sequence
  derived and/or modified sequence
atgcgggcccccctgtgcctgctgctgctggtggcccacgccgtggatatgcttgcactgaataggcgaaagaaacaggtgggcaccggcctggggggaaactgcaccggatgcatcatttgttcagaggagaatggctgctctacctgccagcaaaggcttttcctctttattcgccgggaaggaatccgccagtacggcaaatgcctgcacgactgcccaccagggtattttgggattcggggccaggaggtgaacagatgcaagaaatgtggtgcgacatgtgagtcctgcttctcgcaggacttctgtatccgttgcaaacggcaattttatctctacaaaggaaaatgcctacccacgtgcccccctggaaccctggcacatcagaatactcgggagtgtcagggcgagtgcgagcttggcccgtggggggggtggtcgccgtgcactcataacggcaaaacctgcggcagcgcctggggcttagagagcagagttagagaagccggcagagcagggcacgaggaggccgctacctgccaggtgctaagtgagtcaaggaaatgcccaattcagagaccatgtcctggggagcgatcccccggtcaaaagaagggccggaaggacaggcgccctcgaaaagaccgtaagctggaccgcaggctggatgtgcggccaaggcaaccaggcctgcagccatag

SEQ ID NO: 29264 - DNA, 705 bp, Artificial Sequence
  derived and/or modified sequence
atgcgcgctccactttgcctgctgctgctggtggcacatgccgtggacatgctggcactgaatagacggaaaaagcaagttgggactgggcttggcggaaactgcaccggttgtattatctgctccgaggaaaacggttgctcaacatgtcagcagagactgtttctctttattcggcgtgagggcattagacaatatgggaagtgcctccatgactgccctccagggtacttcggcatccgagggcaggaagtcaatagatgcaaaaagtgcggggctacatgcgaatcttgttttagtcaggacttttgtattaggtgtaagcgtcagttttacttgtacaagggtaaatgcctccctacatgccccccagggaccctggctcaccagaatactagggaatgccaaggcgaatgtgagctgggaccctggggtggttggagcccgtgtactcacaacggcaagacatgcgggtctgcctggggcttggagagcagggttcgggaagccggaagggctggacacgaggaagccgctacctgtcaggtgctgagtgaaagcagaaagtgtccaatccagcggccttgtccaggcgagagatctcccggtcaaaaaaagggccgtaaggacagacgcccaagaaaggaccgcaagcttgacaggcgacttgatgtgcggccacggcagcccggactgcagccgtag

SEQ ID NO: 29265 - DNA, 2707 bp, Artificial Sequence
  derived and/or modified sequence
cacagcagcccccgcgcccgccgtgccgccgccgggacgtggggcccttgggccgtcgggccgcctggggagcgccagcccggatccggctgcccagatgcgggcgccactctgcctgctcctgctcgtcgcccacgccgtggacatgctcgccctgaaccgaaggaagaagcaagtgggcactggcctggggggcaactgcacaggctgtatcatctgctcagaggagaacggctgttccacctgccagcagaggctcttcctgttcatccgccgggaaggcatccgccagtacggcaagtgcctgcacgactgtccccctgggtacttcggcatccgcggccaggaggtcaacaggtgcaaaaaatgtggggccacttgtgagagctgcttcagccaggacttctgcatccggtgcaagaggcagttttacttgtacaaggggaagtgtctgcccacctgcccgccgggcactttggcccaccagaacacacgggagtgccagggggagtgtgaactgggtccctggggcggctggagcccctgcacacacaatggaaagacctgcggctcggcttggggcctggagagccgggtacgagaggctggccgggctgggcatgaggaggcagccacctgccaggtgctttctgagtcaaggaaatgtcccatccagaggccctgcccaggagagaggagccccggccagaagaagggcaggaaggaccggcgcccacgcaaggacaggaagctggaccgcaggctggacgtgaggccgcgccagcccggcctgcagccctgaccgccggctctcccgactctctggtcctagtcctcggcccctgcacacctcctcctgctccttctcctcctctcctcttactctttctcctctgtcttctccatttgtcctctctttctttccacccttctatcatttttctgtcagtctaccttccctttctttttcttttttatttcctttatttcttccacctccattctcctctcctttctccctccctccttcccttccttcctcttctttctcacttatcttttatctttccttttctttcttcctgtgtttcttcctgtccttcaccgcatccttctctctctccctcctcttgtctccctctcacacacactttaagagggaccatgagcctgtgccctcccctgcagctttctctatctacaacttaaagaaagcaaacatcttttcccaggcctttccctgaccccatctttgcagagaaagggtttccagagggcaaagctgggacacagcacaggtgaatcctgaaggccctgcttctgctctgggggaggctccaggaccctgagctgtgagcacctggttctctggacagtccccagaggccatttccacagccttcagccaccagccaccccgaggagctggctggacaaggctccagggcttccagaggcctggcttggacacctcccccagctggccgtggagggtcacaacctggcctctgggtgggcagccagccctggagggcatcctctgcaagctgcctgccaccctcatcggcactcccccacaggcctccctctcatgggttccatgcccctttttcccaagccggatcaggtgagctgtcactgctgggggatccacctgcccagcccagaagaggccactgaaacggaaaggaaagctgagattatccagcagctctgttccccacctcagcgcttcctgcccatgtggggaaacaggtctgagaaggaaggggcttgcccagggtcacacaggaagccttcaggctctgcttctgcctgatggctctgctcagcacattcacggtggagaggagaatttgggggtcacttgaggggggaaatgtagggaattgtgggtggggagcaagggaagatccgtgcactcgtccacacccaccaccacactcgctgacacccacccccacacgctgacacccacccccacacttgcccacacccatcaccgcactcgcccacacccaccaccacactgccccacacccaccaccacactcccccacacccaccaccacactcgcccacacccaccaccagtgacttgagcatctgtgcttcgctgtgacgcccctcgccctaggcaggaacgacgctgggaggagtctccaggtcagacccagcttggaagcaagtctgtcctcactgcctatccttctgccatcataacacccccttcctgctctgctccccggaatcctcagaaacgggatttgtatttgccgtgactggttggcctgaacacgtagggctccgtgactgggacaggaatgggcaggagaagcaagagtcggagctccaaggggcccaggggtggcctggggaaggaagatggtcagcaggctgggggagaggctctaggtgatgaaatattacattcccgaccccaagagagcacccaccctcagacctgccctccacctggcagctggggagccctggcctgaacccccccctcccagcaggcccaccctctctctgacttccctgctctcacctccccgagaacagctagagccccctcctccgcctggccaggccaccagcttctcttctgcaaacgtttgtgcctctgaaatgctccgttgttattgtttcaagaccctaacttttttttaaaactttcttaataaagggaaaagaaacttgtaaa

SEQ ID NO: 29266 - DNA, 705 bp, Artificial Sequence
  derived and/or modified sequence
atgagagcccccctgtgcctgctgctgctggtggcccacgccgtggacatgctggccctgaacagaagaaagaagcaggtgggcaccggcctgggcggcaactgcaccggctgcatcatctgcagcgaggagaacggctgcagcacctgccagcagagactgttcctgttcatcagaagagagggcatcagacagtacggcaagtgcctgcacgactgcccccccggctacttcggcatcagaggccaggaggtgaacagatgcaagaagtgcggcgccacctgcgagagctgcttcagccaggacttctgcatcagatgcaagagacagttctacctgtacaagggcaagtgcctgcccacctgcccccccggcaccctggcccaccagaacaccagagagtgccagggcgagtgcgagctgggcccctggggcggctggagcccctgcacccacaacggcaagacctgcggcagcgcctggggcctggagagcagagtgagagaggccggcagagccggccacgaggaggccgccacctgccaggtgctgagcgagagcagaaagtgccccatccagagaccctgccccggcgagagaagccccggccagaagaagggcagaaaggacagaagacccagaaaggacagaaagctggacagaagactggacgtgagacccagacagcccggcctgcagccctag

SEQ ID NO: 29267 - protein, 257 aa, Artificial Sequence
  derived and/or modified sequence
MSSAPNGRKKRPSRSTRSSIFQISKPPLQSGDWERRGSGSESAHKTQRALDDCKMLVQEFNTQVALYRELVISIGDVSVSCPSLRAEMHKTRTKGCEMARQAHQKLAAISGPEDGEIHPEICRLYIQLQCCLEMYTTEMLKSICLLGSLQFHRKGKEPGGGTKSLDCKIEESAETPALEDSSSSPVDSQQHSWQVSTDIENTERDMREMKNLLSKLRETMPLPLKNQDDSSLLNLTPYPLVRRRKRRFFGLCCLISS

SEQ ID NO: 29268 - DNA, 774 bp, Artificial Sequence
  derived and/or modified sequence
atgagcagcgcccccaatggtcggaaaaaacgccccagccgcagcacaagaagtagcatttttcagatctcaaagccgccactccagtcaggggattgggaacggcgagggagcgggagtgagtcggcacataagactcagagagctctggacgactgtaaaatgctcgtgcaggaatttaacacacaggttgcactctatcgcgagttggtgatcagcatcggcgacgtgtctgtaagctgtccttccctgcgggcggaaatgcacaaaacaagaacaaagggttgtgagatggcgagacaggctcaccagaagctagctgcgatctccggacctgaagacggcgagatccatcctgagatttgtcggctctatattcagctccaatgttgtttggaaatgtataccaccgagatgctaaaatcaatctgtctattgggatcgctccaattccacaggaaaggtaaggaaccagggggcggcacgaaatcactggattgtaaaatcgaggaatcagcagagacaccagcactggaggatagttctagcagtcccgtggattcccagcaacacagttggcaagtgagcacagacatcgagaacactgagagagacatgcgggagatgaaaaacctcctatctaaacttagagagacaatgcctctgccgctcaaaaatcaagacgatagttcactgcttaacctgacaccatatccacttgttaggagacgcaagagaagattcttcggactttgttgtttgatttcttcatag

SEQ ID NO: 29269 - DNA, 774 bp, Artificial Sequence
  derived and/or modified sequence
atgagcagcgcccccaacggcaggaagaagaggcccagccgcagcaccaggagcagcatcttccagatcagcaagccacccctgcagagcggggactgggagcggcggggcagcggcagcgagagcgcccacaagacccagagggccctggatgactgcaagatgctggtgcaggagttcaacacccaggtggccctgtaccgggagctggtgatcagcattggagatgtgtctgtgtcctgccccagcctgcgggcagagatgcacaagaccaggaccaagggctgtgagatggcccggcaggcccaccagaagctggccgccatcagcggcccagaagatggagagatccaccctgagatctgccgcctgtacatccagctgcagtgctgcctggagatgtacaccacagagatgctgaagagcatctgcctgctgggcagcctgcagttccacaggaagggcaaggagcccggcggcggcaccaagagcctggactgcaagattgaggagagcgctgagaccccagccctggaggacagcagcagcagccctgtggacagccagcagcacagctggcaggtgtccacagacatcgagaacacagagcgggacatgagggagatgaagaacctgctgagcaagctgcgggagaccatgcccctgcccctgaagaaccaggatgacagcagcctgctgaacctgaccccctaccccctggtgagaagaaggaagaggcgcttcttcggcctgtgctgcctgatcagcagctag

SEQ ID NO: 29270 - DNA, 774 bp, Artificial Sequence
  derived and/or modified sequence
atgagcagcgcccccaacggccggaagaagcggcccagccggagcacaaggagctccatatttcagatctcaaaaccaccgctgcagagcggggactgggaacggagaggctccggctccgagagcgcgcacaagacccagcgcgcactggacgattgcaagatgctggtgcaggagttcaatacccaggttgctctgtatcgggaactggtcatctccataggtgatgtctccgtatcctgtcctagcttgagggccgagatgcacaagactagaactaagggctgtgagatggccaggcaggcccaccagaaactggcggctatctcaggacccgaggacggcgagatccatcccgagatctgccgtctgtatatccagttacagtgctgtttggagatgtacaccaccgaaatgctgaagagcatctgtttactgggaagcctgcagtttcatcggaaaggcaaggaacctggcgggggcactaagagcctggattgcaaaatagaggaatctgcggagacgcctgccttggaagactcctcttcatcacccgtggactcccagcagcatagttggcaggtgagtactgacatagaaaacaccgaaagagacatgagggagatgaagaatcttctcagtaaacttcgcgaaactatgcccctcccgcttaagaaccaagatgattcatcactgctgaacttaaccccttatcccctagtacggcgccgcaagcgtcgcttttttgggctgtgctgtctcatttcttcctag

SEQ ID NO: 29271 - DNA, 774 bp, Artificial Sequence
  derived and/or modified sequence
atgtcctccgcaccgaacggcagaaagaagcgccctagtaggagcacaagaagttctattttccagatctccaagccacctcttcagtccggcgattgggaacgcagaggctccgggtctgagagcgcccataaaactcagagagccctcgatgattgtaagatgctggtgcaggagttcaatactcaggttgccctgtacagagagctggtgatctccattggggacgtcagcgtgtcttgcccctcactgagagccgaaatgcacaagacccgtaccaaagggtgcgagatggcgaggcaggctcatcagaaactggcagcgatctctggacctgaagacggtgagatccacccagaaatctgtagactgtacatccagctgcagtgttgtcttgaaatgtacacgactgaaatgttaaagagcatctgtctcctcgggtcgctgcaatttcacaggaagggcaaagagcccggtggaggtacaaagagcctggactgcaagattgaggagtccgccgaaacccccgctttggaggattcatcctctagccccgtggacagccagcaacattcttggcaagtttccacggatatcgagaatacggagcgcgatatgagggaaatgaagaaccttttaagtaaactgcgagagacaatgccactgcccctgaaaaatcaggacgattcttccctattaaatttgactccctaccccctggtccgaagacggaagaggcgattctttggcctctgctgtcttatctcctcttag

SEQ ID NO: 29272 - DNA, 4160 bp, Artificial Sequence
  derived and/or modified sequence
agccttgcaatccatgccgagaggaaggcagtgcgagcccgcgccagcgcccagctcccgggacagggtcggcaatgctgctgagcagaacttgatcgcgctccttcctcgctgctagtggaagcgatgctgcacggcacagctagcgcttccccggctctccttcaagctgaaggttaccgacccgcgcagccagccccagcactgtgagctgcgcgcctcaggtccgggctccggctgcttggcggcggcgcccagggcaacaaccgggccgcccgcgccggggcgcactgcaccagcggcttcggcttggtggatgtgtatgcatgagttctgcaccgaatgggcgcaaaaagcgccccagccggtccacccgctcctcgatcttccagatcagcaagcccccgctgcagagcggagattgggagcgcaggggcagcggctccgagagcgcccacaaaacccaacgagccctggacgactgcaagatgcttgtccaagagttcaacacacaagtggccctgtaccgagagctggtcatttctattggggatgtctcggtcagctgcccctcactccgggcggaaatgcacaagacaagaaccaaaggctgtgaaatggcccgtcaggcacaccaaaaattggctgccatctcaggcccggaagatggtgagatccatccagaaatctgtcggctttacatccagctgcagtgctgcttagaaatgtataccacagagatgctaaaatccatatgtctgctggggtctcttcagtttcatcgaaaaggaaaggaacctggcgggggaaccaagagtttggattgcaaaattgaggagagtgctgaaacacctgccctagaagactcctcatcatcccccgtagatagtcagcaacattcctggcaggtttccacagacattgagaacactgaaagagacatgagagaaatgaaaaaccttttaagcaaactcagggaaactatgcctttaccattgaaaaatcaagatgacagcagccttctgaatctaactccctaccccctggtgagaagacggaagagaaggttctttgggctgtgttgtctcatctcaagctaggtggctcctcctggaaacccactgagaacatctgaaaaaaaatcacaaaacccgaggacctccagacagctgaaccacacagttattggtttttgactatgttttctatgcttccttattacttttatctgcctccccctgcccttttaaatgattttacacttgaaagcagctgccgtcaagaaaaaaaagaacagattcaaaaaccaggctgtttttaaaagggaattttaaagctgacattgtgcatgtctgctccaaaccacgccatgacagatgcaagaattatgatttttaaattatttaaaggttttttaaatgtattatacagaggaaaaatatttcacatataatagtatatctatagctcttgctgatctcatgttaaaatttatcgtatatgaaagaagtctttaaacatagaaatctatttaaaactgaaaaactgtgttcaaaaatccaatctatcaatatcattagaaataatattataagcaaacatataccacctcacctattgctttctctgcactcatttacatttagtcttccattctgtcagaatctaagagcttcaacataaaagtatcttaatttataaagcaacaaaaaccacatatgaaaagtactaaaattttgtaaatacacaataatcctaataccttcgtacaaatgcatatgggcaactaatttctttttgatccaatgatgtctttttcagcttcttggagaatgaagtaatccagttaggaaatggtgtagtaacatatacaattgccctcaaatgtaaaatcaaatattattacattttgttctaattgaaatctgaagcatggtgtctgcacatcagcatagtgttaaatcttatagggcatgctggaattagctcagattataaaaatatttaacattttacattgttaataaagttttttagttaagctaagcttgtctcattttagatgactatgcagataagatttttccaacgtgtacttggtgtcttgtcttatgcttagactcttgaaagcaggacacattaagcaatactatattttagaaaggaggaagccacatgctttgtttttctgctcacagctttgttgtgatcttccttcactaaacttgtaacatggtacaaattttgttataccgtctcctgttcttcctttggcccatttcccagacagaatttcccatgggttgagagatcaagtctttgcactttttttcttgttttccatagtctgaaaaaccttcaagtcagacaggaggcaccagtgtccagtacaatagaaggatgagctagatgccgataagtggtttatccaagacacatctttagtcccaaccctgttctttaccaatacttatgtgcacaggcatttatatgtataccaatatttttacctaaaaactaaatatattaaggccttttgctttagtgaagatgaactactgtaataattattgtattaggttgaattatatgaaatttcctatatgtgactgttttgacctacaaaatggcaatttcttatagttcaccctaatatccaatgtggaaattatacttggaattgtcttctagctcttttgattgaaagtgaaagaattaaagggttggaagagaacgttatacaggtctctatttagatcataccagctggtttttggccttattctttgaatctagagttgtgttccaaggaaccagtaattaatgcatggttataggtatacctggcttcaaaaaaaagaagtagccgtggaaagctatatgagaaaatcacaattttctgaatcaaatatttgtaaaacaatttggctatttaaagactcttagggtaaatactccctggaaaagcaagcaatccagacttatctggtctgcaaaccttgatttcagcttaatatcctttcctgaatctaattcattttcacccactaaggtcatttcatttaagatccattgtttttgaaattttgaagtagcccagtttggcagctctcagcacctgcctctgccctctcctatacttcaactatattgaactctagcttcaatctagttcctactaatccatgcaaaagttattaactgataagcccaatcttgttcagcacgttcttctaaatgcctgacctaaataacttctgcttggttaacttgtgttcattctcaccttagcctcagtgtgaaagtaacacttaccttctgtgcaattgtcctttgtacaactgaagactgttaataaattcaggtctcacctccatgtctgaaaaggctatagtagctattcatggagatgggaatttgtctaattacctagccagagtttgcatatttaaggtaatatattcagctaccgtatcttttattcatagtgcctgttttccagcctttgatcagttttgtagttcccgtggataaactccaagatctaaagatcctctttcagtagcatatactaaaattaagtttagtgctcaaaaccctggtaacctacactggcccaaggttacagtaggtaattcaccgtctcacattagacaggccaatgcatcccttaggagctgccccactctcctctcacctaccaaaggattttctcaggtgtggttccaagcgataaagttctactgtctcggcttcctgctggtaattcgctttcagattagcaataacactgagctgatctctagggttaagaagagaacattgaactcattttgtcgcatgtacccacaggcttgaaacagaaaatgatgtaaacttttgtggcatacattcacccattttcccaccatatctttactatcctgtgttgatttttttttcaaattacaaagacaatacatgttctttgtgggaaatctgaaaaatactaccaaatagaaaataaaaatcacctgaattccaccacgaccacattgtttaaaaccacatttctgggttttaaatcagtcagtggctgggcccaaaggcacttttgggtaagataagtgaagaaatgcccacaaggccaaggtgtcacttaaaaaaacaaacaaaaaaaa

SEQ ID NO: 29273 - DNA, 774 bp, Artificial Sequence
  derived and/or modified sequence
atgagcagcgcccccaacggcagaaagaagagacccagcagaagcaccagaagcagcatcttccagatcagcaagccccccctgcagagcggcgactgggagagaagaggcagcggcagcgagagcgcccacaagacccagagagccctggacgactgcaagatgctggtgcaggagttcaacacccaggtggccctgtacagagagctggtgatcagcatcggcgacgtgagcgtgagctgccccagcctgagagccgagatgcacaagaccagaaccaagggctgcgagatggccagacaggcccaccagaagctggccgccatcagcggccccgaggacggcgagatccaccccgagatctgcagactgtacatccagctgcagtgctgcctggagatgtacaccaccgagatgctgaagagcatctgcctgctgggcagcctgcagttccacagaaagggcaaggagcccggcggcggcaccaagagcctggactgcaagatcgaggagagcgccgagacccccgccctggaggacagcagcagcagccccgtggacagccagcagcacagctggcaggtgagcaccgacatcgagaacaccgagagagacatgagagagatgaagaacctgctgagcaagctgagagagaccatgcccctgcccctgaagaaccaggacgacagcagcctgctgaacctgaccccctaccccctggtgagaagaagaaagagaagattcttcggcctgtgctgcctgatcagcagctag

SEQ ID NO: 29274 - DNA, 4158 bp, Artificial Sequence
  derived and/or modified sequence
atggagctgagcgacagcgacagacccgtgagcttcggcagcaccagcagcagcgccagcagcagagacagccacggcagcttcggcagcagaatgaccctggtgagcaacagccacatgggcctgttcaaccaggacaaggaggtgggcgccatcaagctggagctgatccccgccagacccttcagcagcagcgagctgcagagagacaaccccgccaccggccagcagaacgccgacgagggcagcgagagaccccccagagcccagtggagagtggacagcaacggcgcccccaagaccatcgccgacagcgccaccagccccaagctgctgtacgtggacagagtggtgcaggagatcctggagaccgagagaacctacgtgcaggacctgaagagcatcgtggaggactacctggactgcatcagagaccagaccaagctgcccctgggcaccgaggagagaagcgccctgttcggcaacatccaggacatctaccacttcaacagcgagctgctgcaggacctggagaactgcgagaacgaccccgtggccatcgccgagtgcttcgtgagcaagagcgaggagttccacatctacacccagtactgcaccaactaccccagaagcgtggccgtgctgaccgagtgcatgagaaacaagatcctggccaagttcttcagagagagacaggagaccctgaagcacagcctgcccctgggcagctacctgctgaagcccgtgcagagaatcctgaagtaccacctgctgctgcacgagatcgagaaccacctggacaaggacaccgagggctacgacgtggtgctggacgccatcgacaccatgcagagagtggcctggcacatcaacgacatgaagagaaagcacgagcacgccgtgagactgcaggagatccagagcctgctgaccaactggaagggccccgacctgaccagctacggcgagctggtgctggagggcaccttcagaatccagagagccaagaacgagagaaccctgttcctgttcgacaagctgctgctgatcaccaagaagagagacgacaccttcacctacaaggcccacatcctgtgcggcaacctgatgctggtggaggtgatccccaaggagcccctgagcttcagcgtgttccactacaagaaccccaagctgcagcacaccgtgcaggccaagagccagcaggacaagagactgtgggtgctgcacctgaagagactgatcctggagaaccacgccgccaagatccccgccaaggccaagcaggccatcctggagatggacgccatccaccaccccggcttctgctacagccccgagggcggcaccaaggccctgttcggcagcaaggagggcagcgccccctacagactgagaagaaagagcgagcccagcagcagaagccacaaggtgctgaagaccagcgagaccgcccaggacatccagaaggtgagcagagaggagggcagcccccagctgagcagcgccagacccagccccgcccagagaaacagccagcccagcagcagcaccatgatcagcgtgctgagagccggcggcgccctgagaaacatctggaccgaccaccagatcagacaggccctgttccccagcagaagaagcccccaggagaacgaggacgacgaggacgactaccagatgttcgtgcccagcttcagcagcagcgacctgaacagcaccagactgtgcgaggacagcaccagcagcagaccctgcagctggcacatgggccagatggagagcaccgagaccagcagcagcggccacagaatcgtgagaagagccagcagcgccggcgagagcaacacctgcccccccgagatcggcaccagcgacagaaccagagagctgcagaacagccccaagaccgagggccaggaggagatgacccccttcggcagcagcatcgagctgaccatcgacgacatcgaccacgtgtacgacaacatcagctacgaggacctgaagctgatggtggccaagagagaggaggccgagagcacccccagcaagagcgccagagacagcgtgagacccaagagcacccccgagctggccttcaccaagagacaggccggccacagcaagggcagcctgtacgcccagaccgacggcaccctgagcggcggcgaggccagcagccagagcacccacgagctgcaggccgtggaggagaacatctacgacaccatcggcctgcccgacccccccagcctgggcttcaagtgcagcagcctgaagagagccaagagaagcaccttcctgggcctggaggccgacttcgtgtgctgcgacagcctgagacccttcgtgagccaggacagcctgcagctgagcgaggacgaggccccctaccaccaggccacccccgaccacggctacctgagcctgctgtacgacagccccagcggcaacctgagcatgccccacaagcccgtgagcgacaagctgagcgaggaggtggacgagatctggaacgacctggagaactacatcaagaagaacgaggacaaggccagagacagactgctggccgccttccccgtgagcaaggacgacgtgcccgacagactgcacgccgagagcacccccgagctgagcagagacgtgggcagaagcgtgagcaccctgagcctgcccgagagccaggccctgctgacccccgtgaagagcagagccggcagagccagcagagccaactgccccttcgaggaggacctgatcagcaaggagggcagcttcatgagcctgaacagactgagcctggccagcgagatgcccctgatggacaacccctacgacctggccaacagcggcctgagccagaccgaccccgagaaccccgacctgggcatggaggccaccgacaagaccaagagcagagtgttcatgatggccagacagtacagccagaagatcaagaaggccaaccagctgctgaaggtgaagagcctggagctggagcagccccccgccagccagcaccagaagagcatgcacaaggacctggccgccatcctggaggagaagaagcagggcggccccgccatcggcgccagaatcgccgagtacagccagctgtacgaccagatcgtgttcagagagagccccctgaagatccagaaggacggctgggccagcccccaggagagcagcctgctgagaagcgtgagccccagccaggtgcaccacggcagcggcgactggctgctgcacagcacctacagcaacggcgagctggccgacttctgcctgccccccgagcaggacctgagaagcagataccccaccttcgagatcaacaccaagagcacccccagacagctgagcgccgcctgcagcgtgcccagcctgcagaccagcgaccccctgcccggcagcgtgcagagatgcagcgtggtggtgagccagcccaacaaggagaactggtgccaggaccacctgtacaacagcctgggcagaaagggcatcagcgccaagagccagccctaccacagaagccagagcagcagcagcgtgctgatcaacaagagcatggacagcatcaactaccccagcgacgtgggcaagcagcagctgctgagcctgcacagaagcagcagatgcgagagccaccaggacctgctgcccgacatcgccgacagccaccagcagggcaccgagaagctgagcgacctgaccctgcaggacagccagaaggtggtggtggtgaacagaaacctgcccctgaacgcccagatcgccacccagaactacttcagcaacttcaaggagaccgacggcgacgaggacgactacgtggagatcaagagcgaggaggacgagagcgagctggagctgagccacaacagaagaagaaagagcgacagcaagttcgtggacgccgacttcagcgacaacgtgtgcagcggcaacaccctgcacagcctgaacagccccagaacccccaagaagcccgtgaacagcaagctgggcctgagcccctacctgaccccctacaacgacagcgacaagctgaacgactacctgtggagaggccccagccccaaccagcagaacatcgtgcagagcctgagagagaagttccagtgcctgagcagcagcagcttcgcctag

SEQ ID NO: 29275 - DNA, 141 bp, Artificial Sequence
  derived and/or modified sequence
atggagctgagcgacagcgacagacccgtgagcttcggcagcaccagcagcagcgccagcagcagagacagccacggcagcttcggcagcagaatgaccctggtgagcaacagccacatgggcctgttcaaccaggactag

SEQ ID NO: 29276 - DNA, 2859 bp, Artificial Sequence
  derived and/or modified sequence
atggagctgagcgacagcgacagacccgtgagcttcggcagcaccagcagcagcgccagcagcagagacagccacggcagcttcggcagcagaatgaccctggtgagcaacagccacatgggcctgttcaaccaggacaaggaggtgggcgccatcaagctggagctgatccccgccagacccttcagcagcagcgagctgcagagagacaaccccgccaccggccagcagaacgccgacgagggcagcgagagaccccccagagcccagtggagagtggacagcaacggcgcccccaagaccatcgccgacagcgccaccagccccaagctgctgtacgtggacagagtggtgcaggagatcctggagaccgagagaacctacgtgcaggacctgaagagcatcgtggaggactacctggactgcatcagagaccagaccaagctgcccctgggcaccgaggagagaagcgccctgttcggcaacatccaggacatctaccacttcaacagcgagctgctgcaggacctggagaactgcgagaacgaccccgtggccatcgccgagtgcttcgtgagcaagagcgaggagttccacatctacacccagtactgcaccaactaccccagaagcgtggccgtgctgaccgagtgcatgagaaacaagatcctggccaagttcttcagagagagacaggagaccctgaagcacagcctgcccctgggcagctacctgctgaagcccgtgcagagaatcctgaagtaccacctgctgctgcacgagatcgagaaccacctggacaaggacaccgagggctacgacgtggtgctggacgccatcgacaccatgcagagagtggcctggcacatcaacgacatgaagagaaagcacgagcacgccgtgagactgcaggagatccagagcctgctgaccaactggaagggccccgacctgaccagctacggcgagctggtgctggagggcaccttcagaatccagagagccaagaacgagagaaccctgttcctgttcgacaagctgctgctgatcaccaagaagagagacgacaccttcacctacaaggcccacatcctgtgcggcaacctgatgctggtggaggtgatccccaaggagcccctgagcttcagcgtgttccactacaagaaccccaagctgcagcacaccgtgcaggccaagagccagcaggacaagagactgtgggtgctgcacctgaagagactgatcctggagaaccacgccgccaagatccccgccaaggccaagcaggccatcctggagatggacgccatccaccaccccggcttctgctacagccccgagggcggcaccaaggccctgttcggcagcaaggagggcagcgccccctacagactgagaagaaagagcgagcccagcagcagaagccacaaggtgctgaagaccagcgagaccgcccaggacatccagaaggtgagcagagaggagggcagcccccagctgagcagcgccagacccagccccgcccagagaaacagccagcccagcagcagcaccatgatcagcgtgctgagagccggcggcgccctgagaaacatctggaccgaccaccagatcagacaggccctgttccccagcagaagaagcccccaggagaacgaggacgacgaggacgactaccagatgttcgtgcccagcttcagcagcagcgacctgaacagcaccagactgtgcgaggacagcaccagcagcagaccctgcagctggcacatgggccagatggagagcaccgagaccagcagcagcggccacagaatcgtgagaagagccagcagcgccggcgagagcaacacctgcccccccgagatcggcaccagcgacagaaccagagagctgcagaacagccccaagaccgagggccaggaggagatgacccccttcggcagcagcatcgagctgaccatcgacgacatcgaccacgtgtacgacaacatcagctacgaggacctgaagctgatggtggccaagagagaggaggccgagagcacccccagcaagagcgccagagacagcgtgagacccaagagcacccccgagctggccttcaccaagagacaggccggccacagcaagggcagcctgtacgcccagaccgacggcaccctgagcggcggcgaggccagcagccagagcacccacgagctgcaggccgtggaggagaacatctacgacaccatcggcctgcccgacccccccagcctgggcttcaagtgcagcagcctgaagagagccaagagaagcaccttcctgggcctggaggccgacttcgtgtgctgcgacagcctgagacccttcgtgagccaggacagcctgcagctgagcgaggacgaggccccctaccaccaggccacccccgaccacggctacctgagcctgctgtacgacagccccagcggcaacctgagcatgccccacaagcccgtgagcgacaagctgagcgaggaggtggacgagatctggaacgacctggagaactacatcaagaagaacgaggacaaggccagagacagactgctggccgccttccccgtgagcaaggacgacgtgcccgacagactgcacgccgagagcacccccgagctgagcagagacgtgggcagaagcgtgagcaccctgagcctgcccgagagccaggccctgctgacccccgtgaagagcagagccggcagagccagcagagccaactgccccttcgaggaggacctgatcagcaaggagggcagcttcatgagcctgaacagactgagcctggccagcgagatgaccctgtgccaggccctgtgcagagacgccgcctggtag

SEQ ID NO: 29277 - DNA, 4158 bp, Artificial Sequence
  derived and/or modified sequence
atggagctctccgattccgatagacctgtgtcctttggaagcaccagtagctctgcaagttcacgggactcacacggctcattcggaagccggatgactctggtcagcaattcccacatgggcctctttaatcaggacaaggaggtgggagccatcaagctggaactgattcccgctagaccattcagcagctctgagctccagcgcgacaacccagccacaggacagcaaaacgcagatgaaggctctgagcgcccccctagggcacagtggcgggtcgattctaacggtgcccctaagaccattgccgacagtgctacctctcctaaattgctgtatgtcgatcgggtcgtccaggagattttggaaacagaacgcacttacgtgcaagacctgaaatccatcgtggaagattacctggattgtatccgtgatcagaccaagttgcccttggggaccgaggaacggtcagccctgtttgggaatattcaggatatttaccactttaactctgaactccttcaggatctcgagaactgcgagaatgatcctgttgctatcgccgagtgttttgtatctaaaagcgaggagtttcatatctacacccagtactgcacaaactaccccaggtccgtggctgtcttaacagagtgcatgcggaataaaattctagcgaaattttttagggaacggcaagagacactgaagcacagcttgccactgggaagttacctgctaaagcctgtgcagagaatattaaagtatcatttgctgcttcacgagatagagaaccacctggataaggacacagaggggtatgacgtggtgctcgatgccatcgacactatgcaacgggtggcctggcacattaacgacatgaaaaggaagcacgaacatgctgttagactccaagagattcagtctctgctgaccaactggaagggtcctgacttgacttcctatggcgagttggtactagaagggacgttcaggatacaaagagcgaaaaacgagagaacgctgttcctgtttgacaagcttttgcttataacgaaaaaacgcgatgacacatttacctataaggcacatattctgtgcgggaatctgatgctcgtggaggtgatccctaaggaaccactgtcctttagcgtctttcattacaagaatccgaagctccagcacaccgtgcaggctaagtctcaacaagacaagcggctctgggtgctccacttaaagcgcctgattctggaaaatcacgcagcaaagatccccgcaaaagccaaacaggcgatacttgagatggacgcaatccatcacccggggttttgttactcaccggaaggaggcacgaaggcattatttgggtcgaaagagggaagcgctccctacaggctgagacgcaagtctgaaccctcttctcgctcccacaaagtactcaaaactagcgaaaccgcccaggatattcagaaggtctcccgggaagagggtagcccacagctcagtagcgcccggccatccccagctcagcgtaattcacagccctccagctcgacaatgatatctgttctgagggccggaggggcactgaggaatatttggaccgaccaccaaatcagacaggcacttttcccctcaaggcggtcacctcaggagaacgaggacgacgaagacgattaccagatgttcgttcctagttttagtagtagcgatcttaattctactcgactctgtgaggacagcacatcttctcggccatgctcttggcacatggggcagatggagtctacagaaactagtagtagcggtcacaggatagttcgccgcgccagcagtgccggagagagtaatacctgcccacctgagatcggtacctccgataggacgagggaactgcagaacagcccaaaaacagaaggtcaggaagagatgaccccattcggtagcagtatcgagttgaccatcgatgatattgatcatgtttacgataacattagctatgaggacctcaagctgatggttgccaaacgggaggaggctgaaagcacccccagtaaaagtgcgcgggactctgtgcgacctaaaagtactcccgaattggcctttaccaagcggcaggccggccacagtaaggggagcctgtacgcccagacagacggaacgctatcaggaggtgaggcttcatcccagtccactcacgaactgcaggctgtggaggagaatatctacgacaccattgggctgcccgacccaccatccctcggatttaaatgttcaagtctcaagcgggctaagagatccaccttcctgggccttgaggcagactttgtttgttgcgactcactccgcccatttgtctcccaggattcattgcagctgagtgaagatgaggctccctatcatcaggccacaccagatcatggctacctctccctgctttacgatagtccttccgggaatctttctatgccacataaaccagtgagcgataagctgagcgaagaggtcgatgagatctggaacgacttagagaactacataaagaagaatgaagataaggctagagacaggctactcgcagcatttcctgtgtctaaagatgacgtgccggacaggctgcacgccgagagcaccccggaactatcccgcgacgtaggcaggtcagtgtctaccctgagcctgcctgaatcccaagcattattgaccccggtcaagagtagagccgggagggcttcaagagctaattgtccgttcgaagaagatcttatatctaaagaaggctcatttatgagtcttaatcgcttaagcctcgcctccgaaatgcccctgatggacaatccatatgatctggcaaatagtggattgtctcagactgatccggagaatcccgatttggggatggaggcaactgacaagaccaagagccgggtctttatgatggctagacagtattcccaaaagatcaagaaagccaaccaactgctcaaagtcaagtccctggaactggagcaacctccggcctctcagcaccaaaaaagtatgcataaggatctggctgcaattctagaggagaaaaagcaaggaggacctgctattggggctaggatagctgagtatagccagctatacgaccaaatcgtgttccgtgagtctccgctgaagatccagaaggatggttgggcatccccccaggagtctagtctgctccggagcgtcagcccctcccaagtgcatcatggatctggcgactggttactccacagtacctacagtaacggtgaactggcagatttctgcctgcctcccgaacaggacttacgctccagataccctacattcgagatcaatacaaaaagcacaccccgacagctttcagctgcctgtagtgtgccttccttgcaaacatccgaccccttgcccggcagcgttcagagatgtagtgtggtcgtgagccagcctaacaaggagaactggtgccaggaccacctgtacaattctctaggacgaaaaggcatcagcgccaaaagccagccctaccatcggtcgcagagctccagctcagtgctcattaacaaaagtatggactccattaactatcctagtgatgtgggtaagcagcagttgctgagtctgcatcgctcctcccgctgtgagtctcatcaggatctgcttcctgacatagctgactcccatcagcaagggacggaaaaactttctgacctgacactgcaagactcacagaaagttgtggtcgtgaatcgcaacttaccactgaacgcccagattgccacacagaattatttctcaaatttcaaagaaaccgacggtgatgaagacgactacgtggagattaagtcagaggaagatgaatctgagcttgaactgtcccacaatagaagacggaaatccgacagtaagtttgttgacgccgacttctcagacaatgtgtgctcagggaacactttgcactccctaaatagcccacgcactcccaagaagcccgtgaattctaaactcgggcttagtccttatctgacgccctacaatgacagcgacaagttgaatgactacctgtggagggggccttcgcccaaccagcagaacatagtgcagtctctgcgcgaaaagtttcaatgcctcagcagttccagttttgcatag

SEQ ID NO: 29278 - DNA, 141 bp, Artificial Sequence
  derived and/or modified sequence
atggaattatcagactccgatcggcctgttagctttggatcaacgtcaagctctgcatcaagccgcgactcacacggaagcttcgggtccagaatgacattagtctccaattcccatatgggcctctttaaccaagactag

SEQ ID NO: 29279 - DNA, 4158 bp, Artificial Sequence
  derived and/or modified sequence
atggagctcagcgattcggacagaccggtttcattcgggtccactagcagctctgcctcttctcgtgattctcacgggtcattcggctcccgcatgactctggtgtccaattctcatatggggcttttcaaccaggataaggaggtgggtgctatcaaactggaacttattccggcgagaccattctctagctccgagctccagagagacaacccggctaccgggcagcaaaacgccgatgagggctcagagcgccctccccgagcccaatggagggtcgatagcaacggcgcgccgaaaactatcgcggacagcgcaacttccccaaagctactttacgtggatagagtcgtccaggagatcctcgagaccgagcggacgtacgtccaggatctgaagagtatcgttgaggattatcttgactgcattagagatcagactaagctacctttgggaactgaggagcgcagcgccctgtttgggaacatccaggacatatatcatttcaattccgagttgttacaggacttagaaaattgcgaaaacgatccagttgcaattgctgaatgtttcgtcagtaagtctgaggagttccatatttacacccagtactgcacaaactacccacggagtgtggcagtgctgacagagtgcatgcgaaacaaaatcctggccaagttctttcgtgagagacaggaaacacttaaacactccttacccctcggcagctatctccttaagccagttcagagaattctgaagtatcatctgctcctacacgaaatcgaaaatcaccttgacaaggacactgagggctatgacgttgtgttagatgccatcgataccatgcagcgcgtggcttggcacattaacgacatgaagaggaaacatgaacatgctgtgaggcttcaggaaatccaatcccttctcaccaactggaaaggccccgatcttaccagctacggggaactggtgctcgagggaacctttcgtatccagcgggcaaagaatgagagaactctgttcttgttcgataaactgctcctgataaccaagaagcgcgatgacacattcacgtataaggcccacatcttgtgtggaaatctcatgctcgtggaagtgatccctaaagagccactgtcattttctgtgtttcattataagaacccaaagctacagcatacggtgcaggccaaaagtcaacaggataagcgtctgtgggtcctccatttgaagcgcctgattctggagaaccacgcagctaagattccagccaaggctaagcaggccattctggagatggacgccatccatcatccgggtttctgctatagtcctgaaggcgggactaaagcccttttcggatcaaaggaaggttctgcaccttaccgtctgcgacggaaaagtgagccaagttctcggagccacaaggttttaaaaacctccgaaaccgcccaggatattcagaaggtgagtcgggaggagggctctcctcagctgtctagcgcccgcccttccccagcccagagaaacagtcaaccgtcttcaagcactatgatttcagtccttcgggctggcggcgcccttagaaacatttggacagaccaccagattcggcaggccctgtttccaagtcgccgttcaccccaggagaacgaggacgacgaggatgactaccaaatgtttgtgccttcattttcgtcctccgatctgaacagtacaagactgtgcgaagattccacatcttccaggccgtgctcttggcatatgggccagatggagagtaccgagactagttcttccggtcaccggatagtccggcgagctagctctgccggcgaatcaaatacatgccccccagagattggaacaagcgatagaactcgagaactgcagaactcaccaaaaacggaaggccaggaagaaatgacacctttcggcagcagcattgagctgactatcgacgacatagatcacgtgtatgataatatttcctacgaggaccttaagttgatggtggctaagagagaggaagctgagagcacacctagtaagagtgcccgcgacagtgtgagaccaaagtctacccccgagctggcctttaccaaaaggcaagcgggccattccaaaggttctttgtatgcgcaaacagacggaacgctatcaggtggcgaagccagctctcagtcaactcacgagctccaagccgtggaggagaatatctacgacaccattggactccctgaccctccctcattggggttcaaatgcagttccctgaagagagccaagagaagcaccttcctgggactggaggccgacttcgtgtgctgcgattcacttagaccttttgtttcacaggacagcctgcagctgagcgaggacgaggccccatatcaccaggccacaccggatcacggctatctcagccttctttatgacagtcctagcggtaacctttccatgccccacaagccggtgtctgataagctgtcagaggaggtcgacgagatttggaatgacctcgaaaactacattaagaagaacgaggataaggcacgcgaccgcctgcttgctgcttttccagtctcaaaagatgatgtccccgaccggctgcacgctgaaagtactcctgagttatcacgggacgtcgggagatctgtctccacactgtctttgccggagtcccaggctctactaacaccagtgaaaagtagggcgggacgcgcctcccgagccaattgtcccttcgaagaggacctcatttctaaggaaggttcttttatgagtttaaaccggctatcactagcgagcgagatgcctctgatggataatccatatgacctggccaacagcggcttgtcgcagaccgaccccgaaaaccccgacttagggatggaggccactgataagacgaagtctcgggttttcatgatggctcggcaatacagccagaagatcaaaaaagctaaccagttactgaaggtgaagtcgcttgaactggaacagccccctgcttcacagcaccagaagtcaatgcacaaagacctggctgcaattctcgaagagaagaaacaggggggacccgcaatcggagcacgaatagcggagtactctcagctgtatgatcaaattgtgttccgggaatcaccacttaagatccaaaaggatggttgggcctcccctcaggagtcttcacttctcagatcagtgtctccatcgcaagttcatcatggctccggggattggttgcttcatagcacctactcaaacggagaacttgctgacttttgtttacctcctgagcaggacctgcgctcccgataccccactttcgagatcaacaccaagtcaactcctcgtcagcttagtgccgcttgctctgtcccctccctccaaacttctgaccctctgccaggaagcgtgcagcggtgctcggtggtggtgtctcagcctaataaagaaaactggtgccaggatcatctatataatagcctagggcgcaagggcatcagtgcaaagtcacagccatatcaccgaagccaatccagctcctcagtgctgataaacaaatccatggatagcattaattatccctccgacgtgggcaaacagcagcttctcagcttacaccgatcgtccagatgtgagtctcaccaagacctgttgccagatatagctgattcccaccagcagggtaccgaaaagcttagcgatttgacgctgcaggacagtcaaaaagtggttgtggttaatcgaaacctgccactcaacgcccagatcgccactcaaaactatttctccaattttaaggaaacggatggagatgaggacgattatgtggaaattaagagcgaggaggacgagagtgagctcgagctttctcacaatagacggcgcaagagtgacagcaagtttgttgacgccgatttttcagacaatgtctgttccggaaataccctgcactctttgaatagcccgcggacgcccaaaaagcctgtcaacagtaaactaggactgagcccctacctcactccttacaatgatagcgataaattaaatgactatctctggagaggcccaagccccaaccagcaaaatatcgtccaatcgttacgagagaagtttcaatgtctttcatccagcagtttcgcctag

SEQ ID NO: 29280 - DNA, 2859 bp, Artificial Sequence
  derived and/or modified sequence
atggaactgagtgattctgaccgtcccgtgtcatttgggagcacaagctccagtgcatcatcccgggattcacatggctcgtttggctccaggatgacactcgtgtccaatagccacatgggacttttcaatcaggataaagaggtgggagctatcaaactcgaactgataccagctcgaccttttagctcgtccgagctgcagcgcgacaatccagcaaccggtcagcagaacgccgacgagggatctgagcgtcctcctagggcccagtggcgcgttgatagcaacggcgcgcctaagaccatcgccgattctgccacctctcccaaacttctctatgtcgaccgggtagtccaagagatcttggagaccgagcgcacatacgtgcaggacctaaagtcaattgttgaagactatctcgattgcatccgcgatcaaacaaagttgccactggggactgaggagcgcagcgccctctttggtaatatccaggatatatatcacttcaacagtgagcttctccaggatcttgagaattgcgagaatgaccccgtggctattgccgagtgtttcgtgagcaagtcagaggaattccatatctacactcagtactgcacaaattacccccgaagcgtagcagtacttaccgagtgtatgcgtaacaaaatacttgcgaagtttttcagagaacgacaagagacgctcaaacacagcctgcccctcgggtcttacctgttaaaaccagtgcagagaatcctcaagtaccatctgctgctgcacgaaatagagaatcacttggacaaagataccgagggctacgatgtggtactcgacgccatcgatacaatgcaaagagtagcatggcacatcaacgacatgaagaggaagcacgaacatgctgtgaggttgcaagagatccaatcactgcttactaattggaaaggccctgatttaaccagctacggcgagcttgttctggaggggacctttcgcattcagagggcaaaaaacgaacggacattattcctgttcgataagctgctgctcattacaaaaaagagggatgatacgtttacctacaaggctcatatcctttgtggtaatctgatgctggttgaagtgatccccaaggagcccctaagctttagtgtgtttcactataaaaatccaaagctccagcatacagtgcaggccaagtcacaacaagacaaaaggctctgggtcctccacttaaaacgactgatattggaaaatcacgccgccaagatccccgcgaaagccaaacaggcaatcctggaaatggacgccattcaccaccccgggttctgctacagtccggaagggggcacaaaggccctctttgggtccaaggaagggtcggccccttaccggctgcgtagaaagagcgagccaagtagtcggtcacacaaggtcctcaaaacatcggagaccgcacaggacatccagaaggtgtctagggaagaagggtccccacagctgagtagcgcccgaccctccccggcccagagaaatagccaaccaagtagttcaactatgatctctgtcctccgggctggcggcgctctccgaaacatatggaccgaccatcagatcaggcaggctttgtttcccagccgacgtagcccccaggaaaatgaggacgacgaagacgactaccaaatgtttgtcccatcttttagttcttccgacctgaatagcactcgactctgtgaagactcaacttcctcgcggccatgctcatggcatatggggcagatggaatcaaccgaaacttcctcatccggccaccgcattgtgcggagagcctcgtcggcaggggagtcaaacacctgtcccccagagatcggcacgtcagacaggacccgagagctgcagaactcacctaagaccgaaggacaggaagaaatgaccccgtttggaagctccatcgaactgaccatcgacgatattgaccacgtatatgataatatctcgtatgaggacttaaagcttatggtggcgaagagagaggaagctgagagcacaccatctaaatccgcacgtgatagcgtgaggcccaagagtaccccagagttagcttttaccaaacgacaggccggccactccaaagggtctctttatgcccagaccgatggtacactttctgggggcgaagcctcaagtcagtccacccatgaactgcaggccgtggaagagaatatctacgacacgatcgggcttcctgacccaccatcacttggattcaaatgcagcagtcttaaacgcgcgaaaaggtcaacattcctgggacttgaagccgactttgtgtgctgtgactctttgcgtccttttgtgtctcaggattcactgcagttgagcgaggacgaagccccataccaccaagcgacaccagaccatggatacctgtcactcctttatgattcccctagtggaaatttgtccatgcctcacaaacccgttagcgataagctgtctgaggaggtcgacgaaatctggaacgacttggagaactatattaaaaaaaacgaagataaagcacgagaccggttgctggccgctttccctgtgtcaaaggacgatgtgccggaccggctccatgcagaaagcacaccagagctgagccgggatgtggggcgctctgttagcacattatcactgccagaaagccaagcacttctgacaccggttaagagccgagctggaagagcctcgagagccaattgcccatttgaggaagacttgatctccaaggagggatcctttatgtccctgaaccggctctccttagcctccgagatgacgctctgccaggccctctgtcgagacgccgcttggtag

SEQ ID NO: 29281 - DNA, 4158 bp, Artificial Sequence
  derived and/or modified sequence
atggagctgagtgacagcgacaggcctgtgtcctttggcagcaccagcagcagcgccagcagccgggacagccacggcagctttggcagcaggatgaccctggtgagcaacagccacatgggcctcttcaaccaggacaaggaggtgggcgccatcaagctggagctgatcccagcccggcccttcagcagcagcgagctgcagagggacaacccagccaccggccagcagaatgctgatgagggcagcgagcggcccccccgggcccagtggagggtggacagcaatggagcccccaagaccatcgctgacagcgccaccagccccaagctgctgtatgtggacagagtggtgcaggagatcctggagacagagaggacctacgtgcaggacctgaagagcatcgtggaggactacctggactgcatccgggaccagaccaagctgcccctgggcacagaggagaggtctgccctgtttggaaacatccaggacatctaccacttcaacagcgagctgctgcaggacctggagaactgtgaaaatgaccctgtggccatcgcagaatgttttgtgtccaagtctgaggagttccacatctacacccagtactgcaccaactaccccaggtctgtggccgtgctgacagagtgcatgaggaacaagatcctggccaagttcttccgggagcggcaggagaccctgaagcacagcctgcccctgggcagctacctgctgaagcctgtgcagaggatcctgaagtaccacctgctgctgcacgagattgagaaccacctggacaaggacacagagggctatgatgtggtgctggatgccatcgacaccatgcagagggtggcctggcacatcaatgacatgaagaggaagcatgaacatgctgtgcggctgcaggagatccagagcctgctgaccaactggaagggccctgacctgaccagctatggagagctggtgctggagggcaccttccgcatccagagggccaagaatgaaagaaccctcttcctgtttgacaagctgctgctgatcaccaagaagagagatgacaccttcacctacaaggcccacatcctgtgtggcaacctgatgctggtggaggtgatccccaaggagcccctgtccttctctgtgttccactacaagaaccccaagctgcagcacacagtgcaggccaagagccagcaggacaagaggctgtgggtgctgcacctgaagaggctcatcctggagaaccacgccgccaagatcccagccaaggccaagcaggccatcctggagatggatgccatccaccaccctggcttctgctacagccctgagggcggcaccaaggccctgtttggcagcaaggagggcagcgccccctaccgcctgcggaggaagtctgagcccagcagccgcagccacaaggtgctgaagaccagcgagacagcccaggacatccagaaggtgtcccgggaggagggcagcccccagctgagcagcgcccggcccagccctgcccagaggaacagccagcccagcagcagcaccatgatctctgtgctgcgggccggcggggccctgaggaacatctggacagaccaccagatccggcaggccctcttccccagccgccgcagcccccaggagaatgaagatgatgaagatgactaccagatgtttgtgcccagcttcagcagcagtgacctgaacagcacccggctgtgtgaggacagcaccagcagccggccctgctcctggcacatgggccagatggagagcacagagaccagcagcagcggccacagaattgtgagaagagccagcagcgctggggagagcaacacctgccccccagagatcggcaccagtgacaggacccgggagctgcagaacagccccaagacagagggccaggaggagatgacccccttcggcagcagcattgagctgaccattgatgacatcgaccacgtgtatgacaacatctcctatgaggacctgaagctgatggtggccaagcgggaggaggccgagagcacccccagcaagagcgcccgggacagcgtgcggcccaagagcaccccagagctggccttcaccaagaggcaggccggccacagcaagggcagcctgtatgcccagacagatggcaccctgagcggcggggaggccagcagccagagcacccatgagctgcaggccgtggaggagaacatctatgacaccatcggcctgcctgacccccccagcctgggcttcaagtgcagcagcctgaagagggccaagaggagcaccttcctgggcctggaggccgactttgtgtgctgtgacagcctgcggccctttgtgtcccaggacagcctgcagctgtctgaagatgaggccccctaccaccaggccaccccagaccacggctacctgagcctgctgtatgacagccccagcggcaacctgtccatgccccacaagcctgtgtctgacaagctgtctgaggaggtggatgagatctggaatgacctggagaactacatcaagaagaatgaagacaaggcccgggaccggctgctggccgccttccctgtgtccaaggatgatgtgcctgaccggctgcacgccgagagcaccccagagctgagcagagatgtgggccgctctgtgtccaccctgagcctgcctgagagccaggccctgctgacccctgtgaagagcagagctggccgggccagccgggccaactgcccctttgaagaagatctcatcagcaaggagggcagcttcatgagcctgaaccggctgagcctggccagcgagatgcccctgatggacaacccctatgacctggccaacagcggcctgagccagacagatcctgagaacccagacctgggcatggaggccacagacaagaccaagagcagggtcttcatgatggcccggcagtacagccagaagatcaagaaggccaaccagctgctgaaggtgaagagcctggagctggagcagcccccagccagccagcaccagaagtccatgcacaaggacctggccgccatcctggaggagaagaagcagggcggccctgccatcggggccagaattgctgagtacagccagctgtatgaccagatcgtgttccgggagagccccctgaagatccagaaggatggctgggccagcccccaggagagcagcctgctgcggtctgtgagccccagccaggtgcaccacggcagcggggactggctgctgcacagcacctacagcaatggagagctggccgacttctgcctgcccccagagcaggacctgcggagccgctaccccacctttgagatcaacaccaagagcaccccccggcagctgtctgctgcctgcagcgtgcccagcctgcagaccagtgaccccctgcccggctctgtgcagcgctgcagcgtggtggtgtcccagcccaacaaggagaactggtgccaggaccacctgtacaacagcctgggcaggaagggcatcagcgccaagagccagccctaccacaggagccagagcagcagctctgtgctgatcaacaagtccatggacagcatcaactaccccagtgatgtgggcaagcagcagctgctgagcctgcacaggagcagccgctgtgagagccaccaggacctgctgcctgacattgctgacagccaccagcagggcacagagaagctgagtgacctgaccctgcaggacagccagaaggtggtggtggtgaacagaaacctgcccctgaatgcccagatcgccacccagaactacttcagcaacttcaaggagacagatggagatgaagatgattatgtggagatcaagtcagaagaagatgagagcgagctggagctgagccacaacagaagaaggaagagtgacagcaagtttgtggatgctgacttcagtgacaacgtgtgcagcggcaacaccctgcacagcctgaacagccccaggacccccaagaagcctgtgaacagcaagctgggcctgagcccctacctgaccccctacaatgacagcgacaagctgaatgactacctgtggaggggccccagccccaaccagcagaacatcgtgcagagcctgcgggagaagttccagtgcctgagcagcagcagctttgcctag

SEQ ID NO: 29282 - DNA, 141 bp, Artificial Sequence
  derived and/or modified sequence
atggagctgagtgacagcgacaggcctgtgtcctttggcagcaccagcagcagcgccagcagccgggacagccacggcagctttggcagcaggatgaccctggtgagcaacagccacatgggcctcttcaaccaggactag

SEQ ID NO: 29283 - DNA, 2859 bp, Artificial Sequence
  derived and/or modified sequence
atggagctgagtgacagcgacaggcctgtgtcctttggcagcaccagcagcagcgccagcagccgggacagccacggcagctttggcagcaggatgaccctggtgagcaacagccacatgggcctcttcaaccaggacaaggaggtgggcgccatcaagctggagctgatcccagcccggcccttcagcagcagcgagctgcagagggacaacccagccaccggccagcagaatgctgatgagggcagcgagcggcccccccgggcccagtggagggtggacagcaatggagcccccaagaccatcgctgacagcgccaccagccccaagctgctgtatgtggacagagtggtgcaggagatcctggagacagagaggacctacgtgcaggacctgaagagcatcgtggaggactacctggactgcatccgggaccagaccaagctgcccctgggcacagaggagaggtctgccctgtttggaaacatccaggacatctaccacttcaacagcgagctgctgcaggacctggagaactgtgaaaatgaccctgtggccatcgcagaatgttttgtgtccaagtctgaggagttccacatctacacccagtactgcaccaactaccccaggtctgtggccgtgctgacagagtgcatgaggaacaagatcctggccaagttcttccgggagcggcaggagaccctgaagcacagcctgcccctgggcagctacctgctgaagcctgtgcagaggatcctgaagtaccacctgctgctgcacgagattgagaaccacctggacaaggacacagagggctatgatgtggtgctggatgccatcgacaccatgcagagggtggcctggcacatcaatgacatgaagaggaagcatgaacatgctgtgcggctgcaggagatccagagcctgctgaccaactggaagggccctgacctgaccagctatggagagctggtgctggagggcaccttccgcatccagagggccaagaatgaaagaaccctcttcctgtttgacaagctgctgctgatcaccaagaagagagatgacaccttcacctacaaggcccacatcctgtgtggcaacctgatgctggtggaggtgatccccaaggagcccctgtccttctctgtgttccactacaagaaccccaagctgcagcacacagtgcaggccaagagccagcaggacaagaggctgtgggtgctgcacctgaagaggctcatcctggagaaccacgccgccaagatcccagccaaggccaagcaggccatcctggagatggatgccatccaccaccctggcttctgctacagccctgagggcggcaccaaggccctgtttggcagcaaggagggcagcgccccctaccgcctgcggaggaagtctgagcccagcagccgcagccacaaggtgctgaagaccagcgagacagcccaggacatccagaaggtgtcccgggaggagggcagcccccagctgagcagcgcccggcccagccctgcccagaggaacagccagcccagcagcagcaccatgatctctgtgctgcgggccggcggggccctgaggaacatctggacagaccaccagatccggcaggccctcttccccagccgccgcagcccccaggagaatgaagatgatgaagatgactaccagatgtttgtgcccagcttcagcagcagtgacctgaacagcacccggctgtgtgaggacagcaccagcagccggccctgctcctggcacatgggccagatggagagcacagagaccagcagcagcggccacagaattgtgagaagagccagcagcgctggggagagcaacacctgccccccagagatcggcaccagtgacaggacccgggagctgcagaacagccccaagacagagggccaggaggagatgacccccttcggcagcagcattgagctgaccattgatgacatcgaccacgtgtatgacaacatctcctatgaggacctgaagctgatggtggccaagcgggaggaggccgagagcacccccagcaagagcgcccgggacagcgtgcggcccaagagcaccccagagctggccttcaccaagaggcaggccggccacagcaagggcagcctgtatgcccagacagatggcaccctgagcggcggggaggccagcagccagagcacccatgagctgcaggccgtggaggagaacatctatgacaccatcggcctgcctgacccccccagcctgggcttcaagtgcagcagcctgaagagggccaagaggagcaccttcctgggcctggaggccgactttgtgtgctgtgacagcctgcggccctttgtgtcccaggacagcctgcagctgtctgaagatgaggccccctaccaccaggccaccccagaccacggctacctgagcctgctgtatgacagccccagcggcaacctgtccatgccccacaagcctgtgtctgacaagctgtctgaggaggtggatgagatctggaatgacctggagaactacatcaagaagaatgaagacaaggcccgggaccggctgctggccgccttccctgtgtccaaggatgatgtgcctgaccggctgcacgccgagagcaccccagagctgagcagagatgtgggccgctctgtgtccaccctgagcctgcctgagagccaggccctgctgacccctgtgaagagcagagctggccgggccagccgggccaactgcccctttgaagaagatctcatcagcaaggagggcagcttcatgagcctgaaccggctgagcctggccagcgagatgaccctgtgccaggccctgtgcagagatgctgcctggtag

SEQ ID NO: 29284 - DNA, 4158 bp, Artificial Sequence
  derived and/or modified sequence
atggagctgagcgacagcgaccggcccgtgagcttcggcagcaccagttcctccgcctcctcacgtgactcccacgggagtttcggatctcgaatgacgctagtgagcaactcccacatggggctctttaaccaagacaaggaggttggagcaatcaaactcgagttgattccagctcggcccttttcctcaagcgagctgcagcgtgataaccccgctacagggcagcaaaacgcggacgaaggaagtgaacgcccccccagggcacagtggcgggtggactcaaacggcgctcccaagactatcgctgacagcgctacaagccctaaactgttgtacgtggatcgggtggtgcaggagattttagaaaccgagaggacgtatgttcaggatctgaagtctatagttgaagactaccttgattgtattagggatcagaccaagcttccacttgggaccgaggaaagatccgcccttttcgggaatattcaggatatttaccattttaactccgagctgcttcaagacctcgagaattgcgagaacgatccagtcgccatcgcggagtgcttcgtgtcaaagtctgaggaatttcacatttacacccagtattgcactaactacccccggtctgtagctgtgcttactgagtgtatgaggaacaaaatcctggccaagttctttagggaacgccaggaaactctgaaacacagcttaccgctgggctcctacttgctgaaaccggtccagcgtatcttgaagtaccacctgctgcttcatgagatcgagaatcatctcgataaagacacagagggctacgacgtagtgctggacgcaattgacacaatgcagcgagtagcctggcatatcaatgacatgaagcgcaagcacgaacacgccgtgcgactccaggaaatccagagtctgttgacaaattggaagggcccggacctcacttcatacggggaacttgttttggaaggaacattcaggattcagcgcgctaaaaatgaacggacactgtttctctttgataagcttttactgatcaccaagaagcgggatgacacctttacctataaggcacacatactgtgtggaaacctcatgctcgtggaagtgatccccaaagaacccctctctttcagtgtctttcactataagaatcctaagcttcagcacactgtacaggcaaagagtcaacaagataagagactgtgggtgttacatttgaagaggctaattctcgaaaaccacgcagccaagattcccgccaaagctaagcaggcaattttggagatggacgccattcatcacccaggtttttgctacagcccagaaggagggaccaaagccttgttcggatccaaggaaggcagtgccccttacaggctccgcagaaaatcagaaccatcttccaggagccataaagtccttaaaaccagcgagaccgcccaggacatccagaaggtgtcccgggaggaaggctcgccgcaactgtcttcggctcgcccatctccagcccagcggaattcgcagccctcctcatctaccatgatttccgttctgcgggcaggaggggcactaagaaacatttggactgaccatcaaatacggcaagctctgtttcccagtagacggagtccacaggagaatgaagatgatgaggatgactatcagatgttcgttccgtcgttttcaagctcggaccttaatagcactaggctgtgcgaagactctaccagctcccggccttgctcctggcacatggggcagatggaatctaccgagactagttcaagcggacaccggatcgttcgccgggcttcttcagccggagagagcaacacatgtcccccagaaataggcacgtccgataggacccgcgaactccagaatagccccaaaaccgaagggcaggaagagatgacccctttcggctctagcatcgagctgacaatcgacgacatcgatcatgtttatgacaatatttcctacgaagatctcaaactgatggtcgccaagagggaggaagctgagagtacgccttcgaaatcggcgagggacagcgtcagacccaaaagtacgccagagctggcctttactaaacggcaggctggccactctaagggctccctgtacgcacagaccgatggtactttgtccgggggggaagctagtagccaatcaactcacgagctgcaggctgtcgaggagaatatctacgacacgatcggcctccccgaccccccaagtttgggctttaaatgcagctcccttaaacgtgcaaagaggagcacatttctcggacttgaggcagattttgtttgttgcgactccttacgcccctttgtgtcccaggacagcctgcagctctctgaagatgaagcgccctaccatcaggccaccccagaccacggctatttgagcctcctttacgactctcctagcggcaatttatcaatgcctcacaagccggtgtccgacaaactgagcgaggaagtggatgagatatggaacgacctggagaactatattaagaaaaatgaggacaaagcgagagatcgactgctggccgcgtttcccgtgagcaaagacgacgtgccagaccggcttcacgctgaaagcactccggaactgtcccgagacgtcgggcgttcagtttccactctctccttgcctgagagtcaggcactgctcactccagtgaagtcaagggcagggagagccagcagagctaactgtccgtttgaggaagacctcatcagtaaggaggggtccttcatgagtcttaacaggctgtctctggccagcgagatgccactgatggacaatccgtacgacctggcgaactccgggcttagccagaccgatccagaaaacccagatctgggaatggaagctacggataagactaagagtagagtgttcatgatggctcgacaatacagtcagaagatcaagaaagccaaccagctcttaaaagtcaaatccttagagttggagcagccacctgccagtcaacatcaaaagagcatgcacaaagacttagctgctatcctggaagagaagaagcaggggggcccagccatcggggcccggatcgcagaatacagtcagctgtacgaccaaatcgtattcagagaatcgcccctcaaaatccaaaaggatggatgggcaagtccacaggaaagttctctccttagatcagtctcccccagtcaggtgcaccacggctccggcgactggctgcttcacagtacatacagtaacggagagctggccgatttctgccttccacctgagcaagacctgcgcagcaggtatcctactttcgagataaacactaagtcaacgccccggcagctcagcgccgcttgttccgtgccgagtcttcagacctccgatcccctaccaggaagcgtgcagcggtgctcggtagtggtgtcacagcccaacaaagagaattggtgccaggatcatctgtataatagcttgggtcgcaaggggattagtgccaaaagccagccctatcatcgaagtcaatcttcttccagcgtgctgattaacaagtccatggacagcatcaactatccctctgacgtgggcaaacagcagttgctgtccttgcacaggtctagccgctgtgagtctcatcaagatctgcttccagatatcgccgacagccaccagcagggaaccgagaaactgtccgacctgaccctgcaggattcacagaaagttgtcgtggtgaaccgcaacttgccgctgaacgcgcagattgcaactcagaattatttcagtaactttaaagagacagacggtgatgaggatgactacgttgagatcaagtccgaggaggatgagtctgagttggagctcagccataacaggcggcggaaaagcgattccaagttcgtggatgccgacttttccgacaacgtatgcagcggaaacacgttgcattctctcaactccccacggacaccaaagaagccagtgaactctaagcttggcctgtctccctacctgacgccatataacgacagcgataagctgaatgattacctgtggcgcggcccaagtcccaaccagcagaacattgtgcagtcattgcgggagaaattccagtgtctgtcttctagttcttttgcatag

SEQ ID NO: 29285 - DNA, 141 bp, Artificial Sequence
  derived and/or modified sequence
atggagctgagcgacagcgaccggcccgtgagcttcggcagcacctcctcctccgccagcagtcgtgatagccacggctcatttggtagccgcatgaccctggtgagcaattcccatatgggactctttaatcaggactag
